United States Patent Application Publication US 2024/0327476 A1 - sequence listing, part 106

SEQ ID NO: 203103 - DNA, 1443 bp, synthetic construct
  misc_feature 1..1443: note = Description of Artificial Sequence: Synthetic coding sequence
  source 1..1443: mol_type = other DNA
atggacgacctgcagagccagaacctgagcatggacatgaccgactctccacccgcactggctaacaatagattggaaaacgggatggcccaactgattacaactgaagcttggaacattaatagtacagacctggtggagggaagcagcgcacccgaactgaacccaaacggtaatgctacatacgtgatgactacacagggcccagttcaactgccagtggttctggagcagcacgtttttcagcacttgaattcgcctctggtgttgcctcaggaggctccatgttcatctagtacgatccataataatctgttccagggcgccgaagatcctgaagcacaaccccagctactggatcttcggatcccatctcaaccacaggagcctacactgcctttcgaagcagtactccagaatctgttcccttcccaaggaaccctggggccccccccttgccagccaccaccagggtatgcacccgttcctccacaaccttttagtagtcctctgagtcctcttgtgcctccagcgaccctgttggtgccgtatcccgtgattgtgccgctgcccgtgcctgtacccattccgatccctattccaatgccacagtccagtgaaagcaaattttccagcagtttcccgaaaccacccagtagttttggactccatccatttaagggcacccagactcccctggagaaggatgagcttaaacctttcgatattctgcagcctaaggagtacttccaactaagccggcacacagtcataaaaatggggtcagaaaatgaggccctggatctgagtatgaagtccgttccatggcttaaagctggagaagtgtcacccccaatattccaggaggacgcggcgcttgatttatccgtcgctgcacatcgaaaatctgaacctcctccagaaaccctgtacgatagtggagcctctgtcgattcctctgggcacactgtgatggagaagctgccctccggaatggaaattagctttgcccccgctacgtcacacgaggctcctgcaatgatggattcccacatatcttcctcggatgcagccaccgagatgctttctcagcccaaccatccttccggggaggtgaaagcagagaacaacattgagatggtgggcgaatctcaagcggcaaaggtgatcgtgagcgtcgaggacgctgtgcctacaattttttgcggaaaaatcaagggtctcagtggcgtgtctaccaaaaacttttctttcaagcgagaggacagtgttctgcagggatacgacattaactctcagggggaggagtctatgggaaatgcggaaccattaaggaaaccaataaagaatcgtagcatcaagttgaaaaaagtgaattcacaggaaattcatatgctgccgattaagaaacagagacttgccacttttttcccacgcaagtag

SEQ ID NO: 203104 - DNA, 1593 bp, synthetic construct
  misc_feature 1..1593: note = Description of Artificial Sequence: Synthetic coding sequence
  source 1..1593: mol_type = other DNA
atggacgacctgcagagccagaacctgagcatggacatgaccgacagcccgccagcccttgcaaacaataggcttgaaaacggaatggcccaactgataactacagaagcgtggaacattaactccactgacctggtgaagaaggcgctggtgactgtccccgcacccagcattctcaatccaccagccgaatcacagtccggtatggcactgaaagtggccgcaacagttttacagcctctgtgcttgggcgaatctccagtagtcatgccaatccacatgcaagtggagggatctagcgcccctgaactcaatcctaatgggaatgctacttacgtaatgacgactcaaggcccagtccagctgcccgttgtactcgaacagcacgtgttccaacacttgaactcacctctggtgctgcctcaggaggccccatgcagcagcagcactatccataataatctgtttcagggggccgaggacccggaggcccagcctcaattgttagacttgcgaatcccgtctcagccacaggagcctacattaccgtttgaagccgttctgcagaaccttttccccagtcagggtacattagggccccctccttgccagccgccaccaggctacgctccagtcccaccacaaccatttagcagccccctgtctcccctggtgccccccgcaactctgttagtcccctatcctgttatcgtccccctgcccgtgcctgtgcccatccctattcccattccaatgccacagagctcagaatccaaattttccagctcgttcccaaaaccaccttccagctttggactccatccattcaagggcacccaaactccgctcgagaaagatgagctgaagccattcgatatcctgcagccgaaggagtattttcaattgtcccgccacacagtgatcaagatggggtctgagaacgaagcattggacctctccatgaagagcgttccttggctgaaggccggagaggtgagcccacctattttccaggaagacgccgccctggatctgtctgtagcagcccacagaaagagcgagcccccccccgagactctgtacgatagcggagcctccgtggattcctctggccatactgtgatggagaaacttcccagcggcatggaaattagcttcgctcctgcaaccagccacgaggctcccgctatgatggattcccacatatccagttcagacgctgctaccgaaatgctctctcagcctaatcaccctagcggggaggtgaaggctgagaataacatagaaatggtgggagagagtcaggccgccaaggtcattgtttctgtggaggacgctgtccctacaatcttctgcggaaaaatcaagggcctgtccggcgtgagcacaaaaaacttttccttcaaaagagaggattctgtactgcaggggtacgatattaattcccagggggaagagtccatgggtaacgctgaacctctaaggaagcccatcaagaaccgcagtatcaagcttaagaaggttaactcacaggaaattcacatgttgccaatcaaaaaacagaggctagctaccttctttcctcggaaatag

SEQ ID NO: 203105 - DNA, 1593 bp, synthetic construct
  misc_feature 1..1593: note = Description of Artificial Sequence: Synthetic coding sequence
  source 1..1593: mol_type = other DNA
atggacgacctgcagagccagaacctgagcatggacatgaccgacagcccaccagcgctggcaaacaatagactcgagaacggaatggcacagctcatcactacggaagcttggaacatcaatagtacggatctggtgaagaaggcactggtgacagtacccgccccctctattctcaacccccctgctgaatctcagagcgggatggctctcaaagttgctgctacagtgctccaacctctctgcctgggagagagtccagttgttatgccaatccacatgcaggtggaagggtcatccgcgccagagcttaatcccaacggcaacgctacctatgtcatgactactcaaggtcccgttcagctgcctgttgtgttggagcagcacgtcttccaacaccttaactctccgctcgtgttaccccaggaggcaccgtgctccagctcaacgatccataacaatctcttccagggtgcagaggaccccgaagcccagccccagttgctggacctacgaattcccagccaacctcaggagcctacactccctttcgaggctgtgctccaaaaccttttcccctcgcagggcaccctggggcctccgccgtgtcaaccccctcctggatacgccccagtcccgccccagcccttcagcagccccctgagcccgctcgtgccacccgctacgcttctggtcccttaccctgtgattgtgcccttaccagtcccagtcccaattcctattcctattccgatgccccagagtagcgaaagtaagttctcgtcttctttccctaaacctccatccagtttcggattgcacccattcaagggtacccagactccactggaaaaggatgagctaaagccatttgatattcttcaacctaaagagtatttccagctgtctcggcatacagtgataaagatgggcagcgagaacgaagctcttgatttgtccatgaagtctgttccctggctcaaggcaggcgaggtttctccaccaatcttccaggaagacgccgccctggacctatccgtggccgcccacaggaagtctgaaccgccccctgagactctgtacgatagtggcgcgtcagtggattcaagcggacacacagtcatggaaaagctgcccagcggtatggagatatcatttgctccagcaaccagccacgaggccccagctatgatggactcacacatcagctccagcgacgcagctaccgaaatgctgtcgcagcctaatcaccctagcggcgaggtgaaagctgagaacaatatcgaaatggtcggcgaatcacaggcagccaaggttattgttagcgtggaagacgctgtgccgactattttttgtggaaaaatcaaggggctgagcggagtaagtaccaagaattttagctttaaaagagaagacagcgtattacagggatacgatataaatagtcagggagaggagtccatgggtaatgccgagcccctgagaaagcctataaaaaacagatcgattaagctgaaaaaggtgaacagccaggaaatacacatgctgccaatcaagaaacagcgcctggcaacattctttccccgcaagtag

SEQ ID NO: 203106 - DNA, 885 bp, synthetic construct
  misc_feature 1..885: note = Description of Artificial Sequence: Synthetic coding sequence
  source 1..885: mol_type = other DNA
atgcagccccggcggcagcggctgcccgccccctggagcggccccagaggcccaagaccaaccgcaccgctgctcgcactccttctgctcctggccccagtcgccgcaccagcagggagtggagatccagatgaccctggacaaccccaggacgccggcgtccctagaagactgctgcagcaagccgcccgcgcagctctgcacttcttcaacttccgcagcgggtctccaagtgctctgagagtactcgctgaggttcaggaaggcagggcctggataaaccctaaagaaggctgcaaggtccacgtagtgttctctacagagcggtacaaccccgagtcactcctgcaggaaggcgaaggtaggctgggtaaatgctccgctagagttttctttaaaaatcaaaaaccacggcctacaattaacgttacctgcactagattgattgaaaagaagaaacgccaacaggaagattatttgctatataagcagatgaagcagctgaagaatcctctggaaatagtaagtatcccagataatcatggccatatcgaccccagcttgcggctcatttgggatctcgctttccttggctcttcctacgtcatgtgggaaatgacaacccaggtctcccattactatctcgcccaacttacgagcgtgcgacagtggaagacaaacgatgacacaatcgatttcgactataccgtcctcttgcacgagctatcgacacaggaaatcatcccttgcaggatacatctcgtttggtaccctgggaagcctcttaaagtcaagtaccattgccaggagttacagactcccgaggaggcgtcaggaaccgaggagggttctgccgtggtcccgaccgaactaagcaacttttag

SEQ ID NO: 203107 - DNA, 687 bp, synthetic construct
  misc_feature 1..687: note = Description of Artificial Sequence: Synthetic coding sequence
  source 1..687: mol_type = other DNA
atgcagccccggcggcagcggctgcccgccccctggagcggcccccgcggaccaagacctaccgcgcccctgctcgccttgctcctgctgctcgctccagttgctgccccagccggatcaggggatccagacgaccccggacagcctcaggatgctggcgtacctaggcgcttgttacaacaggctgctcgcgctgctctgcacttcttcaatttcagaagcggttccccaagcgccctccgagttctggcagaagtgcaggaggggagagcatggatcaatcccaaggaagggtgtaaggtccatgtggtttttagtaccgaaagatataaccccgaaagcctgctacaggagggcgaaggcaggctcggaaaatgttctgccagagtcttttttaaaaatcagaagccacgaccaacaattaacgtaacctgcacaagacttattgagaagaagaagcggcagcaggaggattacctcctgtataagcagatgaagcagttgaagaatccgctggaaatcgtgagcatccccgataaccacggccacatcgatcctagcttgcgccttatttgggatctggcctttctcggctcgtcttacgtaatgtgggagatgaccacccaggtctctcactattatctggcccagctaacatcagtgagacagtgggtgcgaaagacatag

SEQ ID NO: 203108 - DNA, 1008 bp, synthetic construct
  misc_feature 1..1008: note = Description of Artificial Sequence: Synthetic coding sequence
  source 1..1008: mol_type = other DNA
atggtgcggcgggaccggctgcggcggatgcgggagtggtgggtgcaggttggactgcttgcggtaccacttctcgccgcatacctgcacatccctccaccccagctgtctcctgctttgcactcctggaaatcctccggaaaatttttcacctataaggggctgaggattttctaccaggattctgtcggcgtcgttgggtctccagaaattgtcgtcctgctgcacgggttcccaaccagttcgtatgattggtataaaatctgggagggcctaactctccggtttcacagagtgattgccctcgactttctgggctttgggttttccgacaagcctcgaccacaccattatagtatattcgagcaggccagtattgttgaggcacttctgcgccatttgggacttcagaacagacggataaatctactgtcccacgattacggagacatagtggcgcaggaactactgtatcggtacaagcagaatagatcaggccgcttgaccattaaaagcctgtgtctgtcaaacggaggcatctttcccgagacccacagacctctcttgttgcaaaagctgctgaaagatggcggagtcctctcaccaatattaactcgactgatgaatttttttgtattcagtagaggtctgacacctgtttttgggccctacacgaggccatctgaaagcgaattatgggacatgtgggccgggatcaggaataatgacggcaatcttgtaatcgactctctgcttcagtacataaatcaacgaaaaaaattccgcagaagatgggtcggggccctcgctagcgtaactatccccatccactttatctacggacccctggatccagtaaatccgtacccagagtttctggagctgtataggaaaactttgccccggtctacagtgagcattctggatgaccatatctcacattacccacaactggaggaccctatgggcttcttgaatgcctacatgggcttcattaacagtttctag

SEQ ID NO: 203109 - DNA, 492 bp, synthetic construct
  misc_feature 1..492: note = Description of Artificial Sequence: Synthetic coding sequence
  source 1..492: mol_type = other DNA
atgcggcggctgctgatccccctggccctgtggctgggcgccgtgggggtgggcgtcgccgagctgacggaggcgcagagacggggtctccaggtagcacttgaggagtttcataagcatccacccgttcagtgggcattccaggagactagcgtggaaagcgcagtcgataccccatttccagcgggcattttcgtccgcctcgagttcaagctgcagcaaacttcatgtcgcaagagagactggaaaaaacccgagtgtaaggtgcgtccgaacggacgcaagagaaaatgcctggcatgcattaagctggggtcagaggacaaggtgctcgggcgcctggtccattgcccaattgaaacccaagttttgcgggaggccgaggagcaccaggaaacacagtgccttagggtgcaacgcgccggagaagatcctcactctttctacttccctgggcaattcgccttcagtaaggcactgccaaggagctag

SEQ ID NO: 203110 - DNA, 492 bp, synthetic construct
  misc_feature 1..492: note = Description of Artificial Sequence: Synthetic coding sequence
  source 1..492: mol_type = other DNA
atgcggcggctgctgatccccctggccctgtggctgggcgccgtgggtgtgggcgtggccgagctaacagaggcccagagacggggcctgcaggtggccctagaagaatttcacaaacacccacccgttcaatgggcctttcaggagacatcagtcgagtctgccgtcgatacaccatttccagccggcatctttgttcgacttgagttcaagctgcagcagacctcgtgccggaagcgtgactggaagaaaccggaatgtaaagttcgtcccaatggccggaagaggaagtgcctggcctgtattaagctgggaagtgaagataaagtgctgggcaggttagtgcactgcccaattgagactcaagtcctccgcgaggccgaagagcatcaagagacacagtgtttgcgcgtccagcgggctggagaggatccccactcgttctacttccctggacagttcgccttttcaaaggcactcccccggagctag

SEQ ID NO: 203111 - DNA, 495 bp, synthetic construct
  misc_feature 1..495: note = Description of Artificial Sequence: Synthetic coding sequence
  source 1..495: mol_type = other DNA
atggccagcccccaccaggagcccaagcccggcgacctgatcgagatcttccgcctgggatatgagcattgggcactctacataggggacggctatgtgatccatctcgcccctccttccgaatatccaggggctggtagcagttccgtcttcagtgtgctcagcaattcagccgaagtcaagagagagcgtcttgaagatgtggtcggaggctgttgctatcgcgtgaacaattcactcgaccatgagtatcagccacgtcctgttgaagtcatcatcagctcggcaaaggagatggttggtcagaaaatgaaatactcaattgtgtccagaaattgcgagcattttgtcacacaactcaggtatgggaagtctaggtgcaagcaggttgagaaagccaaggtggaggttggtgtcgcgactgcgctagggattctagtcgtggcaggatgtagctttgctattaggaggtatcagaagaaggctacagcctag

SEQ ID NO: 203112 - DNA, 495 bp, synthetic construct
  misc_feature 1..495: note = Description of Artificial Sequence: Synthetic coding sequence
  source 1..495: mol_type = other DNA
atgggcctgcccgagcccaagcccaagcccggcgacctgatcgagatttttcgccttggttatgagcattgggccctgtatattggtgatggctacgtgatacacctggcgccaccttctgagtaccctggtgcaggtagtagcagcgttttctccgtgctgtctaattctgcggaggttaagagagagcggctcgaggacgtggtgggcggctgctgttatcgtgtcaacaactccttagatcatgaataccagcctagaccagtggaagtgatcatttcttccgctaaggagatggtgggtcagaagatgaagtacagtatcgtctctcgcaattgtgagcatttcgttacacagctgcggtacgggaaatcacgctgtaaacaggttgaaaaggccaaagtcgaggtcggcgttgccaccgcactgggtattctggtagtagctggttgctcctttgccattcgcagataccagaagaaggcaaccgcctag

SEQ ID NO: 203113 - DNA, 1389 bp, synthetic construct
  misc_feature 1..1389: note = Description of Artificial Sequence: Synthetic coding sequence
  source 1..1389: mol_type = other DNA
atggccagcaacagcagcagctgccccacccccggcggcggccaccttaacggatatcctgtgcccccttacgcctttttttttccaccaatgcttgggggcctgtcccctcccggcgcactgacaacccttcagcaccaactgcccgtctctggttacagcactccgtcaccggcaactatagagacacagtcaagctcaagtgaagaaattgtcccaagcccacccagtccaccccccctgcctcgcatttataaaccttgttttgtgtgccaggataaaagctccggataccattacggcgtttccgcctgtgagggatgcaagggttttttccgtcgctctattcagaagaatatggtgtacacatgccatcgggacaaaaattgtatcataaataaggtcactaggaaccgatgtcaatattgccgcctacagaaatgttttgaagttgggatgtccaaagagagtgtgcgtaacgatcggaacaaaaaaaaaaaagaggtccctaagcccgaatgtagtgagtcttatacgctaacaccggaagtgggggaacttatcgagaaggttaggaaggcccaccaagagactttccccgccctgtgccagctcggcaagtataccaccaataattcatccgaacagcgggtgtctctggacattgatttgtgggataaattctcggagctatctactaaatgcattatcaaaacagttgaattcgcaaaacaattacctggctttaccacgctaacaatcgctgaccagattacactgttgaaggcagcctgcctggatattctgatcctgcgcatttgcaccaggtatacacccgagcaggataccatgacattttctgatggccttactttaaacaggactcagatgcataacgccggcttcgggcccctgaccgacttagtgtttgccttcgctaatcagctgcttcctctggagatggacgacgccgagacgggactgctgagtgctatttgcctgatttgtggggataggcaggatctagagcagccagaccgggtcgacatgttacaggaacccctgttggaagccctaaaggtgtacgtccggaagaggcgccccagccgcccgcatatgttccccaaaatgctgatgaagattactgatttgcggtccatctcagccaaaggagcagagcgcgttattactctaaaaatggagatccccggtagtatgcctccgttaattcaggagatgctggaaaatagtgaaggtttagatacgctgagcggccagcctggagggggcggtcgagatggcggtgggctagcacccccccctgggagttgctccccgagtctctccccaagcagtaaccggtcctcacccgccacccactcaccctag

SEQ ID NO: 203114 - DNA, 1902 bp, synthetic construct
  misc_feature 1..1902: note = Description of Artificial Sequence: Synthetic coding sequence
  source 1..1902: mol_type = other DNA
atgtacgagagcgtggaggtgggcggccccacccccaaccccttcttggtggttgacttctataaccagaaccgtgcctgtctgttgccggagaagggactgcctgccccaggcccgtactccactccactccggactcctctttggaatggtagcaaccacagtatagagacgcaaagcagcagcagcgaggaaattgtgccttcgccaccgagtccaccacccttgccaagaatttacaagccttgttttgtatgccaagacaagtcctccggatatcattacggtgtctccgcgtgcgaggggtgcaagggatttttccggagatctatccagaaaaacatggtgtacacatgccaccgtgataaaaattgtataatcaataaggtgacaagaaatcgctgtcagtactgcaggctgcagaagtgctttgaagtgggaatgtccaaggagagtgtgagaaatgatcgtaataagaagaagaaggaagtgccgaagcctgaatgctccgagtcatatacactcactcccgaggtgggcgagttaatcgaatgcgcaaagaggaccaggaagccttctcttccctctgccagttgggctaacacactcagaactacggctcagaataatgtatccttatggactctgacaagtggcaccagttccgtgaatagtcctaaatgcatcatcaagactgtggagtttgctaaacagctccccggttttactactctaacaattgcggatcagataaccctgcttaaagccgcatgcctagacatcctgatcttgcggatttgtactcgatacactccggagcaagacaccatgacattttcagatggacttactctgaataggacccagatgcacaacgctggatttggtccattgacggacctagtctttgctttcgccaaccagctcctgcctctggagatggatgacgcggaaacagggctcctatctgccatctgtcttatctgcggcgaccgtcaagacctggagcagcctgatagggtggatatgctgcaggaacctctgttagaagcattgaaagtgtatgtgcgcaaaagaagaccttctagacctcacatgttccccaaaatgctgatgaagatcacagacttgagatccatttcagccaaaggcgccgagagggtgatcacactgaagatggaaattcccgggagcatgccacctctaatacaggagatgttagaaaattcggagggactcgacaccttgtctgggcagcctggtggcggaggccgtgatggaggtgggctgccccgccaggctgcagtagccccagcatccgctccagcccctacagaggcagcgcgccctccaactcctcgagacaggcctcgtcatatggacaccgccctggccctcaggcctggcttttcactgcccttttataggccttgtgaccccgcacctgccctcccaccacctgctctgcccgggagcacgggtgacctgccctggggcaccggtcgagaggaggcagccactccatggacggaagcctgggcactgtcaggactgccggccccgaccgcttgggcggatgtacgaggaaggggacaggagctcagcgaagcgcccggtccaggttcacaggacggcagctgggggccaagggtgcaccaggacacaccgctgccaagtagcccacacctgcaccaccagcaaacccccggcctggggagtccaattttgcggacacacaaaccgctcctgccatcctggggaactagtacttcccctttgccccgcctcgtgaccgaaggggtcggccagggcagaggcgtccctccggtgcataccttgccttatcagccccaagtgctgatcttagccggttttgtttttatcctgatcttcctgttctag

SEQ ID NO: 203115 - DNA, 1374 bp, synthetic construct
  misc_feature 1..1374: note = Description of Artificial Sequence: Synthetic coding sequence
  source 1..1374: mol_type = other DNA
atgtacgagagcgtggaggtgggcggccccacccccaaccccttcctagtcgtcgacttctataatcaaaaccgagcctgcttgctccccgaaaaagggcttcccgcccccggaccttattcaactccgcttcgcacacccctttggaatggatcaaatcattcaattgagacccagagtagttcctccgaagagatcgtgccatcccccccctctccaccacccctgccaaggatctataagccctgcttcgtgtgccaggataagtcctcgggctatcactacggcgtatccgcttgtgagggatgcaaagggttttttagacgttcaatccagaagaacatggtctacacatgccacagagacaagaactgcatcatcaacaaggtaacgaggaaccgctgtcagtactgcagattgcaaaaatgcttcgaggtgggtatgtccaaagaatccgtgagaaacgacaggaataaaaagaaaaaagaggtaccaaagcccgagtgttctgaaagttacactctcacgcccgaagttggagagcttattgagaaggttcgcaaggctcaccaggaaacatttcctgccctatgtcagctgggcaaatatactaccaacaattcatcggagcagcgcgtctcactggacatcgatctgtgggacaaattcagcgagttgtcgacaaagtgtattattaaaactgtggaatttgccaaacagctaccagggttcaccacacttaccattgcagatcaaataacactgctcaaagccgcgtgcttggatatcctgatactgagaatctgcaccaggtacacaccagaacaggacacaatgacattttcagatggcctgacccttaatcgcacacaaatgcacaacgctggattcgggccactaaccgatctggtgttcgctttcgccaaccaactgctgcccttagagatggatgatgccgagacggggctcctcagcgctatctgcctgatctgtggtgatcggcaagatctggagcagcctgaccgtgttgatatgctccaggagcctcttctggaggccctaaaggtctacgttcgcaagaggcgcccttcccggccccatatgtttcctaagatgctcatgaaaattacagatcttaggagcatcagcgcaaaaggggcggagagggttatcaccctgaagatggagattcccggtagcatgcccccgctcatccaggagatgctggagaattccgaggggctcgacaccctctccggtcagccaggcggcggcgggagagacgggggtggcctggcccctccacccggcagctgtagcccttctctttctccatcatctaatagatcttcccccgccactcattccccgtag

SEQ ID NO: 203116 - DNA, 1437 bp, synthetic construct
  misc_feature 1..1437: note = Description of Artificial Sequence: Synthetic coding sequence
  source 1..1437: mol_type = other DNA
atgatgagccagaccatgacccaggccggcgtgagcttccggcactcagttagagcagcccaatgtcacacaagagtcccaaatacctggccaagggcgacaagaccttatgcatcgtgccggcggagcccccgcttacgggggaggtggccgggcagtgccggtcagggcgctgggggcagggccccccgggctggttggcgggcgggcgacgttaccggcagtgcaatcgagacgcagagctcttcttccgaggaaattgttccttctccaccgtccccgccaccgctgccaagaatatataagccgtgcttcgtatgtcaggacaagtccagtggttaccactatggagtctctgcctgcgagggctgtaaggggttttttcgtcgcagcatacagaagaacatggtgtacacctgccaccgggacaagaattgtattattaataaagtgactagaaacaggtgtcagtactgtagacttcaaaaatgttttgaggttggaatgtcaaaggaatccgtgcggaatgatcggaataagaagaaaaaggaagttcctaaaccagagtgtagcgagtcttataccctgacacctgaagttggcgagctcattgaaaaggtgagaaaggcacaccaggaaactttccctgcattgtgccagttgggcaagtatactaccaataacagctctgagcagcgtgtttctttggatatcgatctgtgggacaagttctccgagttatcgacaaagtgcattatcaagactgtagaattcgccaagcagctgcctgggttcaccacccttactatcgccgaccagattacgctcctcaaggccgcatgtcttgacatactgatcttgcgcatttgtaccaggtacactcccgagcaggacacaatgaccttttctgacggtcttactctgaatcgcacccagatgcacaacgccggctttggtccactgactgacctggtgttcgcattcgcaaaccaacttctgccacttgaaatggacgatgcagagaccggtctgctctctgccatttgcctgatctgtggcgatcgacaggacctggaacaacctgatcgcgttgacatgttgcaggagccattgctcgaagcactgaaggtctacgtgcgcaagaggaggcccagccgcccccacatgttcccaaagatgctaatgaaaattacagatctgaggtctatttccgctaaaggcgcagagcgcgtgattactttgaagatggagatccccgggtctatgccccctctcatacaggagatgttagagaatagtgaaggccttgacacattatcaggtcaaccgggtgggggtggccgagacgggggcggactggcacctccgccagggagttgttccccctctctctccccctctagtaaccgcagcagccctgccacccactcaccttag

SEQ ID NO: 203117 - DNA, 1389 bp, synthetic construct
  misc_feature 1..1389: note = Description of Artificial Sequence: Synthetic coding sequence
  source 1..1389: mol_type = other DNA
atggccagcaacagcagcagctgccccacccccggcggcggccacctgaatggatacccagtgcccccttatgcctttttctttcccccgatgctgggagggctgtcaccgcccggggccctgaccactctacagcaccagctgccggtgtcaggctactccacaccttccccagccaccattgagacccagtccagctcctccgaagaaattgtgccaagcccccccagccctccaccattgccacgcatctacaaaccatgctttgtgtgccaggataagtcctcgggatatcactacggtgtaagcgcatgtgaaggttgcaaggggttttttcgccgttctatccaaaagaacatggtgtatacgtgtcacagagataagaactgtatcataaacaaagtgacgaggaaccggtgtcagtactgcaggctgcagaaatgctttgaagtcggaatgagtaaggagtctgtacggaacgacagaaataagaagaagaaagaggtaccaaagccagagtgtagcgagtcttacactcttacacccgaggtcggcgagctgatcgaaaaggtgcgaaaggctcaccaggaaacattccccgcgctgtgtcagctgggaaagtatactactaacaatagctctgaacagcgcgtgagcctcgatatcgacttatgggacaaattcagcgagctgtccactaaatgtatcattaaaactgtggagtttgctaagcaactgcccgggttcacaactctcacaattgccgaccagatcaccttactcaaagccgcatgcctcgatatccttatcctgaggatttgcacccgatataccccggagcaggacaccatgacgttctccgatgggctgactttaaatcgcacacagatgcataatgcgggttttggacccctgacagacctggtgtttgcctttgccaaccagttattacccttagagatggacgatgcagagacagggcttctgtctgcgatatgcctgatctgcggtgatcggcaggatttagaacagcctgatcgagtcgacatgttgcaggagcctctcctggaggcccttaaggtatacgttcgcaaaagacggcccagtcgcccccacatgtttcccaagatgctgatgaagataaccgacttacggtctatttcagcaaaaggcgcggaacgggttattacattgaagatggagatcccaggatctatgccgcctttaatccaggagatgctggagaattctgaaggacttgacaccctttcaggacaaccaggaggagggggacgggatggcggaggactggctcctcccccgggaagctgctcgccgagtctcagcccgtccagtaaccggtcttccccagccactcacagtccctag

SEQ ID NO: 203118 - DNA, 1041 bp, synthetic construct
  misc_feature 1..1041: note = Description of Artificial Sequence: Synthetic coding sequence
  source 1..1041: mol_type = other DNA
atgggccaggagatcctgcccgcccggagccccaccctgcggctgggatcgccaaccccccatttaccccaggagctactgcgggcatcccctaaagggccccccggcaggttgcaactgggaggcttggcggtgcggaatgaccgaaacaagaaaaaaaaagaggtgcctaaacccgaatgttctgagagctatacgcttacgccagaagtgggggaacttatcgagaaagttcgcaaggcccaccaagaaaccttccccgctctgtgtcagctgggaaaatataccacgaataactcatctgagcagcgagtaagccttgacattgatctgtgggacaagttttcagagctaagtaccaagtgtatcatcaaaaccgtagaatttgccaaacagctgccaggtttcaccacgctcactatcgcggatcagataacactgctgaaagctgcctgtctggacattttgatcctgcgtatttgcaccagatatacacctgagcaggatactatgacattctccgacggattgaccctcaatagaacccaaatgcacaatgcaggattcggccctctgacagatctggtttttgctttcgccaatcagctcctccctctggaaatggatgatgcagagaccggcctcctgagcgctatatgtctcatttgcggggatagacaggacctagagcagccagacagggtggacatgctacaagaacctctccttgaagctcttaaagtctatgtaaggaaacggaggccgagtcgcccccatatgttccccaaaatgttaatgaagattaccgatcttcggtcaatctccgcaaagggcgccgagcgcgtaatcaccctcaagatggagatccctggatccatgccgcccttaattcaggagatgctcgagaatagtgagggcctggatactctgagcggccagcccggtggaggggggagggacggaggagggctcgcccccccccccgggtcttgtagcccttcattgtccccctcatccaatagatcctcacccgccacgtag

SEQ ID NO: 203119 - DNA, 1098 bp, synthetic construct
  misc_feature 1..1098: note = Description of Artificial Sequence: Synthetic coding sequence
  source 1..1098: mol_type = other DNA
atggccagcaacagcagcagctgccccacccccggcggcggccaccttaatgggtacccagtgcctccctacgcctttttctttccaccaatgcttggtggcctcagcccccctggcgccttaaccactctccagcatcaactgccagtgtctggttattcaaccccgtccccagccacagtgaggaatgatagaaacaagaaaaaaaaggaggtccccaaacctgagtgctctgagtcctacaccctcacccctgaggtcggggaactcatcgaaaaagttcgaaaggctcaccaggaaacctttcccgcgctgtgtcagctgggcaaatatactaccaataattcatctgagcagcgagtgagcctggacatcgacctctgggacaaattttccgagctctctacaaagtgcattatcaaaacggtggagttcgctaagcagttgccgggtttcactactttaacaatcgcagatcagatcaccttgttaaaggcagcttgtctcgatattttgatcctgaggatctgtacccgatacacacccgagcaagacaccatgaccttctccgatggtctgaccctcaaccgcacccagatgcataacgctggcttcggccctctgactgatctggtgtttgcctttgcaaatcagctgctccctttagagatggatgacgccgagactgggcttctgagtgccatttgcctaatatgcggagatcggcaggacctggaacagcccgaccgcgtggatatgctgcaggaacccctactagaagcactcaaggtgtacgtgcgaaagcgaaggccaagtcgaccacatatgttccctaaaatgttaatgaagatcactgacttacggagtattagcgcaaaaggagctgagcgcgtgatcactctcaagatggagattccagggagtatgccccctctcatccaagagatgctagagaacagtgaagggctcgacacgctatctgggcaacccggcggaggtggccgagacggaggtggcctcgccccaccccctggctcctgtagccctagtttgagtccaagttcgaacagaagcagccccgccacgcattcaccttag

SEQ ID NO: 203120 - DNA, 1149 bp, synthetic construct
  misc_feature 1..1149: note = Description of Artificial Sequence: Synthetic coding sequence
  source 1..1149: mol_type = other DNA
atggtgcccagcagccccagcccccccccccccccccgggtgtacaaaccatgttttgtgtgcaacgataaatctagtgggtatcactacggggtgtcaagttgcgaggggtgtaaaggtttctttcgcaggagcatacaaaaaaacatggtctatacatgccaccgagataaaaactgtatcattaataaagttaccagaaaccgctgccagtactgccgactgcagaagtgttttgaggtgggcatgtccaaagaggccgtgagaaacgatcgcaacaaaaaaaaaaaagaggttaaggaggaggggtcccccgatagctacgaactgagccctcagttagaagaactcatcacaaaggtgtccaaagcccatcaggagactttcccttccctctgtcagcttggaaagtacacaacgaacagttcagcagaccaccgagtacagctggacctggggttgtgggacaagttttccgagttggctacaaaatgcatcataaagattgtcgagttcgccaaacggctccctggttttacaggcttatctatcgcagaccagataacactgctgaaggccgcttgtttggacatactgatgctacggatctgcacccgctataccccggagcaggacaccatgacattttcagacgggttaacattaaatcggacacaaatgcacaacgccggctttggccccctgactgatctcgtctttgcattcgctggacagttgctgccacttgagatggatgacacggagactgggctgctgtcagcgatatgtcttatctgcggcgaccgcatggatttggaggaacctgaaaaggttgacaagcttcaagagcctcttttggaagcactccgcctctacgctaggagaagacggccatcacaaccctacatgttcccaaggatgctgatgaagataacggatttgcggggcatatctaccaagggagctgagcgggccattactctgaaaatggaaatccctggcccgatgcctcctctgatccgggagatgctcgagaacccagaaatgttcgaggatgatagctcacagccggggccccaccccaatgccagctctgaggatgaggtgcctgggggacaagggaagggtgggttgaaatcaccggcctag

SEQ ID NO: 203121 - DNA, 1332 bp, synthetic construct
  misc_feature 1..1332: note = Description of Artificial Sequence: Synthetic coding sequence
  source 1..1332: mol_type = other DNA
atgtacgactgcatggagaccttcgcccccggcccccggcggctgtacggcgccgcaggccccggcgctggcctgttgaggagggcaacgggtggttcatgctttgcagggctggagtcatttgcatggccccagccggcgtccctgcagtctgtggagacccaaagcactagcagtgaggagatggtgccgagttcaccttctcccccccccccacctagggtgtacaagccatgttttgtttgtaatgacaaatcctctggatatcattatggtgtgagcagctgtgaaggctgcaagggcttttttcgccggtcgattcagaagaatatggtgtacacatgtcatcgggacaagaactgcatcatcaataaggttactagaaataggtgccagtactgccgactgcaaaagtgttttgaggtaggaatgtctaaggaagccgtgagaaacgatagaaacaaaaaaaaaaaagaagtcaaagaagagggcagtcctgatagctacgagctgtctccacaacttgaggagctgataacaaaagttagtaaagcccaccaggaaacctttccgtctctgtgtcagctggggaagtacactacaaacagctcagctgatcatcgagtccaactcgacctaggtctttgggataaattctccgaattggccacaaagtgtattattaagattgtcgagtttgctaaacgcctccctgggtttaccgggttgagtatcgccgaccagattacactactgaaagccgcgtgccttgacattttgatgctgcgtatctgcacccgttacaccccagaacaggacacaatgacattctccgatggtctcacccttaataggacccagatgcacaacgcaggctttggccctctcacagacctagttttcgcttttgccgggcagctactgcctcttgaaatggacgacacagaaacaggcctcctatccgccatttgcctcatctgtggagatcgcatggacctggaggagcctgaaaaggtggataaactgcaggagcctcttctcgaggcattaaggctctatgcaagaagacggagaccttcccagccctacatgtttcccaggatgctgatgaagattactgacttgcggggcatttcgaccaaaggtgctgagagagcgatcacgctaaaaatggaaatccccgggcctatgccccctctcattcgagaaatgctcgagaatcctgaaatgttcgaagacgactcctcacaacctggcccgcatccaaatgctagcagtgaggatgaagtccccggaggacaggggaaaggagggctgaagagccctgcctag

SEQ ID NO: 203122 - DNA, 1365 bp, synthetic construct
  misc_feature 1..1365: note = Description of Artificial Sequence: Synthetic coding sequence
  source 1..1365: mol_type = other DNA
atggccaccaacaaggagcggctgttcgccgccggcgccctgggccctggatctgggtatccaggagccggcttcccattcgctttccctggagccctaaggggaagtcctccatttgagatgctgtctcctagtttccgtggcctgggacaaccagatctgcccaaagagatggcgtctctgagcgtcgagacacagagcactagttctgaggagatggtgccctcaagcccctctcctcctccaccaccacgggtgtacaaaccatgtttcgtttgtaatgataagagtagtggataccattatggggtgtctagttgcgaaggctgcaagggttttttccgacggagcattcaaaaaaatatggtgtatacttgccaccgcgataaaaattgcattataaacaaggtcactaggaatagatgtcagtactgtagactgcaaaaatgttttgaagtggggatgagcaaggaggcagtgcgtaacgatagaaataaaaagaagaaggaggtcaaagaggagggctcgcccgatagctacgaactgagcccacagctggaggagctgattacaaaagtgtcaaaagcccaccaggagactttcccatccctgtgtcagctgggcaagtacaccacaaatagcagtgcggatcatcgtgtgcaacttgaccttgggctgtgggacaagttcagtgagctggccacgaagtgcatcattaagatcgtagagtttgccaagcggctgcccggttttacagggctgtctattgccgaccagattaccctgctgaaggcagcctgccttgacatcctgatgctgaggatatgtacccgctacacgcccgaacaggatactatgaccttctccgacgggttgacactcaatcgtactcaaatgcacaatgctgggttcggtccacttaccgatctcgtttttgcatttgccggtcagctgttacccctggaaatggacgacacagagactggtcttttatccgcgatctgccttatctgtggcgatcggatggacctggaggagcctgaaaaagtggacaaacttcaagaaccattattagaagccctgcggttatatgcgagaaggcgacgtcctagccagccctatatgttccctcgaatgctcatgaagatcacagatctcaggggaatttctacaaaaggtgcagaaagggcaatcacactaaagatggagatccctgggcctatgcctccgctgattagagagatgctggaaaaccccgaaatgttcgaggatgactcgtcacagcctggccctcatcctaatgcctcttccgaagacgaggtgcccggaggacaggggaaaggaggcttaaagagcccagcttag

SEQ ID NO: 203123 - DNA, 1365 bp, synthetic construct
  misc_feature 1..1365: note = Description of Artificial Sequence: Synthetic coding sequence
  source 1..1365: mol_type = other DNA
atggccaccaacaaggagcggctgttcgccgccggcgccctgggcccaggatccgggtatccgggcgccgggttcccctttgcattccctggggctctcagggggagccctccttttgaaatgctgtctccctcgttccgtggtctggggcagcccgatctacctaaggagatggcatcactgtccgtggaaactcagtcaactagtagcgaggaaatggtgccctccagcccttctcctcccccccctccacgggtttataagccgtgttttgtctgtaacgacaaaagttctggatatcattacggcgtgtcgtcctgtgagggctgtaaaggattctttcgccgctcaattcaaaaaaatatggtctacacctgtcacagagacaaaaactgtatcataaacaaggtgacacgaaatcgctgtcagtactgtaggctccaaaaatgtttcgaggtgggcatgtccaaggaagccgtgagaaatgaccgcaacaagaagaaaaaagaagtaaaagaggaagggagcccagactcctatgaactgtccccccaattagaagaacttattactaaggtaagtaaagcccatcaggagaccttcccttccttatgccagttggggaagtacacaactaactcctccgcagaccaccgcgttcagctcgacctgggattgtgggataagttcagtgaactggcaaccaaatgtattatcaagattgttgaatttgccaagcgcttgcccggtttcacggggctgtccatagcggaccaaattactttgttgaaagctgcctgcttggatatcctgatgctacgcatttgcacgcggtacacccccgaacaggacaccatgacatttagcgatgggctaaccttgaatcggacccaaatgcacaacgccggcttcggcccccttacagacctggttttcgctttcgccggtcagttactgcctcttgagatggatgatacggaaaccggccttctttctgcaatctgccttatctgcggtgatcgcatggacctcgaggagccggaaaaagtggacaagctgcaggagccgctgctcgaggcactgagactgtacgcgcggagacgaaggcctagccagccctacatgttcccccgtatgcttatgaaaataactgatcttagaggaatttccacgaagggggccgaaagagccattacactgaagatggagatccccggccctatgcccccgttaatacgggagatgcttgagaatcctgaaatgttcgaggatgattcaagccagccaggcccgcaccccaatgcttcttccgaggacgaagtacctgggggtcaggggaaagggggtctgaaaagccctgcctag

SEQ ID NO: 203124 - DNA, 306 bp, synthetic construct
  misc_feature 1..306: note = Description of Artificial Sequence: Synthetic coding sequence
  source 1..306: mol_type = other DNA
caccaccaggacgagttcgccaagcggctgcccggcttcaccggcttatccatcgccgaccagatcactctgctaaaggcggcgtgcctggacattctgatgttgcgtatctgtactcggtacacccccgaacaggatacaatgaccttctcagatggactgaccctgaatcggactcagatgcataatgccggctttggtccactcaccgacctggtgttcgccttcgcaggacagttgcttcctcttgaaatggacgacacagaaaccggtctgctatcagccatctgcctgatctgcgggtag

SEQ ID NO: 203125 - DNA, 1299 bp, synthetic construct
  misc_feature 1..1299: note = Description of Artificial Sequence: Synthetic coding sequence
  source 1..1299: mol_type = other DNA
atgctggccctgcccctgcccccctgctggagcggcgccccccccggcgaagagggcgagtccgcagctggaccatggtgttttcagcaccctgtaagtctccaagccggttcacggtgcacaaccgtgtggaaacggctgccaagagtgcgcgatgggtgtaccggtaggcctggtcccggacccgcctgttgtgctgaacctccagctgccccagtgtcccctgacctgaatttgttgccaggccgcaacccacccgcatgtaatggtttctttaggaggtctatccaaaaaaatatggtgtatacctgtcaccgggataagaactgtatcattaacaaggttaccaggaacaggtgtcagtactgtaggctccagaagtgttttgaggtcgggatgtccaaggaagccgtgcgaaatgacagaaataagaagaagaaagaagtgaaagaggagggtagtcccgacagctacgagctaagcccacagttagaagaactaattacaaaggtgagtaaggcacaccaggagacgttcccttcactttgccaactcggaaaatatactaccaacagcagcgccgatcatcgtgtgcaattagatctggggttgtgggataagtttagtgaactggccaccaaatgcatcattaagatcgtggaattcgcaaaaagacttccaggtttcaccggattgtccatagccgaccagatcaccctcttaaaagctgcctgcctcgatattttgatgctacgtatctgtacacggtatacacctgaacaggatactatgacattttcagatggcctgacgttgaatcgcacccagatgcataacgcagggttcggacctctgaccgacctggtgtttgcctttgccgggcaactgctgccgctggagatggatgacactgaaaccggcctcctgagtgctatttgcttgatctgtggggatcgaatggacctggaagaaccagaaaaggttgataaacttcaggagccgttgctagaagcacttcgactgtatgccagaaggcggagaccgtcgcagccttatatgttcccccggatgctcatgaaaattactgatctgcgagggatctcaactaagggcgccgagagagccatcactctgaaaatggaaatacctggaccaatgcctccactcattcgagaaatgttggaaaaccctgagatgttcgaggacgactctagccaacctggccctcacccaaatgcatcttccgaggatgaggttcccggtggacagggtaaggggggactcaaaagcccagcctag

SEQ ID NO: 203126 - DNA, 1389 bp, synthetic construct
  misc_feature 1..1389: note = Description of Artificial Sequence: Synthetic coding sequence
  source 1..1389: mol_type = other DNA
atggacaccaagcacttcctgcccctggacttcagcacccaggtgaacagctccctgacatctcctacggggaggggatccatggccgccccaagtctgcacccgtccctgggtcccggtatcggtagcccaggtcaactgcactcacctattagcactcttagcagccctatcaatggcatggggccacccttttccgtgatatccagcccaatggggccacactcaatgtctgtccctaccactcccaccctgggatttagtaccggctccccccaattgagttcccccatgaatccagtgtcatcgtcagaggatatcaaaccaccccttgggctgaatggtgttcttaaagtgccggcacacccctccgggaatatggcaagtttcacaaagcacatctgcgccatttgtggcgaccggtcatccggaaaacattacggggtctatagctgcgaggggtgcaaaggcttctttaaaaggaccgtacgcaaggacttaacctacacctgcagggacaacaaggactgtctgatcgacaagcggcaacgtaataggtgtcagtactgcagatatcagaaatgtctcgctatgggcatgaagagggaggccgtacaagaagagaggcagcgcggtaaggaccgtaacgaaaacgaagtggaatcaacaagctcagccaatgaggacatgcccgtggagaggattctcgaagcagagctcgccgtggaacctaagacagaaacttacgtcgaagccaacatggggctgaatcctagttctcccaacgatcctgtgaccaatatatgccaagcggcagataagcagctgtttacacttgtggaatgggcaaaacggattccacatttcagcgagctgcccctggacgaccaggttattctcctgcgggccggttggaatgagcttctgattgcttcattttctcatcggtcgatcgcagtcaaagacgggatcctgcttgccacagggcttcatgttcacaggaatagtgcgcatagcgcaggggtcggggccatcttcgacagagtgctaaccgaactagtatcaaaaatgcgggatatgcagatggacaagactgagctgggatgcctgcgcgcaattgtcttatttaacccagactcaaagggtctgagcaaccctgcagaggttgaggctctgagagagaaggtctacgcctccctggaggcctattgcaagcacaagtaccccgaacagcctggccgtttcgctaagttacttctaaggcttccagcattacggagcataggcctaaaatgtttagaacatcttttcttttttaaactcatcggagacactccaatagatacctttctgatggagatgctagaggccccacatcagatgacctag

SEQ ID NO: 203127 - DNA, 1098 bp, synthetic construct
  misc_feature 1..1098: note = Description of Artificial Sequence: Synthetic coding sequence
  source 1..1098: mol_type = other DNA
atgaaccccgtgagcagcagcgaggacatcaagccccccctgggcctgaatggtgtcctcaaggtgccagcacatcctagcggaaacatggccagctttactaaacatatctgcgcaatatgtggcgacaggtcgtccggaaaacattatggagtgtacagctgcgagggatgtaaagggtttttcaagcggaccgtgcggaaagacctgacatacacatgcagagacaacaaggattgcctgatcgataagcgccagcggaatagatgccagtattgtcgctaccaaaagtgtctggccatggggatgaaacgcgaggctgtccaagaggaacgacaacgaggcaaggacagaaatgagaacgaagtggaaagtacctcatctgcgaacgaggacatgcccgtggagcggattctggaggcagaattggctgtagaacctaagaccgagacctatgttgaggctaatatgggccttaatccttcatcccccaacgatcccgtaaccaatatatgtcaggccgctgataagcagttattcaccctggtggaatgggcaaaacgcatccctcatttttccgagctgcctctagatgaccaggtcatcttactccgggcaggttggaacgagctcctgattgcatctttttcacacagatccattgctgtaaaagacggcatcttgctggccactggacttcatgtgcatagaaattccgctcacagcgcgggagtaggagctatcttcgacagggtcttgacagagctggtgtccaagatgcgggatatgcagatggataagaccgagctcggctgtctccgggccattgtcttgtttaatcccgatagcaaaggactcagcaaccctgccgaggtggaggccctccgcgagaaagtgtacgcaagccttgaagcttattgcaaacacaaatatccggagcagcctggcagatttgccaaattactgcttcgactacccgcactaaggagcatcgggctcaaatgcttagagcacttgttcttctttaagcttatcggggatacaccgatcgataccttcctcatggagatgctggaagccccccatcagatgacttag

SEQ ID NO: 203128 - DNA, 1602 bp, synthetic construct
  misc_feature 1..1602: note = Description of Artificial Sequence: Synthetic coding sequence
  source 1..1602: mol_type = other DNA
atgagctgggccgcccggccccccttcctgccccagcggcacgccgccgggcagtgcggacccgtgggagtgagaaaagagatgcactgcggggtggcatccaggtggagaaggagacgaccttggctcgatcccgctgccgcagctgccgctgcagtagccggcggagaacagcagactcctgaaccagaaccaggtgaggcgggtcgcgacggaatgggtgactctgggcgagacagccgcagccccgactcctctagtccaaatcctctaccccagggtgttcctccgccgagtcccccagggccccctctgcccccctctactgccccctcactggggggctcgggcgcccccccaccaccacccatgcctcccccccccctgggaagtccattccctgtaattagctcctccatgggcagtccaggactgcccccgcccgctccccccggcttcagcggcccagtgtcctctccgcagattaatagcacggtctctctgccaggaggtggatctgggccacctgaggatgtgaaaccacccgtgttgggggtgcgcggtctccactgtcccccaccaccaggtggcccaggggctggaaaacgactgtgtgcgatatgtggtgacaggagctccggcaaacactacggagtgtattcatgcgaggggtgtaaggggttcttcaagcgcactatcagaaaggacctaacgtattcatgcagagacaataaggactgtaccgttgacaaacgccagagaaaccgatgtcagtattgccggtaccaaaaatgcctggcaaccgggatgaagcgtgaggcagttcaggaggaacgacaaaggggcaaggacaaggatggcgatggagagggggcaggtggggctccagaggaaatgccagtcgatagaattctggaggccgaattagccgtggagcagaagagcgaccaaggtgtggagggccctggcggaacaggaggatccggctcctcgcccaatgacccagtcacaaatatctgtcaagctgctgataagcagctgttcactctggtggagtgggccaaacgtatcccccacttttcctcactacctctagatgatcaagtgattttactgagagccggctggaacgaactcctcattgcctccttcagccacagaagtatcgacgttcgggatggaattttactcgcgactggtctgcacgtccaccgcaacagcgcccattctgcaggggtgggcgcaatcttcgacagagtccttaccgagctggtcagtaaaatgcgggacatgagaatggataaaactgagctgggatgcctccgggccattatcctgttcaatccagacgccaagggcctcagcaatccatccgaggtggaggttctgcgggagaaggtgtatgccagtctcgaaacatactgcaaacagaaataccccgagcagcaaggccggtttgcgaaactcctgctccgcctgccagccctcaggagcatcgggctgaaatgcctggaacacttatttttctttaagctgatcggcgacactcctatcgacacgtttctcatggagatgcttgaggccccccaccagctggcatag

SEQ ID NO: 203129 - DNA, 1614 bp, synthetic construct
  misc_feature 1..1614: note = Description of Artificial Sequence: Synthetic coding sequence
  source 1..1614: mol_type = other DNA
atgagctgggccgcccggccccccttcctgccccagcggcacgccgctggccaatgcggcccagtgggtgtacgaaaggagatgcactgcggtgtggcatcccgctggaggaggcgccgcccgtggctggaccctgccgctgccgcagccgcggcagtcgcagggggtgagcaacagacgcccgaacctgagccaggcgaggctggcagagacggaatgggcgacagtggaagagacagcaggagtccagactccagctctcccaacccgttgccccagggagttcctcctccatcgcccccaggaccacctcttccaccctccacggccccttccctgggtgggtccggagcacctcctcctccacccatgccccctccccctctggggtccccctttccagtgatttccagctcaatgggttctcccgggctccctccaccagctccgcctgggtttagcgggccagttagttcgccccagataaacagcaccgtgtcgttgcccggaggaggttctgggcctcccgaggatgtcaagccgcccgtgctgggagtcaggggcctgcactgccctcccccgcccggcggacccggtgcaggaaagcggctctgtgccatttgtggggaccgatctagcgggaaacactacggagtgtattcctgcgagggatgtaaaggctttttcaagcgtaccatccggaaggaccttacctattcatgccgagacaacaaggattgcactgtcgacaagcgccagcgcaataggtgtcagtattgccgctaccagaagtgtcttgcaaccgggatgaaacgcgaggcagttcaagaggaaagacagaggggcaaggataaggacggcgacggagaaggcgcaggaggagcccccgaggaaatgcccgtggataggatcctagaagccgagctggcagttgaacagaagtctgaccagggggttgagggaccaggcggcactggcgggtccgggagtagtcccaacgaccctgttaccaacatctgccaggccgcggataaacaactattcaccctggtggagtgggcgaagcgtattccccacttctcctctctcccactcgatgatcaggtgatactcctgcgcgctggttggaacgaactgctaattgcaagtttttcccatcgctcaatcgacgtgcgcgacggcatcttgttggccactgggctccatgttcatcgtaattccgcacattctgccggcgtcggggcaatttttgatcgatccctttctcgcgtattgaccgagctggtaagcaagatgcgggacatgaggatggacaaaactgagctgggatgcctgcgggccataatcctttttaaccctgacgccaaaggcctcagtaaccctagtgaggtggaagtcttgcgcgagaaggtgtacgcctctcttgagacatactgcaaacagaaatatccagaacaacagggacgctttgcgaagttgctccttcgtctccctgccctgcgctctatcggactcaaatgtttggagcatcttttcttttttaaactcataggagatacacctatcgatacatttctgatggaaatgcttgaagcaccccaccagctcgcttag

SEQ ID NO: 203130 - DNA, 1614 bp, synthetic construct
  misc_feature 1..1614: note = Description of Artificial Sequence: Synthetic coding sequence
  source 1..1614: mol_type = other DNA
atgagctgggccgcccggccccccttcctgccccagcggcacgccgccgggcaatgcggcccagtgggggtcagaaaggaaatgcattgcggggtggcctcacgatggcgcaggcggcgcccctggttggaccctgctgccgcagccgcggccgccgtggccgggggcgagcagcagacccccgaacccgaaccgggcgaagccggccgggacggtatgggggatagcggccgcgatagccggtctcccgactccagctcccctaatccactgcctcagggcgtcccacccccatcgccccccggccctcccctgccgcctagtacagcaccaagcctgggcgggagtggcgcgcctccccctccccccatgccacctccccctctgggttctccctttcccgtaattagttcctcaatgggtagtcccgggctcccccctcccgctccaccaggattctccggtccggtctcctccccccagataaattccactgtgagtttacctgggggcggaagcggtcctccagaggacgtcaagccccccgttttgggggtgcgcggtctacattgccctccgcccccaggcggccccggagctggcaaacgcctttgcgccatatgcggtgatcgcagcagcggcaagcactacggtgtgtacagttgcgaggggtgtaaggggttcttcaagaggacaattaggaaagatctgacgtactcttgcagagataacaaagactgtaccgtggacaaacgccagcggaacaggtgtcagtactgcagatatcagaaatgtctggctaccggcatgaaacgcgaggctgtccaggaggagcggcaacgggggaaggacaaagacggggatggtgagggcgctggcggagcaccagaagaaatgcccgttgataggatcctggaagccgagttggccgtagagcagaaaagtgatcagggggtggaaggcccgggagggactggcggaagcggcagcagccccaacgaccccgtcaccaacatttgccaggcggcagacaagcagctctttacccttgtagagtgggccaaacgaatcccacacttcagcagtctgcctctggacgatcaggtgatcctgttgagggctggctggaatgaactgctgatagcgtccttttcccacaggtccatcgatgtacgcgatgggatcctgctggcaaccgggctccatgtccatagaaacagtgcacactcagccggggtgggcgctattttcgatcgttcactgagtcgcgttctcacagaactcgtgtctaaaatgcgggatatgcgtatggacaaaactgagctcggctgcctaagggccatcattctgtttaatccggatgccaaggggttgagcaatccatcagaggtagaggttctgcgggaaaaggtgtacgcatcattagagacctactgcaagcaaaagtatcccgagcaacagggacgctttgcaaagcttctgttgcgcctgcctgccttaagaagcatcggtcttaagtgcctcgagcacctcttttttttcaagctaataggtgacacccctatagatacatttctaatggaaatgcttgaagctccacatcagctagcttag

SEQ ID NO: 203131 - DNA, 1602 bp, synthetic construct
  misc_feature 1..1602: note = Description of Artificial Sequence: Synthetic coding sequence
  source 1..1602: mol_type = other DNA
atgagctgggccgcccggccccccttcctgccccagcggcacgccgcaggccaatgcggacccgtgggggtgaggaaagaaatgcattgtggcgtcgccagtagatggcgcaggagaagaccatggctggatcccgcagccgcggcagcagctgccgtggccggcggtgagcagcagacccctgagccagaaccgggtgaggccgggcgggacggcatgggcgattccggccgagatagcaggtctccagattctagtagccctaatcccctgccgcaaggcgtacctcctccatctcctcctggaccccccctccctccttcaacagccccatctttggggggatctggcgccccccccccgcctccaatgcctccccccccgttgggttccccatttcccgtcatcagttcgtccatgggatctcccggcctcccgccacctgctccccccggcttctctggacccgtcagctctccccagattaattcaacagtgtccctgcctggcgggggatcaggtcccccagaggacgtcaaaccccccgttctgggagtcagaggactgcactgtccacccccacccggtggtcccggtgccggtaaaagactctgcgccatatgcggagatcgctccagcgggaagcactatggggtgtacagctgcgaaggctgcaaggggtttttcaagcgcaccatcaggaaggatctgacttactcatgcagggataataaggattgcaccgtggataaaagacaacggaacagatgtcagtattgccggtatcagaaatgtttggccaccggcatgaaacgtgaggcggttcaggaggagcggcagcggggcaaagacaaagacggggatggtgagggcgctggaggagcacctgaagagatgcccgtggatagaatcttggaagctgaactggcggtcgagcaaaaaagcgatcagggggtggagggccccggagggactgggggctctgggtcttcccctaatgatccggttaccaacatctgccaagccgccgacaagcaactgttcaccttagttgagtgggccaagcgaatcccccatttctccagcctgcccctggacgaccaggtgatcttgttgcgagccggatggaacgaattactcatcgccagtttctcacataggtctattgacgtgcgtgacgggatcctgctggccacaggactgcacgtgcacagaaatagcgcccattctgctggagtgggcgcaatattcgatagggtgcttaccgaactcgttagtaagatgcgggacatgcgaatggataagacggaattggggtgtctcagggccataatcctcttcaacccagatgctaagggcttgtcgaatccttccgaggtggaggtcctgagggaaaaggtatatgccagcttagaaacctactgtaaacaaaagtaccccgaacagcagggccgcttcgcgaaacttttactacgactgccagcccttcgctccatcggcctcaaatgtctcgagcacctcttcttttttaagcttatcggagatacacctattgatacctttcttatggagatgcttgaggcaccccaccagctggcgtag

SEQ ID NO: 203132 - DNA, 861 bp, synthetic construct
  misc_feature 1..861: note = Description of Artificial Sequence: Synthetic coding sequence
  source 1..861: mol_type = other DNA
atgccccagggcagcgtgggccggtggggctgcgagaagaagtgcattgtgggctccagaccaggtggtgggggcgatgggccggggtggatcccccagcgaaggcggcgaaggagatggcaggcggagaataataagccccgcagccggagccagggaaggctcgatgggactggatgggccactgccggtgggatcaacagtacagtgtccctgccagggggggggagtggacccccagaagatgttaagcctcccgtcctgggcgttaggggcctccattgtccccctcccccaggtggaccaggggccgggaaacgcttatgcgcaatctgcggcgatcgatcctcaggtaagcactatggcgtgtacagttgcgagggttgcaagggatttttcaagcgaacgatcagaaaagatttgacctattcgtgtcgggacaataaagactgcacagttgataaacgccagaggaaccggtgccagtactgtcgttatcagaagtgcctcgccaccggcatgaagagagaagctgtgcaggaggagagacagcggggaaaagacaaagatggagatggtgagggagctggaggggccccagaggagatgcctgtagacaggattttggaggccgagttagccgtggagcagaagtccgatcagggcgtggaagggccaggtggcactggaggaagcggctcgtcagtgtcagtgggcgtgaatcctttgtcgttcgtgatgggcgtggggggcggatctctcggcctgttttatattccgtctcccagctttccgttgattacttttctcacacttctgggtacaggtggagccgctaaacaaggcctttctaacatctag

SEQ ID NO: 203133 - DNA, 1602 bp, synthetic construct
  misc_feature 1..1602: note = Description of Artificial Sequence: Synthetic coding sequence
  source 1..1602: mol_type = other DNA
atgagctgggccgcccggccccccttcctgccccagcggcacgccgcggggcagtgtgggccagttggcgttcggaaagaaatgcactgtggggtcgccagccgctggcgacggcggagaccctggctggaccccgcagctgctgctgcagcagccgtggccggaggcgagcagcagacgcccgagcctgagcccggagaggcagggagggacggaatgggagactccgggcgggatagccggagccctgactctagcagcccgaacccattaccacagggggtacccccccccagtcctcccgggcctccactgcccccatccactgctcccagcctgggaggctccggagctccacctccacctcccatgcccccacccccactcggatcaccatttcctgttatttcctcgtcaatgggcagtccgggcctgccaccacccgccccgccgggcttctccggaccagtgtccagtccccagatcaacagcacagtgtctttgccaggcggtgggtcagggccgccagaagatgtcaagccccctgtgttaggcgtgagggggcttcactgccctcctccaccaggcggccctggcgcgggaaagaggctgtgcgcaatttgcggtgatcgttcatcaggaaagcattatggcgtatactcgtgtgagggctgtaaagggtttttcaaaaggacaattaggaaggacctgacttatagctgcagagataacaaggactgtacagtggataagagacaaaggaatagatgccagtattgccggtatcagaagtgcctcgccactggcatgaaacgcgaagcggtacaggaagagcgccagcgtggaaaggataaggacggagacggggaaggagcaggcggggcacctgaagagatgcctgtggatagaatcctggaggctgaactggccgtggaacaaaagtccgatcagggagtagagggacctggcgggaccgggggttctggttcgagtcccaatgaccctgtgacgaacatttgccaggctgccgataagcagctgttcacattggtggagtgggctaaacggattccgcattttagcagtctacccctcgacgatcaggtgatcctcctaagggcagggtggaacgagctactcatcgcttccttctctcatcgcagcatagatgttcgtgacggcattttacttgccactggactgcacgttcacaggaactccgcccactcagctggagtgggcgccatattcgatagagtactgaccgaattggtctcgaaaatgagagacatgcggatggacaagacagaactgggctgtttgcgggcaattatactctttaacccagatgccaaaggtctatctaacccttctgaggtcgaggttctgcgggagaaggtgtatgcctctcttgagacgtattgtaaacaaaagtacccagaacagcaagggcgcttcgctaagcttctgctgcgcttgccggcactgagatctatcggactgaaatgcctggagcatctgttctttttcaaactgataggggacactccaatagacaccttcttaatggaaatgctcgaggctccacatcagctagcttag

SEQ ID NO: 203134 - DNA, 291 bp, synthetic construct
  misc_feature 1..291: note = Description of Artificial Sequence: Synthetic coding sequence
  source 1..291: mol_type = other DNA
tgaagccccaacgaccccgtgaccaacatctgccaggccgccgacaaacagctgttcaccctggtcgaatgggccaaacgtatcccccatttctcatctctgccgctagacgatcaggtcattctgctgagagccggtctgcacgttcacagaaacagcgcacattcagccggggtgggggccatcttcgatcgcgtgctcactgaactggtgagcaagatgcgcgatatgagaatggacaagaccgagcttgggtgccttcgcgctattatattgtttaaccccgactag

SEQ ID NO: 203135 - DNA, 1602 bp, synthetic construct
  misc_feature 1..1602: note = Description of Artificial Sequence: Synthetic coding sequence
  source 1..1602: mol_type = other DNA
atgagctgggccgcccggccccccttcctgccccagcggcacgccgcaggccagtgcgggcctgtaggtgtgcgcaaagaaatgcattgtggagtggcgtcgagatggcgccggcggcgtccctggttagatccggccgctgcagcagcagccgcggtcgcaggcggtgagcagcagactcccgaacctgagccaggcgaggccggaagagatgggatgggcgattccggcagagactcacggtcccctgactctagcagtcccaacccattaccacagggagtgccacccccttcccctcccggtcctccactgcctccgtctactgctccttcactgggaggttcaggggcccctccccccccaccgatgccccctccgcccctaggcagtcctttcccagtcatttcatcatctatgggttctcccggcctgcctccccctgcaccccccgggttctccgggccagtcagttcccctcagatcaactcaactgtgtccttgcctggcggcggatcaggccctcctgaggacgtaaaacctcctgtgttgggtgtccggggactccattgtcctccaccacctggcggccctggcgcaggcaagaggctttgcgccatttgtggagatcgctcatcagggaagcactatggggtgtactcctgcgaaggctgcaagggttttttcaagcggactattcgcaaggacctgacatacagctgcagagataataaggattgcactgtggataaaagacaaagaaaccgctgccagtattgtcgttaccaaaagtgcctggcgacagggatgaaacgggaagcagttcaggaggagcggcaacgcgggaaagataaagatggtgatggggagggcgctgggggggctcccgaggagatgccagtggatcgcatccttgaggccgagcttgccgtcgagcagaaatccgaccaaggtgtggaaggaccgggaggaaccggaggtagtgggtccagtccaaatgatccggtcacaaatatctgccaagcagccgataaacagctgtttacgctcgtagagtgggccaagaggatccctcacttcagctcccttccactcgatgatcaggtgattctattaagagcgggatggaacgagctgttgatcgcttccttctcccatagatcaatagacgtcagggacggaatcctccttgcgacaggcctgcacgtccaccgcaactcagctcattccgcgggcgtgggagctatctttgatagggtattaacggaattagtcagcaagatgcgcgatatgcgcatggataaaacagagttgggctgcctgagagcaatcatcctgtttaacccagacgcaaagggcttgtccaaccccagcgaagtggaagtgctccgggagaaggtgtatgcatccctggaaacctactgcaagcaaaagtaccccgagcagcagggtagattcgctaaattactcttgcgcctgccagcactcagatcaatagggctgaagtgccttgagcatctattctttttcaagttaatcggggacacacctatcgatacctttctgatggaaatgctggaggcgccgcaccagctcgcatag

SEQ ID NO: 203136 - DNA, 291 bp, synthetic construct
  misc_feature 1..291: note = Description of Artificial Sequence: Synthetic coding sequence
  source 1..291: mol_type = other DNA
tgaagccccaacgaccccgtgaccaacatctgccaggccgccgacaagcaactgtttacactggtggagtgggctaaacgcatcccccatttctccagtctgcccctggacgaccaggttattcttctcagggctggactgcacgttcatcgtaactctgcccactccgctggggttggcgccatcttcgacagggtcttgaccgagctggtcagcaagatgcgtgatatgagaatggacaaaacagagttagggtgccttcgcgctataattctatttaatcctgattag

SEQ ID NO: 203137 - DNA, 1614 bp, synthetic construct
  misc_feature 1..1614: note = Description of Artificial Sequence: Synthetic coding sequence
  source 1..1614: mol_type = other DNA
atgagctgggccgcccggccccccttcctgccccagcggcacgccgctgggcagtgtggacctgtaggcgtgagaaaagagatgcattgtggggttgcttcccgttggcggcgcagaaggccctggctggaccctgctgctgctgctgcggctgcagtcgccggaggagaacagcagaccccggagccggagcccggggaggctggccgggacggcatgggcgattcgggtcgcgactccagaagccctgacagctctagcccaaacccactgccacagggcgttccccctccatcacctcctgggccacctctgcccccttccactgctccatcattgggggggagcggcgctccacctccaccccctatgcccccacctcccctcgggtcaccctttccagtcatttcttcatcaatgggctctcccgggctgcctccacctgctcctcctggcttttcaggaccggtgtcttcacctcaaatcaactccacagtgtctctgccagggggggggagcgggccccctgaggatgtaaagccacctgtgctgggagttcgagggctgcactgccctcccccgcccggaggacctggtgccggcaagaggctgtgcgcaatttgcggtgaccggtcatcgggcaaacactatggtgtttattcgtgcgagggctgcaagggattcttcaaacgcacgatacggaaggatcttacatattcctgcagagataacaaggattgtaccgttgacaaaaggcagcggaacagatgtcagtattgcagataccagaagtgcctggccaccggcatgaaaagggaggccgtccaggaggagcgccagcggggaaaagacaaagatggcgatggtgaaggggcaggaggcgctccagaggagatgccagtcgacagaatcctggaagcggaactggctgtggagcagaaaagcgatcagggtgtggaaggacccggtggaacgggcgggagcggctcctcccctaatgaccctgtgacaaatatatgccaagctgcagataaacagctgtttacactcgtagaatgggcgaagcggatcccgcacttttcttcgctacctcttgatgatcaggtgatactgttgagggctggttggaacgagctgctgatcgcctctttttctcaccgctctattgatgttcgagacggcatcctgctggctaccgggcttcatgtgcacaggaactcagcccattccgccggcgtcggagcaatctttgacagatctctgtcacgcgttctgacagaacttgtgagtaagatgagagacatgcgaatggataaaacagagctggggtgcctaagggccattatcctttttaatcccgacgccaaaggtctttcaaaccccagcgaggttgaggttttgagggagaaggtctacgcgtctctggaaacctattgtaagcaaaagtatccagagcagcaggggcgatttgccaaattgctactccgtctgcctgccttgaggtcaattgggctgaaatgccttgaacacttgtttttcttcaagctaattggggatactcccatcgacaccttcctcatggagatgttggaagcgccacaccagctcgcatag

SEQ ID NO: 203138 - DNA, 1602 bp, synthetic construct
  misc_feature 1..1602: note = Description of Artificial Sequence: Synthetic coding sequence
  source 1..1602: mol_type = other DNA
atgagctgggccgcccggccccccttcctgccccagcggcacgccgccggacaatgtggcccagtaggagtcaggaaagagatgcactgtggagtggctagccgttggaggcgccggcgcccgtggctcgatcctgcagcagctgccgccgctgctgtggctggaggcgagcagcagacaccggagccagaacccggggaggctggaagggacggcatgggggactccggtagggacagtaggtccccagactcatcttcccctaaccccctgccacagggcgtccccccgccgtctccaccggggccccccctcccccctagcacagcgccctcgctgggcggatctggcgcccccccccctccccccatgccacccccacccctcggatctccgttcccagtcatttctagctctatggggtctccaggactcccaccccctgcacccccaggcttctccggaccagtctccagcccccagattaacagtactgtttcccttcctggcggcggcagtgggccaccagaggatgtaaaacctccagtcttaggcgtgcggggactgcattgccccccaccccccggggggcccggggcgggaaagcgactctgcgctatttgcggggataggtctagcggcaaacactatggagtctactcgtgtgaggggtgtaaaggtttctttaaacgaaccattcggaaggacttaacttactcctgtcgagataataaagactgcaccgtggataaacgacagcgtaacaggtgccagtattgtcgataccagaaatgtcttgccaccggtatgaagcgagaggccgtgcaagaagaacgacagaggggcaaagacaaggatggcgatggagagggtgccggtggcgcacccgaagaaatgccagtagaccggatcctggaagctgagctcgccgtagagcagaaatcggatcaaggcgtggagggaccaggtggcaccggtggcagtggttcatcacccaatgaccctgttaccaatatctgccaggccgctgacaagcagctcttcactctggtggaatgggccaagaggattccgcatttctcaagtctgcctctggatgaccaggtaattctattgagagctggctggaacgaactgctcatagcctccttttctcaccgaagtattgatgtgcgagatgggatcctcctggcgaccggtttacacgtgcacaggaatagcgcccatagtgctggcgtgggggccatatttgatcgggtgctgaccgaactcgtgtctaagatgagggacatgcgtatggacaaaaccgagcttgggtgtctgcgggccataatcctattcaatccggatgccaaggggctgtctaaccccagcgaggtcgaagtactgcgagagaaggtgtatgcaagcctggaaacctactgcaaacagaagtatcccgagcagcagggtcggtttgcaaagcttctcttaaggctgcccgccctgaggagcattggactcaagtgcttggaacacctatttttcttcaagttgattggcgatactccgatagacacttttctgatggaaatgttagaggctccacatcagttggcctag

SEQ ID NO: 203139 - DNA, 1602 bp, synthetic construct
  misc_feature 1..1602: note = Description of Artificial Sequence: Synthetic coding sequence
  source 1..1602: mol_type = other DNA
atgagctgggccgcccggccccccttcctgccccagcggcacgccgccggccagtgcggtcctgtgggggtgcgtaaggagatgcattgcggggtcgccagtcggtggcgtcggagaagaccctggctggatcccgcagccgcagccgctgcagcggttgcgggaggagaacagcaaaccccagaacccgaacccggagaagccggtcgtgacggaatgggggattctggcagagacagccgaagccccgatagctcgagtcctaatcccctgccgcagggtgttccacccccctctcctcctggccctcccttaccaccatccaccgctccatctctgggggggtccggcgcccccccgcctcctcctatgccccccccacccctcggctcaccattcccagtaatttcaagcagcatgggcagcccagggctgccaccgccagctccacccggcttctccgggccagtgtccagccctcagattaacagcaccgtgagcctccctggcggcggctcagggccgcctgaagatgtgaagccaccggtcttgggagtacggggcctgcattgccctcctccgccgggcggcccgggcgcagggaaaagactgtgcgctatttgcggggaccgtagctcaggaaagcactacggcgtttatagctgcgagggatgcaagggttttttcaagagaactattaggaaagatttgacctactcctgtcgagacaataaggattgtaccgttgacaagcggcagcgtaaccgttgtcaatactgtcgctaccagaagtgcctggccactggcatgaagcgagaggcggtacaggaagagcgtcagaggggcaaggacaaggatggcgatggcgagggagctgggggcgcacctgaggagatgcctgtagatcgaatacttgaagccgaattggccgttgagcagaagtccgatcagggtgtggaaggacctggcggcaccggtggaagtggttcatctcctaacgaccccgtgacgaacatttgtcaggccgccgacaagcaactcttcaccctcgtggaatgggctaagcgcattccacacttttcctcccttcctctggacgatcaggtgattcttttgcgtgctgggtggaacgaactgctcatcgcttcctttagccaccgctcgattgatgtgagggacggaattctcctggccacgggcctccatgtacaccgcaactctgctcattcggcaggcgtcggagcaatattcgaccgggtcctgactgaactggtgtccaagatgcgggacatgaggatggacaaaaccgaattaggttgccttagagccattatattattcaatcctgatgctaagggcctgtcaaacccatctgaagtggaagtgctgagagagaaagtatatgcctccctagagacctactgcaaacagaaataccccgaacagcagggaaggttcgctaaactgctgttgagactgccagccctccggtccatcgggctcaagtgtttagagcacctgttcttctttaagcttattggagacacccctattgacacgttcctgatggagatgctagaagccccacaccagttagcctag

SEQ ID NO: 203140 - DNA, 291 bp, synthetic construct
  misc_feature 1..291: note = Description of Artificial Sequence: Synthetic coding sequence
  source 1..291: mol_type = other DNA
tgaagccccaacgaccccgtgaccaacatctgccaggccgccgacaaacagctgttcactttggtcgagtgggccaaacgcatcccacactttagctcactgccactggatgaccaggtgatactattacgggccggacttcatgtccaccgtaatagcgcccacagcgctggcgtaggcgcgatctttgatcgcgttctgacggagctggtttctaaaatgcgagacatgcggatggacaagactgaattaggatgtttaagagccatcatccttttcaatcctgactag

SEQ ID NO: 203141 - DNA, 291 bp, synthetic construct
  misc_feature 1..291: note = Description of Artificial Sequence: Synthetic coding sequence
  source 1..291: mol_type = other DNA
tgaagccccaacgaccccgtgaccaacatctgccaggccgccgacaagcagttgtttacgctggttgaatgggctaagcggatcccgcacttcagctcccttcctctggatgaccaggtgatcttactacgcgctgggctgcacgtccaccggaactccgcccactccgctggtgttggcgctattttcgacagagtccttaccgagctggtgagtaaaatgagagacatgaggatggacaagaccgagctcgggtgcttgagggctattatccttttcaatcccgattag

SEQ ID NO: 203142 - DNA, 1614 bp, synthetic construct
  misc_feature 1..1614: note = Description of Artificial Sequence: Synthetic coding sequence
  source 1..1614: mol_type = other DNA
atgagctgggccgcccggccccccttcctgccccagcggcacgccgccggacagtgtggccctgtaggcgtgcgtaaggagatgcactgtggggtcgcctcacgctggcgccggcgccggccttggctagatcccgctgcagccgctgctgctgctgtagcaggcggagaacagcagactccggaaccagaacccggagaagcgggacgcgatgggatgggagattctggacgagattccagatcgccagactcaagttcaccaaaccctttgccacaaggcgtgccacctccaagcccccccggccccccgctgccgccgagtactgcaccttctctgggaggttccggagctccaccaccaccacccatgcccccaccacccctcggatctccatttcctgtcattagctcttcaatgggcagtcccggtctgccaccaccggctccacctggcttctcaggccccgttagcagccctcagattaatagcactgtctcactacccggcggtggatctggaccacctgaggacgtcaagcctcccgtgttaggtgtcagggggctgcactgtcccccaccacctggagggcctggtgcaggaaagaggctctgtgccatctgtggcgataggtcatccgggaagcactatggagtatatagctgcgagggctgcaaggggttctttaagagaaccatccgtaaggatctcacctattcttgcagagacaataaagattgcactgtcgacaagcggcagcgaaatcggtgtcagtattgcaggtatcagaagtgcctggccacaggtatgaagcgcgaagccgtacaggaagaacgtcaacgcgggaaagataaggacggcgacggggaaggagcaggcggggcaccagaagagatgcccgtagataggatacttgaggctgagctggcagtggaacaaaagagcgaccagggcgtggagggaccaggtggaactggcggctccggaagttctcccaatgatccagtcaccaatatttgtcaggccgcagacaagcagctgttcaccctcgtagagtgggctaagaggatcccccacttttctagtctccccttggacgatcaggtcatcctactgagagctgggtggaacgaacttcttatcgcctcttttagtcaccggagtatagacgtgcgggatggcattcttcttgccacgggcctacacgtgcacaggaattcagcccatagcgcaggcgtcggagctatttttgacagatcattgtcacgagtgttgacagaattggtctctaaaatgagggacatgcggatggacaagacagagctgggctgccttcgggccatcatcctgttcaaccccgacgccaagggcttgtcaaaccctagcgaggtggaagttcttagagaaaaggtttatgcatctctcgaaacctactgtaaacaaaagtaccccgagcagcaggggagattcgccaagttgcttttgcgactccctgcgttacgctctatcggattgaagtgcctggagcacttgtttttttttaaactaatcggcgacaccccaattgacactttccttatggaaatgctggaggctccccaccaactggcttag

SEQ ID NO: 203143 - DNA, 291 bp, synthetic construct
  misc_feature 1..291: note = Description of Artificial Sequence: Synthetic coding sequence
  source 1..291: mol_type = other DNA
tgaagccccaacgaccccgtgaccaacatctgccaggccgccgacaagcagctcttcacactggtggagtgggccaagagaataccacatttttccagtctgcccctggacgatcaagttattctactaagggctgggctgcacgtgcataggaactccgcccactctgcaggcgtaggcgctattttcgaccgcgtgttaactgagcttgtctctaagatgcgcgatatgcggatggataagaccgagctgggttgtttgagagcgataatcctgtttaatccggactag

SEQ ID NO: 203144 - DNA, 1614 bp, synthetic construct
  misc_feature 1..1614: note = Description of Artificial Sequence: Synthetic coding sequence
  source 1..1614: mol_type = other DNA
atgagctgggccgcccggccccccttcctgccccagcggcacgccgccggccagtgcggacccgttggcgtcaggaaggaaatgcattgtggcgttgctagcagatggagaagacgcagaccttggctggacccagccgccgctgccgctgctgccgtcgccggcggcgaacagcaaactccagagcccgagccgggagaagccggtagggacgggatgggagatagtggacgcgatagccggagcccagattcttcaagtccgaatcctctgccccagggcgttcctcctcctagcccccctgggccccccctgccccccagtactgccccctccctcggcggcagcggcgcccctcccccccctcctatgcccccaccgcccctcgggtcaccattcccagtcatctctagttcaatgggtagcccaggcttgcctcctccagctccacctgggttcagtggtccagtgtctagcccacaaatcaacagtaccgtgagccttcccggcggaggaagcggaccaccagaggatgtaaaaccccccgtgctgggcgttcgtggcctgcattgtccacctccgccaggtggccctggagccggtaagcgcctatgtgcgatttgcggcgataggagctctggtaaacactacggggtttatagctgcgagggctgcaaggggttctttaagcggaccatcagaaaggacctgacctacagctgcagggacaacaaagattgtactgtcgataagcgtcaacgaaataggtgtcagtattgtagatatcaaaaatgcctagcgaccgggatgaagcgggaagccgtgcaggaagagcgacagcgtgggaaagataaggatggagacggggaaggagcagggggcgcccccgaggagatgccagttgaccgaatcttagaagctgagttggcggtggagcagaagagcgaccagggagttgagggcccgggcggaactggtggctccgggagcagtccaaacgaccccgtgactaatatttgccaagccgctgacaaacagctgttcactctggttgaatgggctaagagaatccctcacttttccagtctgccgctggatgaccaggtgattttactgcgggccgggtggaatgagctattgattgcgtccttctcccacagatcaattgacgttcgagatggcattctcctggcaacaggcctacatgtacatcgcaactctgcccattccgccggcgtaggtgctatctttgatagatccttgtctagagtgctcacagagctcgtgagcaaaatgagagacatgaggatggataaaactgaactcggttgtctgagagctattatattatttaatcccgacgctaaggggctctcaaacccgagtgaagtggaggtgctgcgtgagaaggtttatgcctcgctggagacgtattgcaaacagaaatacccagagcagcagggtcgcttcgctaagctgctcttgcgcctgcccgcacttaggtccatcggccttaaatgcctggagcatttgtttttcttcaaactcattggagacacccccatcgacacattcctgatggaaatgctggaggcgccacatcagcttgcctag

SEQ ID NO: 203145 - DNA, 1614 bp, synthetic construct
  misc_feature 1..1614: note = Description of Artificial Sequence: Synthetic coding sequence
  source 1..1614: mol_type = other DNA
atgagctgggccgcccggccccccttcctgccccagcggcacgccgcaggacagtgtgggcctgtcggtgtgagaaaggaaatgcattgcggagtcgcatccagatggagacggcggcggccctggctggatccagccgccgccgcggccgcggccgtcgccggaggggagcaacaaactccagagccagagcccggcgaggcagggagagatggaatgggtgatagtgggcgtgactctcgatcaccagatagctccagcccaaatccacttcctcaaggggttcccccacccagtcctcccggcccacctttgcctccctcaacggccccctctctcggcggcagcggggcaccacctccccccccgatgcctccgccgccacttggcagccctttcccggttatctcctctagtatgggatcgcctggtctgcctcctcctgccccgcccggtttttctgggcctgttagttcaccgcagatcaactctactgtgtccctgccaggaggcggatccgggccaccggaagacgtcaaacctcccgttttgggcgtccgcgggcttcactgtccgcccccgcccggggggcctggtgcaggtaagcgcctctgtgcaatatgcggtgatcggagttcagggaagcactacggggtgtactcttgcgaggggtgtaagggattcttcaaacgcacaatccgcaaggacctcacatactcatgcagagataacaaggactgtacagtggataagcggcagcgaaacagatgtcagtattgtaggtaccagaaatgcttggctaccggcatgaagcgcgaggccgtacaagaggaacggcaacggggcaaggacaaagacggggacggtgagggggcgggcggggcccctgaggagatgcccgttgacagaattcttgaagctgagctggccgtggaacagaaatcagatcaaggcgtcgaggggcccggtgggaccgggggtagcggctcaagcccaaacgatcccgttaccaatatctgccaggcggcagataaacagctttttacacttgtggagtgggcaaaacgaattccacactttagttccctgcccctagatgatcaggtgatactcctgcgcgcaggatggaatgagctactaatagcgagcttcagtcacagaagcatcgacgtaagggatggaatcctgttggcgaccggtctgcatgtacatcggaattcagctcacagcgcaggtgtcggagctattttcgatagatccctgagcagagtattgactgagttagtgtccaaaatgagggacatgcgcatggacaaaacggaactcggatgcctgcgtgctatcatccttttcaatccggatgctaagggcctgagtaacccctccgaggtggaggttcttcgggagaaggtgtatgccagcttggaaacttattgcaagcagaagtaccctgagcaacaggggcggtttgccaagctactgttacgattgccagcacttcggtcaatcggcttgaaatgtttggaacacctctttttcttcaaacttataggtgatacaccaattgatacctttctaatggaaatgttagaggccccccatcaactggcatag

SEQ ID NO: 203146 - DNA, 1044 bp, synthetic construct
  misc_feature 1..1044: note = Description of Artificial Sequence: Synthetic coding sequence
  source 1..1044: mol_type = other DNA
atgcgggagtgcggcggcggccccggcgccggcaagcggctgtgcgcaatttgtggcgaccggagttctggaaagcactatggcgtgtactcttgcgaaggttgtaagggcttctttaagaggaccattcggaaagatctcacgtacagctgccgagacaacaaggattgcactgtcgacaaacgccagagaaaccgctgccagtactgccgctaccagaagtgtctggctactgggatgaagagggaggctgtgcaggaggaaaggcaacgcgggaaagataaggacggcgacggcgagggcgctgggggcgcacctgaggagatgcctgtcgacagaatactcgaagctgaactcgcggtcgagcagaagagcgaccagggtgtagagggcccgggtggaaccggcggtagcggatcctctcctaacgaccctgttaccaatatttgtcaggcagctgacaaacagttattcacattggtggaatgggccaagaggatcccacatttcagcagtctacccctggatgaccaggtcatactgctgagggccggctggaacgagttactgattgcctccttcagccatcgatcgattgatgtaagagacggaattcttctagccaccgggcttcacgtgcaccggaacagtgcccacagcgcaggcgttggcgcgattttcgataggtccctcagtcgggtgttgacagagctggtgtcaaagatgcgtgacatgcgaatggataaaactgagctgggctgcctacgtgccattatcctgtttaaccctgacgctaaaggactttccaatccctcagaagttgaggtacttcgcgagaaagtttatgcctcccttgaaacttactgcaagcaaaagtaccctgaacaacaaggaagattcgccaagctgttattgagattgccggctcttcgatcaattggcttaaagtgcctcgagcacttattcttttttaaacttatcggcgacacgcccatcgacacatttctaatggagatgttggaagctccacaccagctggcctag

SEQ ID NO: 203147 - DNA, 1179 bp, synthetic construct
  misc_feature 1..1179: note = Description of Artificial Sequence: Synthetic coding sequence
  source 1..1179: mol_type = other DNA
atgggcagccccggcctgcccccccccgccccccccggcttcagcggtcctgtcagttcccctcagataaacagcaccgtgagccttcctggcgggggatctggcccacctgaagacgtgaagccacctgtgcttggcgtccggggcctccactgccctcctccacctggtgggcctggagcagggaagcgactgtgcgcaatctgtggagatcggagttctgggaagcactacggtgtatattcctgtgaggggtgcaagggatttttcaaaaggacaataagaaaagatctaacgtactcgtgtcgcgacaataaagactgtacggtggacaagaggcagaggaacaggtgtcagtattgtcgataccagaaatgtctagcgacaggtatgaagagagaggccgttcaggaagagagacagcgcgggaaagacaaggacggagatggggagggagcaggtggggctcccgaggagatgcctgtcgatagaatccttgaagcagaactcgccgttgaacagaagtcagaccagggggtggaagggccagggggtacgggtgcacctagccctaacgatcctgttaccaatatctgtcaggctgctgataaacagcttttcactcttgttgaatgggctaaacgaatccctcactttagttccttgcccctggacgatcaggtgatcctccttagagcggggtggaatgaattgctgatcgcatcttttagccatcgctctatagatgtgagagatgggattttattggcaaccggactgcatgtgcaccgcaactccgcccacagcgccggcgtcggggccatctttgatagagtactcaccgaacttgtgtccaagatgagagacatgcggatggacaaaaccgagttgggctgcctcagggccattattctcttcaacccagacgcaaaaggactctccaaccccagtgaagtcgaggtgctgcgagaaaaggtctatgcatcactcgagacatactgcaagcagaaatatcccgagcagcagggccggttcgcaaagctgctgctgaggcttcccgcactgagatctattgggctgaagtgtctggagcatctatttttttttaagctgattggagacacccccatcgatactttcctcatggagatgctggaagccccacaccagctggcctag

SEQ ID NO: 203148 - DNA, 1170 bp, synthetic construct
  misc_feature 1..1170: note = Description of Artificial Sequence: Synthetic coding sequence
  source 1..1170: mol_type = other DNA
atgggcagccccggcctgcccccccccgccccccccggcttcagcgggcccgtgtccagcccccagattaatagtactgtgagtctgccagggggtggtagcgggccccccgaagacgtcaaaccacccgtgctgggtgtgcgtggcctgcattgtccccctccccccggggggcccggtgccggcaaaaggctttgtgccatttgcggggatagaagtagcggcaagcactacggggtttactcctgcgaagggtgtaaaggtttcttcaagcggacaatcagaaaggacctgacatatagttgccgggacaataaggattgcaccgtggacaagaggcagaggaatcgttgccagtactgccggtatcagaagtgtctcgccactggaatgaaaagagaggcagtgcaggaggagcggcagaggggaaaagacaaagacggcgacggcgagggcgccgggggtgcccccgaagaaatgcccgtggatcggatcttggaagcagagctggctgtggaacagaagtccgaccagggaggttctcagcacatcagcaaaagtcccaatgacccagtgactaacatctgtcaggctgctgataagcagcttttcacattagtcgagtgggcaaaacgcatcccccattttagtagtctccccttagacgaccaggtgatcctgctgagagctggatggaatgagcttctcattgcttctttctctcaccgctcaatagacgtacgcgacggcatactgttggccaccggcctgcatgtgcatcgcaactcagcacattcagccggtgtgggggccatcttcgaccgagtcctgactgagctcgtttcaaaaatgagagacatgaggatggataagaccgagttgggctgcttgcgcgctattattctgttcaaccccgatgcaaaagggctcagcaacccatccgaggtagaagttctaagagaaaaagtgtacgcatctttagagacttattgtaagcaaaagtatccggagcagcagggtcgcttcgcaaagctgcttctccgcttgcctgccctgagatccattggccttaaatgcctcgaacacctttttttcttcaaactgatcggtgacactcctattgatacatttctcatggagatgctggaggccccccatcagctcgcctag

SEQ ID NO: 203149 - DNA, 1044 bp, synthetic construct
  misc_feature 1..1044: note = Description of Artificial Sequence: Synthetic coding sequence
  source 1..1044: mol_type = other DNA
atgcgggagtgcggcggcggccccggcgccggcaagcggctgtgcgctatttgtggcgaccggtcgagcggaaagcactacggggtctactcctgtgaggggtgtaaggggttcttcaaacggacgatacgcaaagatttgacctactcatgccgagacaataaggattgtacagtggataagcgccagcgcaataggtgccagtactgcaggtatcaaaagtgtctggcaactgggatgaagcgagaagcagtgcaagaggaaagacagcggggcaaagacaaggacggtgatggagagggcgctggaggcgcccctgaagaaatgcccgtggaccgcatcctggaagctgagctggcagtggagcagaaatcagatcagggggtggagggacctggaggcactggggggagcggaagtagtcctaatgaccccgtgaccaacatttgtcaggcagcagataagcagctgtttaccctggttgagtgggctaaaaggatcccccacttttcatcactaccattagatgaccaggttattcttctgcgggcaggctggaacgaattactgatagcttctttctcgcacaggtccattgacgtgcgagatgggattctcttagctacaggcctccatgtccatcgaaacagcgctcattcggctggcgttggggccatctttgataggtcgctgagcagggtattgaccgaactggtatcaaagatgcgagatatgaggatggataaaaccgagcttggatgtttgagagctattattttgtttaaccctgatgcaaaagggctttcaaatccaagtgaggtagaagtactcagggagaaggtatatgcctccctggagacctactgcaagcaaaagtatcccgaacagcaaggcagatttgccaaactcctacttcgactgccggccttgaggtccattggtctaaaatgcttggaacacctgtttttcttcaagctcataggcgacacaccgatcgacaccttcctcatggagatgctggaagctcctcatcagctggcttag

SEQ ID NO: 203150 - DNA, 1179 bp, synthetic construct
  misc_feature 1..1179: note = Description of Artificial Sequence: Synthetic coding sequence
  source 1..1179: mol_type = other DNA
atgggcagccccggcctgcccccccccgccccccccggcttcagcgggcccgtcagtagcccccagatcaactccacagtctcgctgccgggcggggggagtgggccccctgaggacgttaaaccccctgtcttgggggtcagggggctgcattgccctcctcccccgggcggccccggggcaggtaagcgcctctgtgctatctgtggcgataggtcttctggaaagcattatggcgtttacagctgtgaaggatgtaaaggctttttcaaaaggacaattaggaaggatctgacctattcatgccgggataacaaggattgtactgtggacaaaaggcaaaggaatcgatgtcagtattgtcggtatcagaaatgcctggcgaccggcatgaaacgcgaggctgttcaagaagagcggcagcgggggaaggacaaagacggtgacggagaaggagccgggggtgcacctgaagagatgcccgtcgacagaatcctggaagctgagttagcagtggaacaaaagagcgatcaaggagtggaggggcccgggggcacaggagcaccttcccccaatgaccccgtcactaacatatgtcaggccgccgataaacagctctttacacttgtggaatgggctaagcgtatcccccatttttcaagcttgccccttgatgaccaggtcatccttcttcgagctggatggaacgagttacttatagcatccttctcacatagatccatcgacgtacgcgatggtatccttctggccaccggactgcatgtacacaggaatagcgcccatagtgctggcgtgggggctattttcgaccgcgttttaactgagctggtgagcaaaatgcgggatatgaggatggacaaaaccgaattaggatgcctgagagccatcattcttttcaatccagatgccaaggggctgtccaatccgagcgaggtggaagttctgagggagaaggtttatgcttccttagagacctattgtaagcagaaatacccagaacagcagggcaggttcgccaagctgctattaaggcttccagctctgcggtcaatcggactaaaatgcttggagcaccttttcttcttcaagttaattggggacactccgatagacactttcttgatggaaatgcttgaggctcctcaccagcttgcgtag

SEQ ID NO: 203151 - DNA, 1170 bp, synthetic construct
  misc_feature 1..1170: note = Description of Artificial Sequence: Synthetic coding sequence
  source 1..1170: mol_type = other DNA
atgggcagccccggcctgcccccccccgccccccccggcttcagcggcccagtgtctagcccacagatcaattctacagtgtcactgccgggcggcggctccgggccacctgaagatgttaagccacccgtgttaggagtgcgaggcctccactgcccgcctccgccagggggaccaggggctgggaagcggctgtgtgccatctgtggtgatagatcaagcggaaagcattatggcgtgtactcatgtgagggatgtaaggggttttttaaaagaacaatccgaaaggatttaacgtattcatgccgcgataataaggattgtaccgtggataagcggcagcgcaatcggtgtcagtactgccggtaccagaaatgtcttgcaaccgggatgaaacgggaagccgtacaggaggagcgccagcgaggaaaagataaggacggcgatggcgaaggtgctgggggggcccctgaggagatgccagtcgaccggatattggaagcagagctggctgtggagcagaagagcgatcagggcggaagccagcatatatctaagagtcccaacgaccctgtcacaaacatttgtcaagccgctgataaacagctgttcaccctggtggaatgggctaaaagaatcccgcacttttcgtctctgccactcgatgatcaagttattttgctgcgggcaggctggaatgagctgctaatcgcttcattctcacaccgaagcatcgacgttcgagatggcatcctgttagccaccggtctgcatgtgcataggaactccgcccactccgcgggagttggagccatattcgaccgcgtgttgaccgagctcgtgtctaagatgagggatatgcgaatggataagactgaactgggatgcctcagagccattattctgtttaacccggacgctaagggtctgtccaatccttcagaagtggaagtgctgagagaaaaggtgtacgcaagtctggaaacttattgtaagcagaagtacccagagcagcagggaaggttcgccaagcttctgttgagattgcccgctcttcggtccatcggcctgaagtgtctagagcatctgttctttttcaagctgataggtgacactcctatcgatacgtttttgatggaaatgctggaggccccgcaccagctcgcctag

SEQ ID NO: 203152 - DNA, 861 bp, synthetic construct
  misc_feature 1..861: note = Description of Artificial Sequence: Synthetic coding sequence
  source 1..861: mol_type = other DNA
atgccccagggcagcgtgggccggtggggctgcgagaagaagtgcattgtgggctcccggcccggcggcggaggagacgggcctggttggattcctcaaagacgtaggcgtcgtcggtggcaggctgaaaataacaagccacgaagcagatcccaaggaagactcgatgggacgggatgggccacagctggaggaatcaattccacggtgagtctcccaggtggcgggagtggacctcccgaagatgtgaagccacccgttctgggagtgcgagggctgcactgcccccctccccccggtgggcccggggccggaaagaggctctgtgccatttgtggcgacaggtcatcggggaagcattacggggtgtactcctgtgagggctgtaaaggattcttcaagcggactatcaggaaggaccttacctacagttgccgcgacaataaggactgcacagttgataaaagacaacggaaccggtgtcaatattgccggtatcagaagtgccttgcaaccggcatgaagcgagaagccgtgcaggaggaaaggcagagggggaaagacaaagacggcgatggcgaaggggcaggtggcgcccctgaagagatgccagtcgatcgcattctagaggccgagctggccgtcgaacagaagtcagatcagggggtcgaaggaccggggggcacaggcgggagcggcagcagcgtctccgtcggagttaatccactttccttcgtcatgggcgtcggtggtggatctcttgggcttttttacatcccttcacccagcttccccctgattacctttcttactcttctgggaactgggggcgcagcgaagcaggggctgtctaatatctag

SEQ ID NO: 203153 - DNA, 1170 bp, synthetic construct
  misc_feature 1..1170: note = Description of Artificial Sequence: Synthetic coding sequence
  source 1..1170: mol_type = other DNA
atgggcagccccggcctgcccccccccgccccccccggcttcagcggacccgtgtcctccccccagatcaatagtactgtttctctgcccggcggagggagtgggccaccagaggacgtgaaacccccagtactgggcgttcgcggcctccactgtccaccgcccccaggggggcccggtgctggcaagcgcttatgtgcaatctgtggggatcggtctagtggaaaacattatggcgtgtactcttgcgagggctgcaaggggttctttaaaagaaccatacgaaaagatctgacttacagctgtagagataacaaggactgtacggtcgacaagagacagcgcaatcgctgccaatactgtaggtatcagaaatgtctcgccactggaatgaagcgggaagctgtgcaggaagaaaggcaaagggggaaagacaaggatggcgacggcgagggtgccggcggcgcccccgaagagatgcccgtagacagaatcttagaggccgagctggctgttgagcagaagtccgatcaaggggggtcgcagcatatttcaaagtccccaaatgaccctgtgactaacatttgtcaggctgctgataaacagctgttcaccctagtggaatgggccaagcgcatacctcatttcagctccctccctttggacgaccaggtgatcttgctgagagcgggctggaacgagctacttatcgcctcctttagtcacaggtctatcgacgtgcgggacggaattctcttggcaacaggcttacacgtgcaccggaacagcgcgcactccgccggggtgggtgcaattttcgaccgagtcttaaccgaactggtgtccaaaatgcgtgatatgaggatggataagaccgagctaggctgtttacgggcaatcatactgttcaatccggacgctaaaggcctctctaatccctcagaagtggaagtcctaagggagaaagtgtatgctagcctggagacgtattgtaaacagaaataccccgagcagcagggccggtttgcaaaactgttactgcgcctgccggccctgcggagtatcggactgaagtgtctggagcacctgttcttttttaagctgattggcgatactcccatcgacaccttcttgatggagatgctggaagctccccatcaactggcctag

SEQ ID NO: 203154 - DNA, 861 bp, synthetic construct
  misc_feature 1..861: note = Description of Artificial Sequence: Synthetic coding sequence
  source 1..861: mol_type = other DNA
atgccccagggcagcgtgggccggtggggctgcgagaagaagtgcatagtcgggagccggcctggcgggggcggggacgggccgggttggatccctcaacgcagacgcaggcgccgttggcaagctgagaacaataaacctcggagcagatctcagggccgcctcgacggaactggatgggccaccgctggcggaatcaattccaccgtctctttgcccggagggggttcaggccctcccgaggacgtaaaaccacctgtgctcggagtccgaggactgcactgccccccccctcccggaggcccaggcgcggggaagcggttgtgcgctatctgtggggaccgaagctctggcaagcactatggtgtgtactcttgcgagggatgcaaaggcttcttcaagagaactattcggaaagacctcacttactcgtgccgcgataacaaagattgtactgtggacaagagacagcggaaccgttgtcaatattgcaggtaccaaaagtgcttagccactgggatgaagcgcgaggccgttcaggaagaacgtcagagaggcaaagacaaagacggtgacggagaaggggctggcggagctcctgaggaaatgcccgtagaccggatcctagaggcagagttggccgtggaacagaaatccgaccagggcgtggaaggaccaggggggacggggggtagcgggtcatccgtgagtgtgggcgtgaaccccctgtcctttgtgatgggggtgggcggggggtccctgggcctcttttatattccatctcctagttttcctttgatcacttttcttactctactggggaccggtggtgctgcgaagcaaggattgtctaacatttag

SEQ ID NO: 203155 - DNA, 1179 bp, synthetic construct
  misc_feature 1..1179: note = Description of Artificial Sequence: Synthetic coding sequence
  source 1..1179: mol_type = other DNA
atgggcagccccggcctgcccccccccgccccccccggcttcagcgggccagtgtcttcgcctcagatcaacagcacagtctccctgcctgggggggggtctgggccccccgaggacgtgaagccacccgtgttgggggtccgcgggctgcactgtcccccacctcctggagggccaggtgccggaaagcggctgtgcgctatttgcggtgacagatcatccggcaaacactacggcgtctatagctgtgagggatgcaagggcttttttaaaagaactattaggaaagatctgacctattcttgtcgagataataaggactgtacagtcgacaagaggcagagaaatagatgtcagtattgcaggtatcagaagtgtttagctacaggaatgaagcgggaagcggtccaggaagaaaggcaacggggtaaagacaaagacggcgatggggagggagccgggggggccccagaggagatgccagtggaccgaatcttagaagccgaactggctgtggagcagaaaagcgaccaaggtgtggagggaccaggagggacgggggccccatcaccaaatgacccagttactaatatttgtcaggccgcggacaagcagctgtttacactcgtcgaatgggcaaaaaggatcccccatttctccagtctgcctcttgacgatcaggtcatcctgctcagggctggctggaatgaactcctgattgccagcttcagccatcggtccattgatgttagggacggaatccttctcgctactggccttcatgtgcaccgaaatagtgcacactcggcaggagtcggcgctatcttcgatagagtgctaactgagttggtcagcaagatgagagatatgaggatggacaaaaccgagctcggatgcctaagagcaatcatactgtttaatcccgatgcaaagggcttatctaatccctctgaggtcgaagtgctcagagagaaggtgtatgcaagcctggagacctattgcaagcaaaagtatcctgagcaacagggcaggttcgcaaaactgctgcttaggttacctgccctccgtagcatcgggctcaaatgtctcgaacaccttttttttttcaagctcattggcgatacccccattgacaccttcctgatggaaatgctcgaagcaccccatcaactcgcatag

SEQ ID NO: 203156 - DNA, 1044 bp, synthetic construct
  misc_feature 1..1044: note = Description of Artificial Sequence: Synthetic coding sequence
  source 1..1044: mol_type = other DNA
atgcgggagtgcggcggcggccccggcgccggcaagcggctgtgcgctatatgcggcgaccgaagttccggtaagcactacggcgtatactcctgcgaagggtgcaaggggttcttcaagaggacaatccggaaagatctgacatattcatgccgggataacaaagactgcaccgttgacaaacggcagcgcaaccgatgtcagtactgtcgttatcaaaaatgtctggcaacgggcatgaagcgggaagccgtccaggaagagaggcagcgaggcaaggataaggacggcgatggagaaggagccgggggggcccctgaggagatgcccgtggatcgaattttagaagccgaactggctgtggagcagaagtctgaccagggcgtcgaaggtccaggcggtacgggaggatcaggaagctcccccaatgacccagtgacaaatatttgccaggccgccgacaagcagctgttcacactggttgagtgggcaaagcggatcccccactttagctctctacctttagatgatcaggttatccttctgcgtgcaggttggaatgaactgttaattgcctctttttcacaccgctccatagatgtgcgcgacgggatccttcttgcaacaggcttgcacgtacataggaatagcgcccacagcgcaggagtgggagccatttttgatagaagtctgagtcgggttttgaccgaacttgtgagcaagatgcgcgatatgcgtatggataaaacagagctgggatgcctgagggctattattctctttaaccccgatgccaagggtctcagtaacccctccgaagttgaggtgctgcgggagaaggtctatgcttctctcgaaacatattgtaagcagaaatatccagagcagcagggaagatttgcgaagctgctgctcagactaccagctttaagaagcatagggctcaagtgtctggagcatcttttcttcttcaagctcataggagacacacccattgacacctttctcatggagatgctcgaggcacctcatcagcttgcatag

SEQ ID NO: 203157 - DNA, 1179 bp, synthetic construct
  misc_feature 1..1179: note = Description of Artificial Sequence: Synthetic coding sequence
  source 1..1179: mol_type = other DNA
atgggcagccccggcctgcccccccccgccccccccggcttcagcggacccgtttcttcccctcagatcaactccaccgtctccctcccgggcggcggatccgggccgcccgaagacgtgaagccccctgtgctcggagtccgaggtttgcactgtccaccaccccccggtggacccggcgcaggaaaacgcctgtgcgcaatttgtggagaccgctccagcggcaagcattatggagtatattcctgcgaaggatgtaagggattctttaagaggacaatcaggaaagacctcacgtactcttgtcgggataacaaagactgcaccgtcgataagaggcagagaaatcggtgtcagtactgccgctatcagaagtgcctggcgaccgggatgaaaagggaagccgtgcaggaggagaggcagagagggaaagataaagacggcgatggggaaggggccggtggagcgccagaggagatgcctgtggatcggatcctcgaagcagaactggccgtggaacagaaaagtgaccagggggtcgagggcccaggcggaacaggtgctccaagtccaaatgatcctgttactaatatttgccaagctgctgataagcagctcttcacattagtcgaatgggccaaaaggattccgcactttagcagcctccccctcgacgaccaggtaatcctgttgagagccggctggaacgaattgctcattgcctccttcagccacaggtcgatagatgtcagagacggaatcctccttgcaaccggtttacacgtgcaccgcaatagcgcacactcagcaggggtgggcgccatcttcgatcgagttttgaccgagttagtcagtaaaatgagggacatgcgcatggacaagacagagctgggctgtctgcgtgccatcatcttgtttaatccagatgctaaggggctttccaaccccagtgaagtcgaggtgctccgtgaaaaggtgtacgctagcctggaaacttactgtaagcagaaatatcccgagcagcagggacgcttcgctaagctgctacttagactccccgccctccgaagtatcggactcaagtgcctcgagcatttgtttttctttaaactgataggcgacaccccaatcgacacctttctgatggagatgctcgaagccccccaccagctcgcttag

SEQ ID NO: 203158 - DNA, 1179 bp, synthetic construct
  misc_feature 1..1179: note = Description of Artificial Sequence: Synthetic coding sequence
  source 1..1179: mol_type = other DNA
atgggcagccccggcctgcccccccccgccccccccggcttcagcgggcctgtgtccagtccacagatcaatagcaccgtgagcctaccaggcggtgggtccggccctcctgaagacgtgaaaccgccagtgctgggcgtgaggggcctgcactgtcctccaccacccggtggtcctggagccggaaaaaggctgtgcgcaatctgcggggaccggtctagtggcaagcattatggcgtgtattcgtgcgaggggtgcaaaggatttttcaaacgcaccatcaggaaagaccttacctactcctgtcgagacaacaaggattgcactgtggataagagacaacgtaaccgttgtcagtattgcaggtaccaaaagtgtctggcaacagggatgaagcgcgaggcagttcaggaagaaaggcagagagggaaagacaaggacggagatggagagggtgccggcggggcacctgaggagatgccggtggatcgtattctggaagccgagcttgccgtcgagcaaaagtccgatcagggtgtggagggacctggcggcaccggagcaccatcgcccaacgaccccgtgaccaatatctgccaggcagccgataaacagctgttcaccctggtggaatgggccaagcgaattcctcatttctccagtttgccactggatgatcaggtcattctgctgcgggccgggtggaatgaacttttgattgcctccttctctcaccgctctattgatgtccgggatggcattttactggctacaggtttgcatgttcatcgcaactcagcccactctgccggtgtgggcgcaatttttgaccgcgtgctgacagagttggtctctaagatgagagatatgagaatggacaagaccgagctgggatgcctgcgggccatcattctgtttaatcccgacgctaagggcctgtccaaccctagcgaagtggaggtgctccgggagaaggtgtacgcatcgttggagacatactgcaagcagaaatatcccgaacagcaggggcggttcgcgaagctgctgctgcgccttccagccctccggagtattgggctgaagtgtctggaacatttatttttcttcaaactcataggagatacaccaatcgatacttttctcatggaaatgctggaagccccccaccagttggcttag

SEQ ID NO: 203159 - DNA, 861 bp, synthetic construct
  misc_feature 1..861: note = Description of Artificial Sequence: Synthetic coding sequence
  source 1..861: mol_type = other DNA
atgccccagggcagcgtgggccggtggggctgcgagaagaagtgcatcgttggctctcgtccgggggggggcggggatgggcccgggtggatcccacagcggcgtagacgtcggaggtggcaagccgagaacaataaacccagaagcagatctcaggggcggctggatggcactggctgggctacagccggaggtattaacagcactgtttccctaccagggggtggatccggaccacccgaggacgtaaagcctcctgttcttggcgtgcggggactgcactgtcccccaccgcccggtgggcccggtgccggtaagcgtctgtgtgctatctgtggtgatagatctagtggcaaacactatggtgtgtactcctgtgaaggttgcaagggattcttcaagcgaactattagaaaagacctgacctattcatgccgggacaacaaggattgtacagtagacaagaggcagagaaatcgatgccagtattgtcgctaccaaaaatgcctcgctacgggcatgaagagggaagctgtacaggaggaacggcagcgggggaaagataaggatggggacggcgagggagcagggggcgccccagaggaaatgcccgtcgaccggatcctggaagccgagctggctgtcgaacagaagtctgaccagggggtggagggccccggaggcaccgggggcagcggtagctctgtgtccgtgggcgtgaacccactttcttttgtcatgggggtggggggcggcagcctggggcttttttatattccaagtccctcattccctcttattacctttctgactctgctgggaactgggggagctgctaagcagggtctgtccaacatctag

SEQ ID NO: 203160 - DNA, 1170 bp, synthetic construct
  misc_feature 1..1170: note = Description of Artificial Sequence: Synthetic coding sequence
  source 1..1170: mol_type = other DNA
atgggcagccccggcctgcccccccccgccccccccggcttcagcggtccggtgagcagtccccaaatcaacagcacggtcagtctgccgggtggaggaagtggacctcctgaagacgtgaaacctcctgttctgggcgtccgcggcctccactgcccccctcccccagggggacccggcgccggcaaaaggctgtgtgctatctgcggggacagatctagtggaaagcactatggcgtgtatagctgcgagggctgtaaagggttctttaagagaacaattaggaaggatctcacctacagctgccgggacaataaggattgtacggtggacaagcggcagcgcaacaggtgtcagtactgccgctatcagaagtgccttgccacagggatgaaaagagaagctgtccaggaagagcggcagcgcggaaaagacaaagacggagatggcgagggggccggcggggctccagaagagatgccagtagatcgtatcctagaggcagaactggccgtggagcaaaagagcgaccagggtggatcccagcatattagcaaatcacctaatgaccctgtaaccaacatatgtcaagccgctgacaagcagctctttaccttagtggagtgggctaagcggataccccatttctcttccttacctctcgacgaccaagtcatcttgttacgagctgggtggaacgagttgctgatcgcatcctttagccatcggtccatcgatgtgcgtgacggcattcttctggcaaccggattgcatgtccaccgcaactccgcacacagtgccggggtcggggctattttcgaccgagtactgaccgagctggtcagtaagatgcgggacatgagaatggataaaacagagctcggctgtttaagagcaatcattttgtttaatccggatgcaaagggattgagcaatcccagcgaggtggaagtgctgagagagaaggtgtatgctagtcttgagacctattgcaagcagaaatatccagagcagcagggacgctttgctaaactgctgctacgcctccctgcacttcggtcaatcggcctgaagtgcttggagcacctctttttctttaagcttatcggggacacccctatcgacaccttcctcatggagatgctcgaggccccccaccaactggcatag

SEQ ID NO: 203161 - DNA, 1044 bp, synthetic construct
  misc_feature 1..1044: note = Description of Artificial Sequence: Synthetic coding sequence
  source 1..1044: mol_type = other DNA
atgcgggagtgcggcggcggccccggcgccggcaagcggctgtgcgccatttgtggagaccggagctcaggaaagcactacggcgtatactcttgtgagggctgcaagggattctttaagcgcaccatccgtaaagatttgacatattcttgtcgagacaataaggactgcacagtggacaagcggcagcgtaatagatgccagtactgccgttaccagaaatgcctcgccacgggaatgaaaagagaggcggtgcaggaggagcggcaacggggcaaagataaggacggcgatggagaaggagccgggggcgcacccgaggaaatgccagtggacagaatcctggaagccgaactcgctgtggagcaaaagtccgaccaaggcgtggaaggtccgggagggacaggaggttccggatcatcacccaacgacccggtcactaatatttgccaggctgctgacaagcagctgtttaccctggttgagtgggccaaacgaatcccacactttagttccttaccgctggacgaccaggtgattctgctccgagccggctggaacgaactactcattgcgtctttcagccatcggagcattgacgtacgagacgggatcctcttggccacaggcctgcacgtacaccgcaattcggcacattccgctggggtaggtgcaatcttcgaccgctcactctctcgggtcctcacggagctggtgtctaagatgagagatatgcggatggataaaaccgagctgggatgcctgcgggccattatcctgttcaaccctgacgctaagggcctgtcaaatccttccgaggtagaggtgctccgcgagaaggtctacgccagtctggaaacctattgtaagcagaaatacccagagcagcagggcaggttcgccaagctgttgctgaggctgcctgcactgcggtcaataggactgaagtgtctggagcatctctttttctttaaactcatcggcgacacgcctatcgacacgttccttatggaaatgcttgaggccccccatcaactggcttag

SEQ ID NO: 203162 - DNA, 1170 bp, synthetic construct
  misc_feature 1..1170: note = Description of Artificial Sequence: Synthetic coding sequence
  source 1..1170: mol_type = other DNA
atgggcagccccggcctgcccccccccgccccccccggcttcagcggtcctgtctccagcccacaaatcaactctacggtttccctccccggagggggatctggacctcctgaggatgttaagccacccgttctgggcgtacgcggattacactgtccccctccacctgggggccccggcgctgggaagcgactgtgtgctatctgtggtgatcgctcttccggcaagcactacggagtgtatagctgtgagggttgcaaaggattttttaagcggaccatcagaaaagatctgacctacagctgccgagataataaggactgtacagtggacaaaagacagcggaacaggtgtcaatactgtcgttaccagaagtgcctggccaccggtatgaagagagaggctgtgcaagaagaacgacagcgcggtaaggacaaggatggcgatggcgagggggcggggggggcacctgaggagatgcctgtggataggatattggaggcggagctggccgtggagcaaaaatcagatcagggagggtcgcaacacattagtaagtcccccaatgaccccgtcacaaacatctgtcaggcggccgacaagcagctgtttacactggtggaatgggcgaaaagaatcccccacttctcctctctgccgctcgacgaccaggtgatactcttaagagccgggtggaatgagctgctcatcgccagtttctcccaccgaagcattgatgtcagagatggtatcctacttgctacaggtttgcacgtgcatcgaaacagcgcacatagcgcaggcgttggcgcaatctttgaccgagtccttaccgagcttgtgagcaagatgagggacatgcgcatggacaagaccgagctcggctgtctccgtgccatcattctttttaatccagatgccaagggactgtcaaacccttccgaggtggaggtcttgcgggagaaggtgtatgccagccttgagacctactgtaaacagaaatacccagaacagcagggcagattcgccaagctgctgctgcggcttcccgcactacggtcaatcggactgaaatgcctggagcacctcttctttttcaaactgatcggagacactccaatcgacacgttcctgatggaaatgttagaggccccacatcagctggcctag

SEQ ID NO: 203163 - DNA, 1044 bp, synthetic construct
  misc_feature 1..1044: note = Description of Artificial Sequence: Synthetic coding sequence
  source 1..1044: mol_type = other DNA
atgcgggagtgcggcggcggccccggcgccggcaagcggctgtgcgccatatgcggcgaccggtcatccggcaaacactacggcgtgtatagctgcgagggctgtaagggtttctttaagaggacaatccggaaggatctgacttactcttgcagagataataaggattgtacagttgataagcggcaaaggaaccgatgtcaatattgtcgctaccagaaatgtctagccaccgggatgaaacgtgaagccgtgcaggaggaacggcagaggggcaaagataaggacggcgatggcgaaggcgctggcggtgcgccagaagaaatgcccgtggatcgaattctggaagccgaactcgccgttgagcagaaatcagaccagggagtcgaaggccccgggggaaccgggggaagtggttccagtcccaatgaccctgtgacaaatatttgtcaggccgctgacaagcagctctttaccttggtggaatgggccaagcggattccacacttctccagtctacctctcgatgaccaggtcatcttgctgagagctggctggaatgagctgctgattgctagcttttcgcacaggtcgattgatgtaagagacggcatcctgctggccacagggttacacgtgcaccgaaactccgctcactcagcaggtgtgggtgcgatctttgatcggagcctgtctcgcgtgctcaccgagctggtaagcaagatgcgtgatatgcgtatggacaagaccgaactcggttgcctgcgggcgatcatcctcttcaaccccgacgccaaaggcctgtctaatccatccgaggtcgaagtgctacgggaaaaagtctatgcatctctcgaaacctactgcaagcaaaagtaccctgaacagcagggcagatttgccaaactcttattgcggttgcccgctctgcggtctatcggactaaaatgtctggagcacctgttcttctttaagcttatcggtgataccccaatcgacacattcttgatggaaatgctcgaggccccgcatcagctggcctag

SEQ ID NO: 203164 - DNA, 861 bp, synthetic construct
  misc_feature 1..861: note = Description of Artificial Sequence: Synthetic coding sequence
  source 1..861: mol_type = other DNA
atgccccagggcagcgtgggccggtggggctgcgagaagaagtgcattgtgggatctaggcccggaggcgggggggatggaccaggatggataccccagcggagaagacgacgtcgatggcaggctgaaaataataagcctcgtagccggtcccagggaaggcttgacgggaccgggtgggcgactgcaggcggaattaattcaacagtgagcctcccaggcggtggcagcgggccaccagaggacgtaaagccgcctgtgttaggagtgagaggtctgcactgcccacccccaccaggagggccaggggccggaaagagactctgcgccatatgcggagacagaagctctggaaaacattacggagtatattcctgtgaagggtgcaaaggcttcttcaagcggacaatacggaaagacctgacttattcttgtcgagacaataaggactgtaccgtggataagcgccagcgcaatagatgtcaatactgccgatatcagaaatgcctggctaccgggatgaaaagagaagcagtccaggaggagcggcagagaggtaaagataaggacggtgacggtgagggagccggcggagcccccgaggagatgccggtcgataggatccttgaagcggaacttgcagtggaacaaaaaagcgatcaaggagtggagggaccgggtggtactggggggagcgggtctagcgtaagcgtgggggtgaatcccctgtctttcgtgatgggtgtcggaggggggagcctggggctcttttacattccctccccaagcttccctctgattacatttctgactttgttggggacgggcggcgccgccaaacaggggcttagtaacatctag

SEQ ID NO: 203165 - DNA, 1392 bp, synthetic construct
  misc_feature 1..1392: note = Description of Artificial Sequence: Synthetic coding sequence
  source 1..1392: mol_type = other DNA
atgtacggcaactacagccacttcatgaagttccccgccggctacggaggttcgcctgggcatacgggaagcaccagcatgagcccgtccgcagccctgtcaacaggcaagcccatggactcccacccttcttacaccgatacccccgtgtcagccccccgtacgctgagtgcagttggcacacccctaaacgcattaggatctccatacagggtcataacttcagccatggggcctccaagtggcgcgcttgctgcacctcctggcatcaacttggtcgcacccccttccagtcagctgaatgttgttaacagtgtcagttccagcgaggacattaagcccctgcccgggctgcccggcattggtaacatgaattaccccagcacatctccaggctcactagtcaaacacatctgcgctatctgcggagatcggagcagcggcaagcactacggagtatacagctgcgaggggtgcaagggattcttcaaacggactattcgcaaggatctcatctatacatgccgcgataacaaagattgtcttatcgataagcgacagcggaacagatgtcaatactgcaggtaccagaagtgtcttgttatgggaatgaaacgcgaggctgtgcaagaggagagacagcggagtagggagcgagctgaaagcgaggcggagtgcgcgacgtccggacatgaagatatgcccgtggaacggattctcgaggccgagttggccgtcgaacctaagactgaatcctacggtgacatgaacatggaaaattctaccaacgatcccgtaaccaacatctgtcatgccgcggataagcagctcttcacccttgtggagtgggcaaagcgtataccccacttttccgacttaactctcgaggaccaggtgattctcctcagggcaggttggaatgagcttctcatcgcctccttttcacatcgcagcgtctccgttcaggatggcatactgttagctacagggctgcatgtccatcgctcgagtgcccactccgccggggtgggctcaatatttgacagagtgctgacagagcttgtgagcaaaatgaaggacatgcagatggataagtcagaactgggctgccttcgcgccattgtgctgttcaatcctgatgctaagggactgtctaatcccagcgaggtcgaaacactgcgcgagaaagtctacgctaccctggaagcctatactaagcagaagtatccagagcagcccggaaggttcgctaaactgctgctgcggttgcctgcccttagaagtataggcctaaagtgcttagagcacctctttttttttaagctcattggagacacacccatcgatacattcttgatggagatgctggaaacgccactgcagatcacttag

SEQ ID NO: 203166 - DNA, 2619 bp, synthetic construct
  misc_feature 1..2619: note = Description of Artificial Sequence: Synthetic coding sequence
  source 1..2619: mol_type = other DNA
atggccaccgcctgcaagcggagcggcgagccccagagcgacgacattgaagcaagccgcatgaagcgggccgccgctaaacacctgatcgagcgttattaccaccagctcactgaggggtgcgggaatgaagcctgtactaacgaattctgcgcatcgtgtcccactttcctgcgaatggacaacaatgcggcagcgatcaaggctctggagctgtataagatcaacgccaaactgtgtgatccacatccgagcaaaaagggcgcaagcagcgcctacttagagaacagcaagggagcacccaacaattcatgcagcgaaatcaagatgaataagaagggagcacgcattgactttaaggatgtgacatacctcactgaagagaaggtatatgagatcctagaactttgcagggagagagaagattatagtccactgatacgggtgatcggcagagtgttttcttccgccgaggcactggtgcagtcatttcgtaaggtgaagcagcatacaaaggaagaactaaagagtctgcaggctaaggacgaagacaaagatgaagatgagaaggaaaaagccgcttgttccgcggcggctatggaggaagattccgaagccagctcttcccggattggcgacagctcccagggagacaacaatctgcaaaaattaggtcccgacgacgttagtgtcgatatcgacgcaatcaggagagtctatacccggctcctgtcaaatgagaaaatcgaaactgctttcctcaacgccctggtctatctgtctcctaacgtggagtgcgatctcacgtaccacaacgtgtattctcgggaccctaattacctgaacctgtttatcattgtgatggagaatagaaatttgcattctcctgaatacctggaaatggcactgcccctcttctgcaaggcaatgtccaaactgccactggcagcacaggggaagctgattagattgtggagcaagtacaatgcagatcaaattcgacgcatgatggagacctttcagcaactgatcacatataaagtgatctccaacgaattcaactcacgcaacctcgtgaatgacgatgacgcaatcgtggctgcgtccaagtgtctgaaaatggtctactacgccaatgttgttgggggagaggtggacaccaaccataatgaagaggacgacgaagagccaattccggaatccagcgagcttactctgcaagaactgctcggcgaagagcggagaaacaaaaaaggacctcgagttgatccactggaaacagagctaggggtgaagaccttggattgccgaaaacctctgataccttttgaagaatttattaatgagcctttaaacgaggtgctggaaatggacaaggattacacattcttcaaggtggagacagaaaataagtttagcttcatgacttgcccattcatacttaatgccgtaacaaagaatctgggcctttactacgacaacagaattcggatgtatagtgagcggcgtatcaccgtgctatacagcttggtgcagggtcagcagcttaacccctacctacggctcaaggtcaggagggaccatattatcgatgatgcccttgtcagactggagatgatcgccatggagaatcccgctgacttgaaaaaacagctttatgtcgaattcgagggcgagcagggggtggacgaggggggcgtttccaaagagttcttccagcttgtggtggaagaaattttcaatcctgatatcggcatgtttacttacgacgaaagtactaagctgttctggtttaatcctagtagcttcgagacagagggtcaatttaccctcataggaattgtcctgggactagcgatttataacaattgtatactcgatgtccatttcccaatggttgtctatcgcaagctgatggggaagaagggaacattccgcgaccttggagactctcatccagtcctttaccaatctttgaaggatctcctggaatacgaggggaatgtcgaggacgatatgatgatcacattccagatctctcagactgacttattcgggaatcccatgatgtacgacctcaaggagaacggggacaaaatccctattacaaacgagaacaggaaggagttcgtaaacctgtattccgactacatactgaacaagtcagtcgaaaagcagtttaaggcctttaggagagggttccacatggtcacaaacgaatcaccgctgaaatacctgtttcggcctgaggagatcgaactattgatatgcggcagcaggaaccttgattttcaggcgcttgaagagacaaccgaatacgatggggggtacactcgagacagtgttctgatccgggaattttgggagattgtgcactccttcacagatgagcagaagagactgttcctacaattcactactggaacagaccgagccccagtgggtgggttgggaaagctaaagatgatcatagcaaaaaatggacctgatacggaacgccttccaacatcacatacatgtttcaatgtcctgttgcttcccgaatactccagcaaggaaaaacttaaggagcgactgttgaaggccattacttacgcaaaaggattcggtatgttgtag

SEQ ID NO: 203167 - DNA, 75 bp, synthetic construct
  misc_feature 1..75: note = Description of Artificial Sequence: Synthetic coding sequence
  source 1..75: mol_type = other DNA
atgacccgggaccagaacggcacctgggagatggagagcaacgagaactttgagggctacatgaaggctctgtag

SEQ ID NO: 203168 - DNA, 312 bp, synthetic construct
  misc_feature 1..312: note = Description of Artificial Sequence: Synthetic coding sequence
  source 1..312: mol_type = other DNA
atgacccgggaccagaacggcacctgggagatggagagcaacgagaactttgaaggctacatgaaagcactggatatcgatttcgccacaagaaagatcgcagtgaggcttacacagaccaaagtaatagaccaggatggggacaacttcaagaccaaaaccactagtacattccgcaactatgacgtggatttcacggtgggcgtagagtttgatgagtacacaaaaagccttgacaatcgacacgtgaaagcactggtgacatgggagggagacgtcttagtctgcgtgcagaagggggaaaaggagtag

SEQ ID NO: 203169 - DNA, 1494 bp, synthetic construct
  misc_feature 1..1494: note = Description of Artificial Sequence: Synthetic coding sequence
  source 1..1494: mol_type = other DNA
atgggcctgcccgccctgctggccagcgccctgtgcaccttcgtgttgcccctgctcctgtttctggcggctattaaactttgggacctctattgcgtgagcggtcgagatagatcatgtgccctgcccctgcctcctgggactatgggtttcccgttctttggggagactttgcaaatggtgctgcagaggaggaagttcttgcaaatgaagagacgcaaatacggctttatctacaaaactcacttgtttgggcgcccaacagttagagtgatgggggcggataatgttcgaagaatccttcttggggagcatcgcctggtgagcgtgcactggcccgccagcgtgcggacaattctgggcagtgggtgcctatccaatcttcacgacagcagtcataagcagcgaaaaaaagtgatcatgcgggctttcagtagggaagctctggaatgctatgtgccagtgatcaccgaggaggtcggtagcagcttagagcagtggctgagctgtggcgaacgaggactgctggtgtatccagaggtgaagaggcttatgtttcgcattgccatgcggatccttctgggatgtgagccacaacttgctggagacggagactcagaacagcaactggtggaggcattcgaggagatgactagaaatttattttctctgccgatcgatgttcctttctcggggttgtaccgcggcatgaaagcacggaacctcatacatgcccgcattgagcagaatatccgggctaaaatctgtgggttgcgagcctccgaagctggccagggctgcaaagatgctctgcagctgctcattgagcactcctgggagcgaggcgaaagacttgatatgcaggcattgaagcagtcctctacagagcttctgttcggcggccacgaaacaaccgcctcggccgcgactagcctaattacttatttgggtctctacccacatgtgttgcaaaaggttcgggaggagctgaagagtaaaggcctcctgtgcaagagtaaccaggataataaactagatatggagattctggaacagttaaaatacatcggttgtgtaattaaggagacactgcgactgaacccccctgtcccaggtggctttcgagtggcccttaaaaccttcgaactcaacggttatcagatcccaaaggggtggaacgtgatctattccatctgcgatacgcacgacgttgccgaaatattcactaacaaggaagagtttaatccagacaggtttatgcttccacaccctgaagacgcttctcggttttcatttatccccttcggtggcggactgaggagttgtgtgggaaaggaattcgccaaaattttactgaaaatattcacagtggaactagctcgacattgtgactggcaactcttaaacgggccacctaccatgaagacgagtccaaccgtgtatcctgtggacaacctccccgctcgctttacacactttcacggtgagatttag

SEQ ID NO: 203170 - DNA, 600 bp, synthetic construct
  misc_feature 1..600: note = Description of Artificial Sequence: Synthetic coding sequence
  source 1..600: mol_type = other DNA
atgaactacagcaagatccccgcccaggtggacctgcggcggcagaccgaacgagactgccgtgtgtcttctttccgagtgaaagaaaacttcgacaaggcaagatttagcggcacctggtatgctatggccaaaaaggacccagaaggactgttccttcaggataatatcgtggccgaattttctgtcgatgagacgggacagatgagcgctaccgcgaagggtcgagtcagactccttaataactgggacgtgtgcgcagacatggtggggacctttactgataccgaagatccagcaaagtttaaaatgaaatattggggcgtggcatctttcttgcagaaagggaacgacgaccactggatcgtcgatactgattacgatacctacgcagtccagtacagctgtaggctactcaacctggatgggacttgcgccgatagctattccttcgtcttttcccgggatcccaatggcttaccacccgaggctcagaaaatcgtgcgccaacgccaggaggaactgtgtctggccaggcagtatcgcctgatcgttcacaatggatactgcgatgggaggagcgagcggaacctgctgtag

SEQ ID NO: 203171 - DNA, 606 bp, synthetic construct
  misc_feature 1..606: note = Description of Artificial Sequence: Synthetic coding sequence
  source 1..606: mol_type = other DNA
atgaagtgggtgtgggccctgctgctgctggccgccctgggcagcgggcgggctgagagggactgccgcgtgtcgagtttccgcgtgaaggagaatttcgataaagctagattctctgggacttggtacgctatggccaagaaggaccctgagggcctgttcctgcaggataacattgtggctgagttttctgtagacgagactggtcagatgtctgctaccgccaagggaagagtgcgcttactgaacaattgggacgtctgtgccgacatggtggggacctttactgataccgaggatcctgctaagtttaaaatgaagtactggggagttgcttcgtttctgcagaagggtaatgacgatcattggatcgtggacactgattacgacacatacgccgtgcagtacagttgtaggctcctgaatttggacggcacttgtgccgattcctattcgtttgtcttcagtagggaccccaacggtttgccaccagaggctcagaaaattgtgcgacagcgtcaggaagagctctgtctggctaggcagtacagattgatcgtccataatggatactgcgacggccggagtgagagaaacctgctgtag

SEQ ID NO: 203172 - DNA, 606 bp, synthetic construct
  misc_feature 1..606: note = Description of Artificial Sequence: Synthetic coding sequence
  source 1..606: mol_type = other DNA
atgaagtgggtgtgggccctgctgctgctggccgccctgggcagcggccgcgcggaacgggactgcagggtatcatcatttcgcgtgaaagaaaatttcgataaagcccgcttttcaggtacgtggtatgcaatggccaagaaggacccagaagggcttttcctccaggataatattgtcgccgaattctccgttgacgagactggacaaatgagcgcaaccgcgaaaggaagggtccgtctgctgaacaattgggatgtttgcgcagatatggttggcactttcactgatactgaagaccccgccaaattcaaaatgaagtactggggagtggcttcttttttgcagaaaggcaacgacgaccattggatagttgacactgactacgacacgtacgctgtacaatacagctgtaggctgctcaatttggacggaacttgcgcagattcttactcttttgtcttttccagagatcccaatggactgcctcccgaggcacaaaaaatcgtgcgccagcggcaagaagaattgtgcctggcacggcaatatcgactgatcgtccataacgggtactgtgatggtcggtcagagcgcaacctgctttag

SEQ ID NO: 203173 - DNA, 600 bp, synthetic construct
  misc_feature 1..600: note = Description of Artificial Sequence: Synthetic coding sequence
  source 1..600: mol_type = other DNA
atgaactacagcaagatccccgcccaggtggacctgcggcggcaggccgagagggattgcagagtatcttcgttcagggttaaagagaatttcgacaaggcaagatttagcggcacctggtatgctatggctaagaaagatccagagggactgttcttgcaagataatatagtcgctgagttttccgtggacgagacgggccagatgtccgccactgcaaaaggtagggtgcggcttctgaataattgggacgtctgtgcagatatggtgggaacatttactgatacggaggaccctgccaagttcaaaatgaaatattggggtgtggcatctttcttgcagaaaggtaatgatgaccattggatcgtggataccgattatgacacttatgctgttcagtactcatgtcgcctattgaacctggacgggacctgtgcagatagctatagcttcgttttttcacgggatccgaatggactgcccccagaggctcagaagatcgttcggcagcggcaggaagaactgtgcttggctagacaataccgccttatcgtccataatggttattgtgatggtaggagcgagcggaacctgctgtag

SEQ ID NO: 203174 - DNA, 408 bp, synthetic construct
  misc_feature 1..408: note = Description of Artificial Sequence: Synthetic coding sequence
  source 1..408: mol_type = other DNA
atgccccccaacctgaccggctactaccggttcgtgagccagaagaacatggaagattacctgcaggcacttaacatctcccttgccgtgaggaagatagctctgcttctgaagcctgataaggagatcgaacatcaaggtaatcacatgacagtgcggaccctcagcacctttaggaactacactgtccagtttgatgtaggagtggagttcgaggaagatttgcgatcagtagacgggcgcaaatgccaaactatagtgacatgggaagaagagcatctggtgtgtgtgcagaaaggggaagtgcctaatagaggatggcggcattggcttgaaggagaaatgctttatttggaactcactgcaagagatgcagtgtgtgagcaggtgttcaggaaagttcggtag

SEQ ID NO: 203175 - DNA, 1026 bp, synthetic construct
  misc_feature 1..1026: note = Description of Artificial Sequence: Synthetic coding sequence
  source 1..1026: mol_type = other DNA
atgaacatcgtggtggagttcttcgtggtgaccttcaaggtgctgtgggcctttgtgctcgcagctgcccgctggctcgtgcgccccaaggagaagagcgtcgcagggcaggtgtgcctgataacgggcgctggtagcggcctggggcggctgttcgccctggaatttgcccgcagacgagccctgctcgtgctctgggatataaatacacagagcaacgaggagacagctggaatggtgaggcacatttatcgagatctggaagccgccgatgcagcagccctgcaggctggcaatggcgaagaagagattctgcctcattgtaacctgcaagtctttacctacacatgcgatgtcggaaagcgggaaaacgtttacttgactgccgagcgcgtcagaaaggaagtgggagaagtgtcagtcctcgtaaacaacgcaggggtcgtgtccggtcaccacctgctggagtgtccagatgagttgatcgaacgtactatgatggtgaattgccacgcacatttctggacgacaaaagccttcctgccgaccatgttggaaataaatcacggtcatatcgttaccgtggctagtagtctcggactcttctctaccgcaggagttgaagactattgtgcttcgaagttcggggtagttggctttcacgagagcctgtctcatgagcttaaagctgcagaaaaagatggaatcaaaacaactcttgtgtgtccttacctcgttgataccggtatgttcaggggatgccggattcggaaagagattgaacctttcttacctccactgaagccggactactgtgtgaagcaagcaatgaaggccatcttaaccgatcaaccaatgatttgtaccccccgactaatgtacattgttacctttatgaaaagcatcctcccctttgaagcggtagtctgcatgtacaggttcctaggggccgacaagtgcatgtatcctttcatcgcccagcggaagcaggccacaaataacaacgaggcaaaaaatgggatatag

SEQ ID NO: 203176 - DNA, 957 bp, synthetic construct
  misc_feature 1..957: note = Description of Artificial Sequence: Synthetic coding sequence
  source 1..957: mol_type = other DNA
atggtggagctgatgttccccctgctgctgctgctgctgcccttcttgctgtacatggcagccccacagatccgcaagatgctgagctcaggggtctgcacgtctacagtccagctgcctggtaaggtcgtggtggtaactggcgccaatactggcataggcaaggaaaccgccaaagaacttgcccagaggggtgcgcgcgtttatctggcttgtagggacgtggagaagggcgaattggtggctaaggagatccagacgacaacgggcaaccagcaggtactcgtgcgtaaactcgacctaagcgatacaaagtctattcgcgccttcgccaagggttttctggctgaagagaagcatctgcacgtgctgatcaacaacgccggggttatgatgtgtccatacagcaagaccgccgatgggtttgaaatgcacattggggtgaaccacctggggcattttttgctgacccacttactgcttgaaaaacttaaggagtccgctcctagccggatagtcaacgtttcatctctagcacaccatcttggtagaatccacttccacaacctccaaggtgagaaattctataatgcaggcctggcctattgccattctaagctggctaacattctcttcacacaggagctggctaggaggttaaagggttccggggtgacgacttattctgtgcacccgggtaccgttcaatctgaactggtccggcatagcagttttatgcgttggatgtggtggctcttttcgttttttataaaaacaccgcagcagggagcgcaaacatccctgcactgcgcactgacagaagggctcgagattttaagcgggaatcacttcagtgactgtcatgtggcttgggtgtctgcacaggcccgcaacgagacaattgctagaaggctgtgggatgtctcatgtgacctcttggggctgcccattgactag

SEQ ID NO: 203177 - DNA, 918 bp, synthetic construct
  misc_feature 1..918: note = Description of Artificial Sequence: Synthetic coding sequence
  source 1..918: mol_type = other DNA
atggtggagctgatgttccccctgctgctgctgctgctgcccttcctcctgtatatggcagcgccacagataaggaaaatgctatccagtggagtgtgcaccagcaccgtgcagctacctgggaaggtcgtcgtggtcacgggcgcaaatacaggcgcccgcgtatacttggcatgcagagatgttgagaagggcgagttagtcgcaaaggaaattcagaccacgaccggtaaccagcaagtcctggtcaggaagcttgatctgtctgacactaagtccatccgcgcattcgcaaagggatttctagcggaagaaaaacatttacatgtgctcatcaataatgctggggtcatgatgtgtccttattccaagacagccgacggcttcgagatgcacataggcgtcaaccacttaggccattttttgttgactcacctactcctcgaaaagcttaaggagtctgctccatccagaatcgtgaacgtctccagcctggcccatcatttaggccgtattcattttcataaccttcaaggagagaaattctataacgccgggctggcctactgtcactccaagctggcaaatatcctgttcactcaggagcttgcccgaaggctgaaagggtctggggtaacaacatactccgtgcaccctgggacagtgcagtcggagctggtccggcactcctctttcatgaggtggatgtggtggttgtttagcttctttattaagactccacagcagggtgcacaaaccagcctacactgcgctctgactgagggactagagattctcagtggtaatcattttagcgattgccatgtggcctgggtctccgcccaggcccgtaatgagaccatcgcgagacgactgtgggacgtgagttgtgacttgctggggctgcctatcgattag

SEQ ID NO: 203178 - DNA, 951 bp, synthetic construct
  misc_feature 1..951: note = Description of Artificial Sequence: Synthetic coding sequence
  source 1..951: mol_type = other DNA
atgctggtgaccctgggcctgctgaccagcttcttcagcttcctgtacatggtggcccccagcatacggaaattcttcgccgggggggtctgccggactaacgttcaacttcctgggaaggtcgtggtgattaccggcgcaaacaccggaatcggaaaagagacagcacgggagttagctagccgcggcgccagagtatatatagcgtgcagagatgtgttgaaaggggaaagcgccgcctctgaaatccgggtggacaccaaaaatagccaggtactagtcagaaagctagacctgtccgataccaagagtatccgggcattcgccgagggattcctggctgaggaaaagcagttgcatattttgattaacaacgctggggtgatgatgtgtccttacagcaagaccgctgatggtttcgagacacacttaggagtaaaccatcttgggcactttctactgacgtatctgctcttggagcgcctgaaagtctcggcaccggcaagagtggttaatgtgagcagtgttgctcaccacatcgggaaaatacccttccatgatcttcaatcggagaaaaggtacagcagggggtttgcatattgtcactcaaagctagccaatgtactttttactcgggaactggctaaacggcttcagggaactggcgtcaccacgtatgccgtacatcctggcgtggtccggtcggaacttgtacggcactcatctcttctctgtctattgtggcgcttgttttcgcccttcgtcaagacagcccgcgagggcgcacagacttctcttcattgcgccctcgcagaaggcctggagcctctgagcggcaagtatttcagtgactgtaagagaacatgggtttctcccagggccagaaacaataaaactgcagagcggctgtggaacgtatcttgcgaactacttggaatacggtgggaatag

SEQ ID NO: 203179 - DNA, 951 bp, synthetic construct
  misc_feature 1..951: note = Description of Artificial Sequence: Synthetic coding sequence
  source 1..951: mol_type = other DNA
atgctggtgaccctgggcctgctgaccagcttcttcagcttcctgtacatggttgctccctccatacgaaagttttttgcgggaggtgtgtgccgcactaatgtgcaactaccaggcaaggtggtggtgatcacaggcgccaatactggcatcgggaaagaaactgctagagaactggctagccggggggctcgtgtctacattgcctgtcgtgatgtcctcaagggggagagcgcagcctctgagatacgggttgacaccaaaaacagccaggttctggtgcggaaactcgatctgtcagacacaaagagcattcgcgctttcgcggagggctttcttgctgaagagaagcagctccacatcctcattaataacgcaggtgttatgatgtgtccttactctaagacggcagacggttttgagacacacctgggcgtgaatcaccttgggcatttccttctgacttacctcctgctggagcggttaaaggtcagcgctcccgctcgggtggtcaacgtctcatctgtcgcccatcatatcgggaaaattcccttccacgatctccagagtgagaaacgttacagtcgcggcttcgcctactgtcattctaagcttgccaacgtactgttcacccgagagttggcaaagagactacagggtacaggtgtgaccacgtacgcagtccatcctggtgtggtgcggagtgagctggtgagacactcatctctactgtgcctgctgtggagactgttctctccttttgttaagaccgctcgagagggcgcccagacgtccctgcactgtgctctcgcggaggggctggagcctctatccggaaagtatttttctgactgcaagcggacctgggtgagtcctcgcgcccggaataacaagacagcggagcgattatggaacgtgagttgtgagctgttaggcatccgatgggagtag

SEQ ID NO: 203180 - DNA, 951 bp, synthetic construct
  misc_feature 1..951: note = Description of Artificial Sequence: Synthetic coding sequence
  source 1..951: mol_type = other DNA
atgctggtgaccctgggcctgctgaccagcttcttcagcttcctgtatatggtcgctccctccattcgcaagttcttcgccggcggcgtctgccggacaaatgtccagctgccaggcaaggtggtggtcatcacaggagccaatactggcatcggcaaggagacagcgagggaattggcctcacgcggcgctcgggtctacatcgcatgccgtgatgtgctcaaaggtgaatccgcagcatccgaaatcagagtggacacgaaaaacagccaagtactggtacggaagttggacctgtccgataccaagtccattcgggccttcgcagaggggttccttgctgaggagaagcagctccacatactgattaataatgccggcgtcatgatgtgtccatattcaaaaacggccgatggtttcgagacccatctcggtgtgaatcacctgggccacttcctactgacctatctgctcctcgagaggttaaaggtgtccgcaccagctcgcgttgtcaacgtcagcagtgtggcccatcacattgggaagatcccattccacgacttgcagtctgaaaaacgatattcaagagggtttgcctactgccacagtaagctggcgaacgttttgtttaccagagaactggctaagaggctgcagggaactggagtcacgacatacgccgtccaccccggtgtggtgcgctctgagctggtgcggcattcttccctcctttgcctgctgtggcggctgttttccccttttgtgaagacagcccgagaaggggcccagacctctctgcattgtgcactggccgaagggctggaaccactcagcggcaagtactttagcgattgcaagaggacatgggtgagcccacgtgcacgcaacaacaagaccgcagaaaggttgtggaacgtgtcttgcgagttgctcgggatcaggtgggagtag

SEQ ID NO: 203181 - DNA, 957 bp, synthetic construct
  misc_feature 1..957: note = Description of Artificial Sequence: Synthetic coding sequence
  source 1..957: mol_type = other DNA
atgtggctgcccctgctgctgggcgccctgctgtgggccgtgctgtggctgttacgagacaggcagagcctccctgcgagtaacgcctttgtctttatcacgggatgcgattctgggtttggtagattactggcactgcaactagaccaaagggggttccgagtcctagcttcatgtcttacaccaagcggtgctgaggatctgcaaagagtggcgagctcgcgactccataccacgctgttggatatcaccgacccacaaagcgtgcaacaggcagctaaatgggtggagatgcacgtcaaggaagcagggcttttcggcctggtaaataatgcaggggtcgccgggattataggtcccactccctggctcacccgggatgactttcaacgggttttgaatgtaaacaccatgggtcctattggcgtcaccttggccctgctccctctgttgcagcaagcccgggggagggtaatcaatatcaccagcgttttgggccggctggcagcaaacggcggcgggtactgtgtatccaaatttgggctagaggccttcagcgactctctgcggcgggatgttgcccatttcggcattagagtcagcatcgtggagcccggcttctttcgaacccccgttacaaatttggagtccctcgagaaaaccctgcaggcttgctgggctaggctgccccctgcaacacaagcccactatggcggcgcatttctgaccaaataccttaagatgcaacaaagaattatgaatctgatctgtgaccccgacttgaccaaagtttcaagatgcttagagcacgccttgactgctagacatccacggactagatatagtcctgggtgggatgcaaagctgctgtggctgccagcttcctacttaccggcctcattggtggatgccgtgcttacgtgggtgctgcctaagcccgcacaggccgtgtactag

SEQ ID NO: 203182 - DNA, 957 bp, synthetic construct
  misc_feature 1..957: note = Description of Artificial Sequence: Synthetic coding sequence
  source 1..957: mol_type = other DNA
atgtggctgcccctgctgctgggcgccctgctgtgggccgtgctgtggttacttagagataggcagagcttacccgcctcaaacgcatttgtgtttatcaccggctgtgattcaggcttcggcagattgctcgcactgcagttggatcaacgcggcttccgagttttagctagctgtttaacaccctctggggctgaggacctgcaaagggtggcatcttctaggctgcacacaacactactggatattacagaccctcagtcagtacagcaggcagctaagtgggtggagatgcacgtgaaagaggctggtctctttggactagtgaataatgccggagtggctggcatcattggccccactccatggctgaccagggacgacttccagagagtgctcaatgtaaacacgatggggcccattggagtgaccctggctttgctgcccctgctccagcaggcacgcggcagggttatcaatatcaccagcgttcttgggagattggcagcaaacggcggtgggtattgcgtgtcaaagttcggtctcgaagcgtttagcgactctctccgcagagacgtggcgcacttcgggatcagggtttctatagtcgaaccgggcttctttcgaacccctgttaccaaccttgagagtctggaaaagacactgcaggcgtgttgggctaggctgccacccgctacacaggcccattacggtggcgccttcttaacaaagtatctgaagatgcagcagagaattatgaacctcatttgtgatccagatctgacaaaggtctcacggtgtttggagcacgccctgacggcccgacatcccaggaccaggtattctccgggatgggatgctaagttactgtggctgcctgcatcttacttgcccgcgagcctggttgacgcagttctgacctgggtgctaccaaagcccgcccaggccgtctactag

SEQ ID NO: 203183 - DNA, 936 bp, synthetic construct
  misc_feature 1..936: note = Description of Artificial Sequence: Synthetic coding sequence
  source 1..936: mol_type = other DNA
atggccgccgccccccggaccgtgctgatcagcggctgcagcagcggtattggattggaactggcggtgcagctggcccatgaccccaagaagcgctatcaggtagttgcaaccatgcgtgatctaggcaagaaagagacactagaagcggctgccggagaggcacttggccagacacttaccgtagcccagctggacgtgtgctctgacgagtcagtggcacagtgcctgtcctgcattcaaggggaagtagacgtcctggtaaataatgccggcatgggattagtaggccccctggagggactgtctttggcagcaatgcaaaacgttttcgacacaaatttttttggcgcagtgagactggtaaaggctgtgctccccggtatgaagaggaggcgtcagggccacatcgttgtaatctcaagcgtgatgggactgcagggtgtcatctttaatgacgtgtatgctgccagtaaattcgctttggaaggattttttgaaagcttggcgattcagctattgcagtttaacattttcatcagcctggtcgaacccggaccagtggtgaccgaattcgagggcaaactgttggcccaggtgtctatggccgagttccctggcaccgatcctgaaaccctgcattacttccgcgatctatacctgcccgcttcccggaagctgttttgtagtgttgggcagaatccacaggacgtggtgcaagcaattgtgaatgtcatttcgagtacccggccccccttaagaagacagaccaatattcgttatagccccctgacaaccttgaagacagtcgacagttcaggctccctttatgtgcgcaccacccaccggctcctctttaggtgccctaggcttctcaatctgggattgcagtgcttgagttgcggatgtcttcctacacgtgtgaggcccagatag

SEQ ID NO: 203184 - DNA, 675 bp, synthetic construct
  misc_feature 1..675: note = Description of Artificial Sequence: Synthetic coding sequence
  source 1..675: mol_type = other DNA
atgagccggaagatcgagggcttcctgctgctgctgctgttcggctatgaagcaacccttggtctttcaagcacagaggatgaaggggaagatccatggtaccagaaagcgtgcaaatgtgattgtcaaggcggtcctaatgctctgtggagcgcgggggcgaccagcttggattgcatccctgagtgcccttatcacaaaccgttgggctttgaaagcggtgaagtgacgcccgatcagattacttgttccaatccagaacaatatgtaggttggtattcctcttggactgccaacaaagcacgccttaatagccaggggtttggctgcgcttggctttctaaatttcaggatagtagtcagtggctccagatcgatctcaaagaaattaaagtgattagtggtatattgactcagggaagatgcgatatcgacgagtggatgaccaagtactcagtgcagtaccgaaccgatgagcgtctgaattggatatactataaagaccaaacaggcaacaatcgcgtcttttatggcaatagcgacagaacttctaccgtgcagaacctgctgcgtccgccaattatatcacgctttatcagactaatacccctggggtggcacgtcagaattgccattcgcatggagttgttggaatgtgtcagtaaatgcgcttag

SEQ ID NO: 203185 - DNA, 4077 bp, synthetic construct
  misc_feature 1..4077: note = Description of Artificial Sequence: Synthetic coding sequence
  source 1..4077: mol_type = other DNA
atgatcgagcccagcgaggacagcttcgagaccatgatggagcacaagaacccatcctccaagcagatggagtccagtgaaggaagttctaacactacagaggcaaccagcggcagcggggttagaggcgaagccggccccgcgtccggccccgcccaggaaaaaaaggaaccacctagcggtcccctccaggaaatggaagaacttcctacggacttactgcaagacatggaggagccatcaagtgggccccggaaggagattgaggaccctcctaacgacctgcttcaggacctcgaagagtcctgcaatggctctcatcaagcgaggggggacccactttccggcgcctcagaccgtatgaaagaagcatcagttaatccgagcggagcaagagaggagcaggaggcacacaccgacctgaaggagtccgggcgcgaggagacaccccaagagcagaaccagacagagcactctactgcagaacttatggcaatggtcagatcaattatttccttgtattttcgaatgcaggatctcaaagaacagcagcgcgtggctgaagaaattctgatcaagggcattaacgctggccagttgcctgcgccaaaacatttttctggggatcgaagggaatttcacgagttcatcgtgctgtgtcagctgacacttcagtcttatcctcggatgttttacaacgaccgtctccgggtagggtatgttattaaccatctgtccggcttagcccttgagtgggctaaagccctcctgcaagagaattccccgctgatcggcgatttccccgctttcttagaggctatgtctgaagtttttgagtacaggcaagctctgcgggtcgccgaggaagcaatgttcacgatccgacaggggggccggtccgccacggagtatatcgatgaattccaaagcttggtgcctatcttaggttggcctgacgaggtgctgcaggcccatttgtgccagggattgaacgaggaaattcggcattatctgttccgagttccacagcccgactcccttgatagtctgattgtgctgattctgcagatcgaagaaaaactggccgagaggcgggccatgctacggctacctcccgaagctcgaccgcgaaacctaacatggattgactcccctgcgcctgaacgctggatggtgagctcatggctccctagtgaggtgcatcctgatataaatcgggcgcacctctttctgcttcttatggtaagagttaacccgtatcacagcgttgccgtgcaggccctggtggattctggagctgatggcaatttcatggatgaaaaattcgcgcaggagcactatgtagagctctatgaaaagccgtatccgcagcccgtccagagcgtggacggatcattgattgggaatgaacccgtatggctatacaccgaaccacttgtctgcatccatcagaaccatcaggagtccatcgagtttgatatcgtgcctagcccaaacttcagtgtcgtgctgggcataagatggttgagagtgcacgctccagaggtcgattggatcaagggtcgctgtacgtttcacagcccatattgcctgaagaactgcttccgcccacccccaccttgtatcgctctggagcgccacggtatgtctctactgcccgggttgccacacccttactctgacctcgcagacgttttcaaccccaaggaggccgatgacgagacatccgatcagccctccagcgatggctccgacgatctctccgagtccgaaccctcggagctgcagcaggctggagactccgaccattctgagaccttctacgagtgcccaagtactgccccttgggagccggtcggcgcccggatgcaggagcgcgccagactgcaagaggaatactgggatctgcaagacatgctgacgaataggcaagattatattcagatgatccccgagctgtttgaccagctgcacggagccgagtggtttaccaagctggaactccgtgggacaatcgttgaagaatccgtgaatggccacaggacggaggatgtgtggaaggcagcctttggactagaactcgaagaaatgaagagttaccagcccttcgccctgtctccggatcctattatacctcagaatgttattcattttatactgaaagatatgttaggattcttcgttctaagctacggacaggaggtccttatttacagcatgagtcaggaggagcacctccatcacgtgagacaagtactggtcaggttccggcatcataatgtctattgttctctggacaaaagtcagttccaccggcagaccgtggagtttcttggctttgttgttacacccaagggcgttaagctgaataagaatgtaatgactataattacaggataccctacccctgggtctaaactgtccctgagaaattttattgagttcgttttcccttaccgacatttcgtggagcgctttagcattatagcagagccacttgtgaggcaactgctgtccagttaccagttctactggggcgtggaagaacaggaggcttttgaatgcctaaagcgggcgtttcgcaaagcccctcttctgcatcaccccaaaccacaaaatccattctacttggaaacaggcgtgacaggcacagccctgcacgcaagtctcatccagatcgatgaccagactggaaaaagagcttgttgtgctttttactctcggaatatctctcctattgaagttgagtatagccaagccgagatgaaaatcttacctatccgggctgcttttatggtgtggtgcaggtatctcgagaatacagaggaacccataatgattctgttgaatacggaggaccttgcaagcttaaataacgatcggctgaccgttctgctacctggccattgggtattcttcttcagccatttcaatttcgatgtgatggagctgccagagcaggatggtggtagggccctgccacccgttcggaatttgcggtggaggagagcgttccagaggaacacagctgctaggcagacacttttgttagcatcacggggattcccccgggatccttccaccgaatccggagaggaggagaatgaggagcaagatgagctaaatgagcagatcctgagacaggaactgttagccatgatccctatcgatcagatcctcaatagcttcttggctcacttctcaatggcgcagatccgggcagtgatcttgcacttctttcgcggactgctgtattggaaaaatacactggcactcgcagccatcttggtactgctgcgcgtccggcagtgtctgtctttacgtcccgcccctgcaatgcgtgtggctcggccacaaccccaaagatctctccggctgattctggactcttctcttattgccggatcatccattactaccgccatcacccagctgctgacacagatgccggccctggttggcgcaaacaccatccccgcacaggaacttgctgagctattcctggggccgggacgctggcagaggaatgccctgcattcccaagcccaccggggcttgcagttcacacccgggttttggcttactctgtgcgagtttttcggagtccgggtaacccctcaggaaggacaccttccagcgttgcgtcaaaatagatatctcgaactgcacgtggtcggggatgaagatgttgtgctccgggaggcgttgcaggacgatctccagaggtatagacagtgcgggcttcatgacggactgcaggatacatcgcaggacaagcaggataacgatgtacaggaagcacctccttcccatacagcagcgacccatcccccgcggcctagacacctgatggatccccaagtcttggaattcctgggaagtcggttgctgcatattcacagcgcggacgggcagctgcacctgcttagcagggagcaagccgcccgggcactctcccagttccttaccctcatataccgacgcgcgttacctatcccagcctgggaaagtcagcctagggaacaggcgagattggaggagttgccagatgaagacgaagatgccaatctagattag

SEQ ID NO: 203186 - DNA, 9393 bp, synthetic construct
  misc_feature 1..9393: note = Description of Artificial Sequence: Synthetic coding sequence
  source 1..9393: mol_type = other DNA
atgttcagcgtgcggatcgtgaccgccgactactacatggccagcccattacagggtctggatacctgtcagagccccctcacccaggcccccgtgaaaaaggtgcccgtggtgagagtattcggggccacccctgccgggcagaagacatgtttacacctgcacggtatcttcccttatctgtacgtcccatacgatggatatggtcagcagccggaatcttacctctcgcaaatggccttcagcatcgacagggccttgaatgttgctctcgggaacccatcatctaccgctcagcacgtgtttaaagtgtcactagtgagcggcatgcccttctatggttaccacgagaaggaacgccattttatgaagatatatctgtataatcccaccatggtgaagcgcatatgtgaactgctacagagtggggctatcatgaataagttctatcagcctcatgaggctcacatcccctatctgctgcaactttttatcgactataacctttatgggatgaacctgatcaacctcgccgccgtaaaattccggaaggccaggcgcaagagtaatactctgcatgctacaggatcttgtaagaatcatctgtctggtaatagtctggctgatacattgtttcgctgggagcaagacgaaataccctccagcctcatcctggaaggggtggagccgcaatcaacgtgcgaactggaagtggatgccgtagcggctgacatcttgaaccgcctggatatcgaggcccagattggaggcaaccctggactgcaggcaatttgggaggacgagaagcaacgtaggagaaacaggaatgagacctcccaaatgagtcagccagagagtcaggaccaccggttcgtgcctgctactgagagtgagaagaaatttcagaagcgactccaggagattttaaagcagaatgatttctctgtgaccctgagcggatccgtcgactattctgacggttcacaggagtttagtgccgaactcaccctacatagcgaagttctgtctccagagatgttacagtgcacaccagccaatatggtggaggtccacaaggacaaagaatcatcaaagggccatacacggcataaggtggaggaggccctgatcaacgaagaggccatcctcaatttgatggaaaatagccagactttccagccgctcacgcagcggttatcagaatccccagtgtttatggactcaagccctgacgaagctctggtgcacctacttgccggcctggagtcagatgggtatcgcggggagcggaatagaatgccatcaccatgtcgtagttttggcaataacaagtatccacagaattccgacgacgaggagaacgagccacagatcgagaaggaggagatggaactctcccttgtgatgagtcagcgatgggactctaatatcgaggaacattgcgcgaaaaaaagatccctgtgccgcaacacacatcggtcctcgaccgaggatgatgattcaagctcgggcgaagagatggagtggtccgataactccttactcctggctagcctgtcaatcccgcaacttgatggcactgccgacgagaattccgataatcctctgaataacgaaaacagtaggacccacagttctgtgatagccacaagcaaactcagcgtgaaacctagcatctttcacaaggatgctgctactctcgagccctccagttcagccaagattacattccagtgcaagcacacgagcgctttaagtagtcacgttctcaataaagaagatttgatcgaagacctcagtcagactaacaagaacacagagaagggcctggacaattcggtcacctcgttcaccaatgaatccacctattctatgaaatatcctggctccctctcctctaccgtgcattccgagaattctcataaggagaattcaaaaaaagagatacttcctgtctcatcttgcgagtcttcgatcttcgactatgaggaagatataccctcagtcacccggcaggttccgagtagaaagtacaccaacattcggaagattgagaaggactctcctttcatccacatgcacagacaccctaacgagaataccctgggaaagaactcctttaatttctctgatctgaaccacagtaaaaataaagtgagctctgagggaaacgaaaaggggaattcgactgcactgagcagtctgtttccaagcagctttacagagaactgtgagctgctgagctgctccggtgagaacaggaccatggttcacagccttaactcgactgccgacgagagcggtttgaacaagttgaaaatccggtacgaagagtttcaagaacacaagaccgagaaaccgtccttatcgcagcaggccgctcactacatgttctttccttccgtggttctctcaaattgcttgacaagaccccagaaactgtccccagtgacttacaagctgcaacccggtaacaaacctagccgcctgaagctgaataagcgcaagctagctggccaccaggagactagtacgaagagctcagaaaccggcagcacaaaggacaatttcattcagaacaatccttgtaattctaatcccgaaaaggataacgccctggcctccgacttgacgaagacaacgcgtggagccttcgaaaacaagacccccaccgatggctttattgattgtcatttcggcgacggcactctagagactgagcagtcttttgggctttacggtaacaagtatacacttcgggccaagcggaaagttaattacgagaccgaggatagcgagtcgagctttgtcacacacaattcaaagatctcactgccccaccctatggaaattggtgagtccctcgacgggaccctcaaatcaaggaaacgcagaaagatgtcgaaaaaacttcccccggtgataatcaagtacatcattattaacagattccgcgggcgtaagaatatgctggtaaaattgggcaagatagatagcaaggaaaaacaggtcattctcactgaagagaaaatggaactatacaagaagctcgccccgctgaaagacttctggcccaaggtgcccgactcacctgccacgaaataccctatttaccccttaacccctaaaaaatcacacagacggaaaagcaaacataagtctgcgaaaaaaaaaacagggaaacagcagagaacaaataatgagaatattaaaagaaccttaagctttaggaagaaacggagtcatgcaatactctcacctccttcgcccagctacaatgcagagaccgaggactgtgatctgaattacagcgatgtgatgtccaagctcggcttcctttccgaaagaagtacttcccctattaatagtagcccacctcgctgttggagccccactgacccacgcgccgaagaaattatggccgctgccgaaaaggaagccatgctcttcaaggggcccaatgtgtacaaaaaaactgtgaatagccggattgggaagacctccagggctagagcacaaatcaaaaagtcaaaggctaaactggccaacccttccattgtgacaaagaaacgaaataaacggaatcaaactaacaagctagtcgacgatggcaagaagaaaccgcgggctaagcagaaaacaaacgagaagggcactagcaggaagcatactactcttaaagatgaaaaaattaagagtcagagtggagctgaagtcaagttcgtcctgaagcatcagaacgtgtctgaatttgcctctagcagcggcggcagccaattgctttttaagcagaaagatatgcctctaatgggctccgccgtggatcacccgctgagtgcctctcttccaacaggcattaacgctcagcagaaattaagtggatgttttagctctttcctggagtcgaagaaaagcgtggatctacagaccttccccagttcacgggacgacctacatccgtctgtggtgtgcaactccattggccctggagtctctaagatcaatgtacagaggcctcataatcagtctgccatgttcaccctgaaggaaagcaccttaatccagaagaacatttttgacctcagcaatcacttaagccaggtcgcccaaaatacacagatctccagcggaatgtcctcaaaaatagaagataatgccaacaatattcagcggaactacctgtcctcaatcggaaagctgagtgagtaccggaatagtcttgagtctaagctcgaccaagcgtatacccccaactttttgcactgcaaagacagtcagcagcaaatcgtttgcatagctgaacagagtaaacacagcgagacctgttctccggggaacactgcctctgaggagagtcagatgccaaacaattgcttcgtcaccagcctgagatccccaatcaagcagattgcttgggagcagaagcaaagagggttcattctcgacatgtctaatttcaaacctgagcgagttaagcccaggtcactgtcagaagctataagtcagaccaaagccctctcacagtgtaaaaataggaacgtgagcacccccagcgcgttcggcgaaggacaaagtggtttggctgtgctgaaggagttgctccaaaaaagacagcagaaggcgcagaacgccaacacaacacaggaccccctaagtaacaaacatcagcccaataaaaatattagtggttctctggagcataacaaggcgaacaagaggacgagatcggttacctcgcctaggaaaccacgaacaccacgttccacgaagcagaaagagaaaatccccaagctgctgaaggtggactctctcaatcttcaaaattcttcccagctggacaacagtgtctccgacgactcacccatttttttttcggatcctgggttcgaatcctgttattcactcgaggattcgctgtcaccagaacataactacaactttgacataaatacaataggtcagacaggtttttgtagcttctacagcggatctcagtttgttcctgctgaccagaatctgccccagaaatttctctctgacgccgtacaggatctgttccctggacaggcgattgagaaaaatgagttcttgtcgcatgataaccagaaatgcgacgaggacaagcatcacacaaccgacagtgcctcttggataaggagtggcactctgtccccagaaatcttcgaaaagagcaccatcgattccaacgaaaaccgtagacataatcagtggaaaaattcttttcatccactgactacgcggagcaacagcataatggacagtttttgtgtgcagcaggctgaagactgtctaagcgagaagtctagactgaaccgttcatccgtctctaaggaagtgttcctgtcactgccccagcccaacaactctgattggatccagggtcacactcggaaggagatggggcagagccttgacagtgcgaacacttctttcactgctatcctttcctctcccgacggcgagctcgtggatgtcgcatgcgaggatttggagctatacgtgtccaggaacaatgacatgctgacccccacgcccgatagctctcctcgcagtacttcgagtcccagccaatccaaaaatgggagttttaccccccgcaccgccaatatcctgaaacctctgatgtcccctccctcccgagaggagattatggcaactctacttgaccacgatttatccgagaccatctaccaggaacccttctgcagtaatccctccgatgtgcccgaaaagccaagagaaattggagggcgccttcttatggtggagactaggcttgctaacgacctcgctgagtttgaaggagacttctctttggagggcctccggctgtggaagacagccttcagtgccatgacacaaaacccacgacctgggtcgccactgaggtctggacagggcgttgtcaataaaggctcctcaaactcccctaagatggtcgaagacaagaaaattgttattatgccttgcaagtgtgcaccctcaagacagctggtacaggtgtggctgcaggctaaagaagagtatgagcggagcaagaagctgcctaagaccaagcctactggagtcgtcaagagtgcagaaaacttcagtagttccgtcaaccccgatgataaacccgtagtgccacccaagatggacgtgtccccgtgcatcctgcctactacagcacataccaaggaggatgttgacaattcccagattgccttgcaagcccccactacagggtgctcacagacagcctcagaaagccaaatgttgccccccgtggctagcgcgtctgacccggagaaagacgaggatgatgatgataactactatatttcctacagctcccccgacagcccagtgattcccccttggcaacagccaataagccctgactcgaaggcattgaatggcgatgaccggccctctagtcctgtggaagagctcccctccctggcattcgagaatttcctgaaaccgattaaagatgggatccagaagtcaccttgcagcgagccacaggagcctctggtgatctcccctattaatacccgggcccgcaccggcaagtgtgagtccttatgcttccacagtacccccatcattcagagaaaacttctcgaacgcctacctgaagcccctggtctgagcccgctgtctaccgaacccaagacgcagaagcttagcaataaaaagggcagcaacaccgacacactgcgaagggtgctgctgacccaagcaaagaaccaattcgccgctgtgaatactccccagaaggagacttctcagatcgatgggccaagcctgaacaatacatatggctttaaggtgtccatacagaacctgcaagaggccaaagccctgcacgagatccagaacctcactttgatttccgtggaacttcacgctcggacgcgccgggacctggagccggaccctgagtttgatccgatatgtgctctgttttattgcatttcatctgacacccctctcccagatacagaaaagaccgaacttacgggagtgatcgtcattgacaaggataaaacagtgttttctcaggacatccggtatcagacccctttgctaattaggtcaggcattacggggctcgaggtgacgtacgcagctgatgagaaggccctgttccacgagattgccaatattataaagaggtacgaccccgacatcctgttagggtatgagatccagatgcattcctggggatacctcttgcagagggcggctgctctgagcatcgacctgtgccggatgatatcacgtgtaccagacgacaagattgagaatagattcgccgctgagagagatgaatacgggtcatatacgatgtcagagataaacatcgtcggtcgcattacactgaatctgtggcgcatcatgcgtaacgaggtggccctcacgaattatacgttcgagaatgtgtcttttcatgtactccatcagcgtttccctctgtttacttttcgcgtcctctcagattggttcgacaataaaacggacctgtaccggtggaaaatggtagatcattacgtttcgagggtgaggggaaacttgcaaatgctcgaacagttggatctgataggaaagactagcgaaatggcccgcttgtttgggatccagtttctccatgtcctgactaggggcagccagtatcgagtggaatccatgatgttaagaatcgctaagcccatgaactacatccctgttacacctagcgtgcagcagcgctctcagatgcgagctcctcagtgtgtccctttaattatggagcccgagtccaggttttactcaaactcagtcttagtgcttgacttccagtctttatatccttcaatagtaatcgcttataactattgctttagtacgtgtcttggccacgtcgagaatctgggcaagtatgacgaatttaaattcgggtgcacctcactccgggtgccccccgacctgttgtatcaggttaggcatgacattacagtgtctcccaacggggttgcatttgtgaaaccttctgtcaggaagggcgttcttccaagaatgctggaggagatcttgaagacacgctttatggtaaaacaaagcatgaaggcttacaagcaagacagggccttatcgcgaatgctggatgctaggcagcttggtctcaaacttatcgcaaacgtgacttttgggtatacctccgccaacttctcaggccggatgccatgcatcgaagtaggtgacagcattgtgcacaaggcgagggaaactctggagcgcgccattaagctagtcaatgacactaagaaatggggcgctagggtggtttatggagacactgattcaatgtttgtgctgctgaaaggggccaccaaagaacagtctttcaagatcggccaggaaatcgctgaagcggtgacagccaccaaccccaagccagtaaagctcaaatttgagaaagtctatctgccctgtgtgctccagactaaaaagagatatgtcggatatatgtatgaaacgttggatcagaaggacccggttttcgacgctaaggggatcgaaactgtcagacgcgacagttgccctgctgtgtccaaaatccttgagagatccctcaaacttctcttcgagaccagggatatcagcctgatcaagcagtacgtccagcggcagtgcatgaaactcctcgagggaaaggcttctatacaggacttcattttcgctaaagagtataggggatcgttctcttacaaacccggtgcttgcgttccagccctcgagttgactaggaaaatgctgacctatgaccggcgatccgagccacaagtgggcgaaagggtgccttacgtcatcatctacggcaccccaggcgtgccactgatccagctcgtccgacgccctgtggaggtacttcaggaccctacactccgattaaacgctacttactacataacgaaacagatcctgccacccctggccaggatattttcattgatcggcatcgatgttttctcttggtaccacgaactcccacgcatccacaaagccactagtagttcaagatccgagcctgaaggcaggaaaggaacaatttcccagtacttcactacgttacattgtcccgtgtgtgacgatcttacccaacatggcatttgcagcaagtgcagatctcaaccccagcacgtggcggtaatacttaatcaggaaatccgagaactggagagacagcaagagcagctggtgaagatatgcaaaaactgtactgggtgctttgatcgccacatcccgtgcgtgagtctgaattgtccggtgttgttcaaactttcccgggtgaatcgggaactaagcaaggcaccctacctgcggcaactgcttgaccagttctag

SEQ ID NO: 203187 - DNA, 9393 bp, synthetic construct
  misc_feature 1..9393: note = Description of Artificial Sequence: Synthetic coding sequence
  source 1..9393: mol_type = other DNA
atgttcagcgtgcggatcgtgaccgccgactactacatggccagccctctacagggacttgacacgtgccaaagccccctgactcaggcgccagtgaaaaaagtaccagtggtgagagtgtttggcgctactccggcaggtcagaaaacctgcctgcatctccatggcatcttcccctacttgtatgtcccatacgacggatatggccagcagccagagtcctacctgagtcagatggctttttccatcgacagggcccttaacgttgctctcggaaaccccagctcaaccgcccaacatgtgttcaaagttagcttggtgagtggcatgccattctacggctatcacgaaaaagagcgccattttatgaaaatctacctctacaacccaacgatggtgaagaggatctgtgagctcctgcagagcggggcaattatgaataagttttatcaaccacacgaagcccacataccttatctgctgcagttgtttatcgactacaatttgtatggcatgaacctcatcaacctagccgccgtgaagttccggaaagcacgtaggaagtcaaatacactgcatgccaccggctcttgtaagaatcatcttagtggcaactctctggccgacactttattccgatgggaacaggatgagatacctagttcattaattctggaaggagttgaaccccaatcaacctgcgaacttgaggtggacgcagtcgctgcagatatactcaatcgcttggacatagaggcccagattggcggtaaccccgggttgcaagcaatttgggaggatgaaaaacagcgccgacgaaatcggaacgagacctcccagatgagtcagcccgaaagccaagaccatcggtttgtaccagcaaccgagagtgagaaaaaattccaaaagcggcttcaggagatcctgaagcaaaacgacttcagtgtgaccctgtcaggttcagttgactattcagacggctctcaggagttttctgcagagctgacactgcattccgaagttctgagccccgaaatgttacaatgcacccctgccaatatggtcgaggtgcacaaggacaaggaaagcagcaaaggccatactcgccacaaggtggaggaggccctgatcaacgaagaggccattctcaacctcatggagaacagccaaacattccagcccctgacccagcggttgtccgagagtcctgtcttcatggatagttcacccgatgaagccctcgttcacttgctggctgggctcgaatctgatggctacagaggggaaagaaataggatgcctagtccttgtagatcattcggcaacaacaaatatccgcagaattctgatgatgaggaaaacgaacctcagatagagaaggaggaaatggagctgtcactggtgatgtcccagcgttgggatagcaatatagaagagcactgcgccaaaaagcgcagcctgtgccgaaacacgcacaggagttccaccgaggacgacgattcttcctccggcgaagaaatggagtggtccgataacagcttgcttctcgcttcccttagcattcctcagcttgatgggactgcggatgaaaactctgataatccactaaacaatgaaaactcgcggacccacagtagtgtcatcgccactagtaagttatccgttaaaccctccatttttcataaagatgcagcaaccttggaaccttctagcagcgcaaaaatcaccttccagtgtaagcatacatccgccctaagtagccacgtcctcaataaggaagacctgattgaagacttgtcgcaaaccaataagaacacagaaaaggggctcgataattcggtcaccagttttaccaacgagtctacgtattctatgaaataccctggcagcctgtctagcacagtccattctgagaactcccacaaagaaaacagtaagaaggagatccttccagtcagtagttgcgagtctagtatttttgactatgaagaagacattccctccgtgacccgccaggtaccatctaggaaatacactaatattcggaagatcgagaaagattccccgtttattcatatgcaccgtcacccgaacgagaatacattgggcaaaaacagtttcaatttctctgatctgaatcactctaagaacaaggtttcaagcgaaggaaacgaaaaaggcaattctactgccctcagctcactgttcccctcttcctttaccgagaactgtgagctgctttcgtgttctggtgagaataggactatggtacactctctgaacagcaccgctgacgagagcgggctcaacaagcttaaaatccgctacgaagaattccaagagcacaagactgaaaaaccatctctcagccagcaagccgctcactacatgttctttccctcagtagtcctctctaactgtctgactaggccgcagaagctctctcccgtgacatataagctgcagccaggtaataaaccgtcccgactgaagttgaacaagcggaagttggcaggacaccaagaaacatctactaaatcatccgagacaggttcaacaaaagacaactttatccagaacaatccatgtaattctaatcctgagaaggataacgcgctcgcttccgatctgactaaaaccacgaggggagccttcgaaaacaaaacccctacggacgggttcatcgattgccattttggcgacgggactttggagactgaacagagttttgggctatacggtaacaaatataccctgagggcgaagaggaaggtcaattacgagactgaggactctgaatcgtccttcgtaacgcataacagcaagatatcccttcctcaccctatggagattggagagagcttagatggaaccctcaagagtaggaaacggagaaaaatgtcaaaaaaattgcctcctgtgattattaaatatatcatcatcaaccgatttcgagggcgcaaaaatatgctggttaagttggggaaaattgacagtaaagagaagcaggttatcctgacagaggagaaaatggagctttacaagaaattagccccattaaaggatttctggcccaaggtccctgattcacccgccactaagtatccaatctacccattaacaccgaaaaagagccatagacggaaaagtaagcataagtcagctaaaaaaaagacgggaaaacaacagagaaccaataatgaaaatataaaaagaaccctgagcttccggaagaagcgctcccacgccatactgagccctccttccccatcttataatgctgaaactgaagattgcgacctaaattattccgatgtcatgagtaaactgggtttcctgtcagaaaggtccacaagtccaattaactcatcgccaccacgttgctggagccccactgatccccgagccgaagagattatggccgcagccgagaaggaggcaatgctattcaaggggcccaatgtgtacaaaaagaccgttaattcacggatcggaaagacctcaagagcaagggcccagatcaagaagtccaaggcaaagcttgccaatccatctattgtgactaaaaagcgaaataagcgtaaccaaacaaataagttagttgatgacgggaagaagaaaccaagggcaaagcagaagacaaacgagaaagggacatctcggaagcacacgacattgaaagacgagaaaattaagtcccagtccggggctgaagtgaagtttgtgctaaagcaccaaaacgtatcagagtttgccagctcctctggaggatcacagctcttattcaagcagaaagacatgccactgatgggtagtgcggtcgaccatcccctgagtgcctcgctgcccacagggattaatgctcagcaaaagctgagtggatgcttttcctcatttctcgagtcaaagaaatctgtcgacctgcagacattcccgagcagtcgggacgatctccacccctctgtggtgtgcaatagtataggacctggtgtatcgaagatcaacgtgcagcgacctcataatcagagtgccatgttcaccttgaaggaaagcacattaatccagaagaacattttcgaccttagcaaccatttgagtcaagtggctcaaaatacccagatctcatcaggcatgagctctaagatcgaggacaacgcaaataacatccagaggaattacctgtcctcgattggaaaactttcagagtaccgcaatagcctggagtccaagctggatcaggcttatactcccaactttttgcactgtaaagacagccagcagcagatagtttgtattgcggagcagagcaaacacagtgagacctgttcaccaggtaataccgcatcagaggaatcccaaatgccaaataactgcttcgtgacatctttaagaagcccaattaagcagattgcctgggaacagaagcagcggggcttcatcctggatatgtctaactttaagcccgagcgtgtgaagcctcgcagcttaagcgaggcaatttctcaaaccaaagcactatcccagtgcaagaaccggaatgtctctacccccagcgcgttcggcgaaggacaaagcgggcttgccgtgctcaaggaactccttcaaaagcgccagcagaaggctcagaacgccaatacaacacaagaccctttgtccaacaagcatcagcctaacaaaaacatcagcggctcactggagcataataaagccaacaagaggacgcgctctgtcactagcccccggaaacctaggacacctaggagtaccaagcaaaaagagaagatcccaaaactgctgaaggttgactccttgaacctccagaattcctcccagctggacaattccgtgtcggacgacagtccaatattcttctctgaccccggatttgagtcatgctatagcttggaagactctctctctccggaacacaactataacttcgacattaacacaattggccaaactggtttttgctctttctattcaggctcccaatttgtgccggcagaccaaaacctcccgcagaagttcttgtcagatgccgtccaggacctgtttccaggtcaggctatagagaagaatgagtttctttcacatgacaaccaaaagtgtgacgaggacaagcatcacaccacagacagtgcaagctggatacggtcaggaaccctttcaccagaaatttttgagaagagtaccattgactctaatgaaaatcgaagacataaccagtggaaaaattccttccacccactgaccacccgctctaattccatcatggatagcttttgtgtacagcaggcggaggattgtttaagcgaaaaatcacgactgaatcggtcatctgtttccaaagaggtgttcttgagccttccccagcccaacaatagcgattggattcagggccatacgaggaaggagatgggacaatcccttgactcagcaaacacctcgtttacggccatcctgagtagtcctgacggcgagttggtggacgtggcctgcgaggatttggagctgtacgtgtccagaaataatgacatgctgacaccaacacccgactcttccccccgctccacctccagcccttcccagtcaaaaaacggatcttttacccccaggaccgccaacatactaaagcctctgatgagccctcctagcagggaggagatcatggcgacactgctcgaccatgatctgagcgaaactatctatcaagagccattctgctcaaacccttctgacgtgcccgagaaaccccgagagatcggtggccgattgctgatggtggagacccgtctcgccaatgacctggctgagttcgagggagacttctctcttgagggcttgagattatggaaaaccgcgttctccgccatgacacagaatccaagacctggatccccattacgctccgggcagggcgttgtgaataagggatcaagcaactcacccaagatggtggaagacaagaaaatcgtgattatgccatgcaagtgcgccccctccagacagctggtgcaggtgtggctacaggcaaaagaagagtatgaacggagcaagaagctgccaaagactaaacctaccggtgtggtaaaatcagccgaaaacttctcctcctctgtgaaccctgatgataagcctgtggtgccccctaagatggatgtgtctccctgtattctgcctactaccgctcacactaaggaggacgtcgacaattcccagatcgccctgcaggctcccaccacaggttgctcccaaaccgcaagcgagagccagatgctgcctcccgtcgcctctgcctcagatcccgaaaaggacgaggatgatgatgataactactacatctcttactctagccctgattccccagtgattcctccttggcagcaacctatcagtcctgatagtaaggcactaaacggtgacgataggccaagctcaccagttgaggagttaccaagtctggccttcgagaacttcctcaagcccattaaagatgggatccagaaatctccttgtagcgaacctcaggaacctcttgtgatatctccaattaatactcgggctaggacaggaaagtgtgaaagcttatgcttccatagcactccgattattcaaaggaagttactggagagactccccgaggctcctggcctgtcacctctaagtactgagccaaaaactcagaaactatccaacaaaaaagggtcaaacactgacaccctgcggagggtcctccttactcaagctaaaaaccagttcgccgccgtgaacactccacagaaagaaacctctcagatcgatgggccttctctgaataacacctatgggttcaaagtgtcaattcagaacctgcaggaagcaaaggcactccatgaaattcagaatctgaccctgatcagcgtggagctgcatgcacggacgcggagagacctcgaacctgatccagaattcgatcctatttgcgctctgttctattgcattagttctgacactccactcccagacactgaaaagacagagctgaccggcgtgatagtcattgataaggataagaccgtgttttctcaggacattcggtatcagacccctctgctgataagatcgggaattacaggtctggaagttacatatgcggccgacgagaaagctcttttccatgagattgctaacataattaagaggtacgacccagacattcttctggggtacgagattcaaatgcattcgtggggctacctactgcagagggcggccgctttaagcatcgatctgtgcagaatgatctcacgagttcccgacgataagattgaaaatagatttgctgcagaaagagacgagtacgggtcctacacgatgtctgagattaacatcgtggggaggatcacactcaatctgtggcggatcatgcggaatgaagtcgcccttacaaactacacattcgaaaacgtgtcctttcacgtactgcaccagaggttccccctgttcacttttcgggttctgagtgattggttcgacaataagacggatctatacagatggaaaatggtagaccactacgtgtctagggtgcggggaaatcttcagatgctggaacagctagatctaattggcaaaacctccgagatggccagactttttggcatacagtttttacacgtactgactcgcggaagccagtatagggttgaaagtatgatgctgcgcatcgcaaagccgatgaactacatcccagttacgcctagcgttcagcagcgtagccaaatgagagctccgcaatgcgtgcctcttattatggaacccgaaagcagattttattcaaacagcgtgcttgttctggactttcagtctctctaccctagcatcgttatcgcttacaattattgtttcagcacttgcctaggtcacgtggagaaccttgggaagtacgatgaattcaagttcggctgtaccagcttgagggttccacctgatcttctttatcaggtgaggcatgacataactgtcagtccgaacggcgtcgcattcgtcaagcctagcgtccggaagggtgtgcttccaagaatgcttgaagagatattgaagactcggttcatggttaagcagtctatgaaagcctacaagcaagacagagcactgtccagaatgttggatgcccgccagctcggacttaagctgattgcaaacgtgacatttggatacacgtcagctaattttagtgggcgaatgccctgtatcgaggtgggcgatagtatcgtgcacaaagctcgcgagacactggaaagagccataaaactcgttaacgacacgaaaaaatggggagcccgagtggtctatggcgacactgattccatgttcgtgcttttaaaaggcgccacgaaggagcagtcttttaagatcgggcaggagatcgctgaggctgtgaccgccactaaccctaagccggtgaagttaaaatttgagaaagtgtatctaccctgtgtgctccagacaaagaaacgttatgtaggctatatgtacgagaccctagaccagaaggaccctgtttttgacgccaaaggcattgagaccgtcagacgcgattcatgccccgccgtcagcaaaattctggaaagaagtcttaaactcttattcgagaccagggacatctcgctgattaagcagtacgtgcagcgccaatgcatgaagttactggaggggaaggcctcaatacaagatttcatattcgccaaagagtaccgcgggtccttttcatataagcccggcgcatgcgtcccagcactcgaactgacaaggaagatgctaacctatgaccggaggagtgagccacaggtgggcgaacgagtgccatacgtaattatctacggtacaccaggagtacccttgatccagctcgtccggagaccggtagaggtgttgcaggaccccaccttgaggctgaatgcaacctattacattactaagcagatcctcccaccactcgccaggatctttagtctgattggcatagatgtcttttcatggtaccatgagctgcctcggattcataaagccactagcagcagtcggtccgagcctgagggtcggaagggaactatctctcagtactttactactctccattgtcctgtgtgtgacgatctgacgcagcacgggatttgcagtaaatgtcgctcacagccgcagcacgttgctgtgattcttaaccaggagattcgcgaactggagcgccagcaggagcagttagtgaagatctgcaaaaattgtaccggctgctttgatcgacatataccatgtgtgtcactgaactgtccagtactctttaagctaagccgagtgaaccgagaactgagtaaagccccatatttacgacagctgctcgatcaattttag

SEQ ID NO: 203188 - DNA, 9393 bp, synthetic construct
  misc_feature 1..9393: note = Description of Artificial Sequence: Synthetic coding sequence
  source 1..9393: mol_type = other DNA
atgttcagcgtgcggatcgtgaccgccgactactacatggccagccccctgcaggggcttgatacctgtcagagccctttgacccaggccccagtgaaaaaggttccggttgtgcgagtcttcggcgccacccccgctggccagaagacctgtttgcaccttcacggtatcttcccctatctttatgtgccttatgatgggtacggtcagcagccggaatcgtacctcagccagatggccttttccatcgaccgtgcactgaacgtcgctttggggaatccctcatcgacagcccaacacgtgtttaaggtctctctcgtctctggaatgcccttttatggctatcatgaaaaagagagacacttcatgaaaatttacctctataaccccactatggttaagagaatatgtgagttgctccaatctggtgcaatcatgaataagttttaccagccccacgaggctcacataccttatcttctgcaattgttcatcgactacaatctgtacgggatgaacttgatcaacttagccgctgttaaatttcggaaagccagaaggaaaagtaacactcttcatgccactgggagctgcaagaaccacctgtcaggcaattccctggcagacaccctcttccgctgggaacaagatgagatcccctcttcccttattctggagggggtggagccccagtctacatgcgaactggaagttgatgcagtagcagcagatatcctcaaccgactcgacattgaagcccagattggcgggaatcctggactccaagcgatttgggaggatgagaaacagcgcaggagaaaccggaatgaaacctcgcaaatgagtcagcccgaaagccaggaccacagattcgtgccggcaaccgaaagcgaaaaaaagttccagaaaagattgcaggagatcctcaagcagaacgatttcagcgtgaccctctccgggagtgtggattattctgacgggagccaggagttcagcgcagagctgacccttcacagcgaagttttgtcgcccgagatgctccagtgtacaccagcaaatatggtagaggtacataaagataaagagtcgtcgaaagggcacacacgccataaggtcgaagaggctctgataaatgaggaggcaatcctcaatctgatggaaaacagtcagaccttccaaccgctgacacagagactctctgaaagtcctgtgtttatggatagctccccagatgaggcgcttgtgcaccttttggcaggcctggagtctgacggttaccgaggagaaagaaacaggatgccatccccttgccgcagtttcggtaacaacaagtacccacagaactccgacgatgaagagaacgaaccacagattgaaaaggaggaaatggagctctctctggtgatgagtcagcggtgggattccaacatagaggagcactgcgccaagaagcgctctctttgcaggaacacccatcgctcctccactgaggacgatgattctagctccggagaagaaatggaatggagtgataattctttgttgcttgcctccctatctatcccacagttggatggaactgccgatgagaacagcgataacccgcttaacaacgaaaattccagaacacacagtagtgtgatcgccacctccaaactatccgtgaagcccagtatcttccacaaagacgcagccactctcgagcccagttccagtgcaaaaatcacattccagtgcaaacatacaagtgcattgtcaagtcacgtgttgaacaaggaagatctcattgaggacctttcgcagacaaataaaaatacagaaaagggcctggataactctgtgacgtcctttaccaatgaatctacttactctatgaaatatcccggtagtctgtcttcaacggtccacagcgaaaatagtcataaagagaattccaagaaagaaattctgcctgtatcttcctgcgaaagttccatcttcgactatgaggaagatatccctagtgtgactagacaggtgccctcgcggaaatacaccaacattcggaagatcgaaaaggactcaccctttatacatatgcatcggcatcctaatgagaacacactcggaaagaattcatttaacttcagcgacctgaaccatagcaagaacaaagtgagtagcgagggcaatgagaaagggaacagcactgccttatcgagcttgttcccatcaagtttcaccgaaaattgcgaacttctgagctgctctggggagaatcgcaccatggttcacagcctcaactcaacagccgacgaatcaggcctcaataaactgaagatcagatacgaagaattccaagagcacaagacagagaaaccaagcctctcacagcaagccgcgcattatatgtttttcccatccgtcgtgctgagtaattgtctcacccggccccagaagctgtccccggtgacctacaagctacaacctgggaataaaccttctaggctcaagctgaataagcggaaactcgctgggcatcaagaaacaagtacaaagtcaagtgaaaccggcagcactaaagataacttcatccagaacaatccttgtaacagtaaccccgaaaaggataatgctttggcctctgaccttaccaaaacaaccagaggcgcttttgagaacaaaactcccacagacggattcatcgattgccactttggggacggtacactcgagaccgagcagagcttcggactctacggtaataagtacactttaagagcgaaaagaaaggtgaactacgagacagaggacagcgagtcttctttcgtcacacataatagtaaaatctctctgccgcaccccatggaaattggtgagagcctggatggtactctcaagtcccggaagcgtcgcaaaatgtcaaagaagcttccacctgtgattatcaagtacattataatcaaccgcttcagagggcgcaaaaacatgctggttaaactgggcaaaatcgactccaaagaaaagcaggtgatcctcaccgaggagaagatggagctgtataagaagctggctccactcaaggacttctggcctaaggtgcctgacagcccggctaccaagtatcccatctacccacttacgcctaagaagagtcatagaaggaagtctaagcataagagcgctaaaaaaaagacaggaaaacagcagagaaccaacaatgaaaacatcaaaagaacactgtcctttcggaagaagaggtcccatgctattctgtcacctccctctccctcatacaatgcagagacggaggattgcgatttaaattatagcgacgtcatgtccaagctgggatttcttagcgagcggtctacaagcccaatcaactccagccctccccgctgctggtcacctacggaccccagggcagaggaaatcatggccgccgccgagaaggaagccatgttgttcaaaggcccaaacgtgtacaagaagactgtgaatagccgaatcggaaagacctcacgggctagagcacagatcaagaagtctaaagccaagttggcaaaccctagcattgtcactaagaaacgcaataagaggaatcaaacaaataagctggtggacgacggaaagaaaaagccaagggcgaagcagaagacaaatgaaaagggaaccagcaggaaacatacaacattgaaggacgagaagattaagtcacagtcgggagctgaagtgaagttcgttctaaaacaccagaacgttagcgaattcgcgtcatcctctggaggcagtcagctgcttttcaaacagaaagacatgcccctgatgggctccgcagtggaccaccctctgagcgccagtttacctaccggcattaacgcccagcagaaactgtctggttgcttctccagctttctggagtccaagaagtctgtggatctgcaaacatttcctagctcacgcgatgatctgcacccttctgttgtgtgcaattcgataggccccggagtgtcaaaaataaatgtgcagcggccacataaccaaagcgcaatgtttacactgaaagaatcgactttgatccagaaaaacatcttcgacctcagcaaccatctcagccaggtggcacaaaatacccagataagctcagggatgagttctaagattgaggacaacgccaataatatccagcgtaactacctgagcagcataggaaagctgagtgagtatcggaattccctcgagagcaagcttgaccaggcatacacccccaatttccttcattgtaaggattctcagcagcagatcgtgtgtattgccgagcagtccaagcactccgagacctgtagtcctgggaacaccgcttctgaagaatcccaaatgccgaacaattgtttcgtcacctccctcagatcaccaattaaacagattgcctgggagcaaaaacaacggggcttcatcctcgatatgtcaaatttcaagcctgaaagagttaaaccgcgcagcctctctgaagcgatcagtcaaaccaaagcactttcacaatgcaagaatcgtaatgtatctaccccatcggccttcggggaggggcagtcggggctggcggtactgaaggagcttttgcagaagaggcagcaaaaagcccagaacgcgaatacaacgcaggatccactttccaacaagcatcagccgaataaaaacatttcgggctccctcgaacacaacaaggcgaacaaacgtactaggtcagtaaccagtccacgcaagccgcgtaccccccgatcaaccaagcagaaagagaaaatcccaaagctcttaaaggtggactcccttaacctccagaactcaagtcagcttgataacagtgtgtcagacgattccccaatttttttcagcgacccaggcttcgaaagctgttattcccttgaggactccctaagccccgagcacaattataactttgacatcaacacgatcggacagacaggattctgcagtttctattcgggaagccagttcgtacccgcggaccagaatcttccacagaaattcctgtctgacgcggtgcaggacctgttccctggtcaggcaatcgaaaaaaacgagttcctgtcacacgacaatcagaagtgcgacgaagataagcaccacactactgactccgcgagttggatccggtcagggactctctctcccgaaattttcgaaaaaagcaccatagactctaacgagaatcgcaggcacaatcagtggaagaacagctttcatcccctgacgacacgctccaacagcataatggattctttttgtgttcagcaagccgaggattgcctaagcgagaaatcgaggctgaaccgctcatcggtctctaaagaggtattcctaagtctgcctcagcctaacaacagcgactggattcaagggcacacaaggaaggagatgggacagtccctagactcagctaatacgagcttcacggccattctcagctctccagacggcgaactggtggatgtggcgtgtgaggacctggaactttatgtgtccagaaataatgatatgctgacccccactccggattcctctccacggtctacctcaagtccatcccagtcaaaaaacggtagcttcacgccacgcaccgccaatattttaaaacccctgatgtccccccctagcagagaggagattatggctacactcctggatcacgatctgagcgaaacaatctatcaggagccgttctgctccaaccctagtgatgtccctgagaagcccagggaaattggtgggcgattgttgatggttgagaccagactcgcaaatgatctggctgagttcgaaggagatttcagccttgaaggcttgagattgtggaagacagccttcagtgcaatgacacagaacccccggccgggatctccgctcagatcaggacagggcgtggtgaataagggaagcagtaattctccgaaaatggttgaggacaagaagatcgtcatcatgccctgtaaatgcgccccatctcggcaattggtgcaggtgtggcttcaggctaaagaggagtatgaaagaagtaaaaagctgccaaagacaaagccaaccggggtagtgaagtcagctgagaactttagctcttcagtgaatcccgatgacaagccggtggttccacccaagatggacgtatccccatgcatcctgcctacaactgcacacacaaaagaggacgtggacaatagtcagattgctctgcaagcaccgactactggttgttcccagacggcatccgagtcgcagatgctgccacccgtggcctccgcctctgaccctgaaaaagatgaggacgacgatgataattattacataagctattcatcaccagacagcccagtaattcccccctggcagcagccgatcagccccgactctaaggccctaaacggggatgaccgaccctcttccccagtcgaagagctaccttccttggcctttgagaattttctgaaaccaatcaaggacggaattcagaagtctccgtgttctgaaccccaggaaccactggttatttccccgatcaacactcgggcccgaactggtaagtgcgaatcactctgttttcacagtactcccatcattcaacggaaattgcttgagcgcctgccagaggcacccggcctgtctcccctgtcaaccgagcccaagacccaaaagttgtccaacaaaaagggttcaaacactgacacactgcgtagagtgctcctgactcaagcgaagaaccaatttgcagcggtgaatacaccgcagaaagagaccagccagattgacggaccaagtctcaataacacatatgggttcaaagtcagcatacaaaacctgcaagaggcgaaggctttgcatgaaattcagaacctgaccttaatctccgttgagctgcacgcacggacccggagggacctggaacccgacccagagttcgatcctatctgcgcactattttattgcatttcatcagacacacccctgcccgatacagaaaaaaccgagctgaccggagtgatagtaattgacaaagataagactgtgttttcacaggatatccgctatcagacaccattactcatccgtagcggcattactggcctcgaggttacttacgcagcagatgagaaagcactattccatgagattgccaatatcatcaagcgctatgaccctgatatcctactggggtacgagatccagatgcacagctgggggtatctgctacagagggctgctgcgctgtcaattgatttatgcagaatgatttctcgcgtaccagacgacaaaattgaaaacagatttgccgcggagagagacgaatatgggagctatacaatgtcagagataaacattgtcgggcggataacacttaatctctggaggatcatgcgaaacgaagtggccctcacaaattacacgttcgaaaacgtgagctttcacgtactgcaccaaaggtttcccttatttaccttccgcgtgctctcagattggtttgacaataagaccgacctctacagatggaagatggtggaccactacgtcagcagggtgcgcgggaatcttcagatgctggaacagctggatctgatcggaaagaccagcgaaatggcaagactgtttgggatccagtttttacacgtgctgacaagaggcagccaataccgggtggaatcaatgatgcttcgaatcgcaaagccaatgaactatattcctgtgaccccttctgtgcaacagcgttcccagatgagggccccccagtgcgtgcccctgatcatggagcctgagagcaggttctactctaatagtgtgctcgttctcgatttccagtctctttatccatctattgtgatcgcctataactattgctttagtacctgcctggggcacgtcgaaaacctgggtaagtacgatgagtttaagtttgggtgtaccagcttacgcgtgccaccggatctcctgtatcaggtgaggcatgatatcacagtcagccccaacggtgttgcttttgtaaagcccagcgtgcgcaagggtgtcctcccgcgcatgctcgaggagatactgaagactcgttttatggtaaagcagtccatgaaggcttacaagcaggaccgggcgctgagccgaatgctcgatgcccggcagctgggactcaaattgattgccaacgtaacgttcggatacactagcgccaacttctcaggaagaatgccctgtattgaggtcggagattcaatcgtgcacaaagctagagaaactctggagcgcgccatcaaactggttaatgacacaaagaagtggggcgcgcgagtcgtgtatggcgacaccgattccatgttcgtgttgctcaagggcgctacaaaggaacagtcatttaagattggccaggagattgctgaagccgtaacagctactaatcccaaaccagtgaaactcaagtttgagaaagtgtacctcccatgtgtgctgcagaccaagaagaggtacgtggggtacatgtatgagacactcgaccagaaggacccagtgtttgatgccaaaggcatcgagaccgtccggagagattcctgtcccgcagtgtccaagattctcgagcgtagcctcaagctgttatttgagacaagagacatcagcctcatcaagcagtacgttcagagacagtgcatgaagctcctggagggcaaagcgagtatccaggattttatcttcgccaaggagtatagaggctccttctcttacaaacccggcgcgtgcgtgccagcacttgagctgacaaggaaaatgctgacctacgaccgtcgctcagagccgcaggtgggagaacgggtgccctacgtgataatctacggaaccccaggtgtcccacttattcagctggtgagaagaccagtcgaagttctccaggatccaaccctgcggctcaacgcaacgtactatataaccaagcagattctgccacccttagccagaattttctctcttatcggcatcgatgtgttcagttggtaccacgaactgccccgaatccacaaggctacttccagctcccgaagcgagcctgaaggaaggaaggggacgataagccagtatttcacaaccctccattgtcccgtctgtgatgatctgacccagcacggcatctgctccaaatgcaggtctcagcctcagcatgtggctgttattctgaatcaggagattcgagaattagaacggcagcaagaacagctcgttaaaatctgcaaaaactgtacagggtgttttgatagacatataccatgcgtgtccctgaattgcccagtgctgtttaagctatctagagttaaccgcgagctctcaaaggctccttatctgcggcagctgctggatcaattctag

SEQ ID NO: 203189 - DNA, 9159 bp, synthetic construct
  misc_feature 1..9159: note = Description of Artificial Sequence: Synthetic coding sequence
  source 1..9159: mol_type = other DNA
atggccttcagcatcgaccgggccctgaacgtggccctgggcaacccatcttcgactgcccagcatgtctttaaggtgtccttagtatccggcatgccgttttacggctatcatgaaaaagagcggcacttcatgaagatctatctttataacccaacaatggtaaaacgcatatgtgaactacttcagagcggagccatcatgaacaaattctatcaacctcacgaggctcacataccgtatttgttgcagctgttcattgactacaatctgtacgggatgaacctgatcaatctcgcagccgttaaatttcggaaagcacggagaaaaagtaataccctgcacgccactggcagctgtaaaaatcacctgtctggaaactcgttggcagacaccctgttccggtgggagcaagacgaaatcccttcatcactgattctcgaaggcgtagagccccagtcgacttgcgaattagaagtcgacgctgtcgcggccgatatcctgaaccgcctagacattgaggcccagataggaggaaaccccggtctgcaagccatctgggaagatgaaaagcaaaggagacggaaccgaaacgagacatcccaaatgtctcagcctgaatcacaagaccatagatttgttccggcaacagagtcagagaaaaagttccagaaacggttgcaggaaattctgaagcagaacgactttagtgtgacactgtccggatctgtggattacagcgacggcagccaggagttttcagccgaactcaccctccatagcgaggttctgagtcccgagatgcttcagtgtacacctgccaatatggtggaggttcataaggacaaggagtccagtaaaggacacactagacataaggttgaagaagcccttatcaacgaggaggcgattctgaacctcatggagaacagtcagacattccagcccctgacacaaagactctcagaatccccagtcttcatggacagcagtcccgacgaagccctcgtccacctgctggccggactcgaatcggacggatacaggggcgagcgtaacaggatgccgtcgccctgtaggagctttggcaacaataagtacccccaaaacagtgatgacgaggagaatgagccgcagatcgaaaaagaagagatggaactgagcctggtgatgtcccaacgatgggacagtaatattgaggagcattgcgctaagaaacggtcactttgtaggaacactcaccgcagcagtacagaggatgacgattcctcatcaggtgaggaaatggagtggtccgataactcactgctgcttgcatctctcagcattccgcagctcgacggtaccgctgacgagaactcagacaacccactgaacaacgagaatagtaggacgcatagcagcgtcatcgctacttccaaactgtctgtgaaacctagtattttccataaggatgccgctacccttgagccctcaagctccgccaagatcacttttcagtgtaagcatacctcagcactgagttctcacgtcctgaacaaggaagacctgatagaggaccttagccagacaaataagaatactgaaaagggactggataactcggtcacgtcttttacaaacgaaagcacctattcaatgaaatatcctggttccctttcatctactgtgcactcagagaattcacacaaagaaaacagtaaaaaggaaatactccctgtttcttcttgtgaatcatctatttttgactacgaggaagacattccctccgtgacaagacaggtgccctcccgcaagtatactaacattcggaagatagaaaaagactcccctttcattcatatgcaccggcacccaaatgaaaatacactaggcaaaaattcctttaattttagtgatctcaatcactctaaaaataaagtatccagcgagggcaatgaaaaaggcaactctactgcgctgagcagcctgttccctagctcttttaccgaaaactgtgaactcctttcttgttccggggagaacaggaccatggttcactcccttaacagcactgcagatgaatccgggctcaataagctaaagatccggtacgaggagttccaggagcataagacagagaaacctagtttgagccagcaggctgctcactatatgttcttcccctcagtcgttttgtctaactgtttaacgcgcccacaaaagctctctccggtaacgtacaagctgcagccagggaataaaccttctcggttgaagcttaataagcggaaattggccgggcatcaggagacatctacgaaaagctctgaaaccggatccacaaaagacaacttcatccaaaacaacccctgcaacagtaaccccgaaaaagataacgccctagcatctgatctgaccaaaactacccgtggagcctttgagaataagacacccaccgatggcttcatcgattgccacttcggcgacgggaccctggaaacagaacagtcatttggtttgtacggcaataaatataccttacgtgccaaacgcaaggtcaactatgagacagaagatagcgagagctctttcgtgactcataactccaagattagcctacctcacccaatggagattggagaatctctcgatggcacacttaaaagcagaaagagacgaaagatgtctaagaaactcccgccggtgataatcaagtatataatcataaacaggtttcgtgggagaaagaatatgctcgttaagttgggcaaaatcgactccaaagaaaagcaggtgatcctgacggaggaaaaaatggagttgtacaagaagctggccccactcaaagatttttggcccaaggtgccagacagcccggctacaaaataccctatttatcccctgacccccaagaagagccaccgacggaaatccaagcacaaatccgccaaaaagaaaactggcaaacagcagcgcactaataacgagaacattaagcgtacgctgtcattcaggaagaagcgcagccacgcaatactatcccccccttcacccagttataatgccgagaccgaggattgcgatctcaactattcggatgttatgtcaaagctgggatttctgagtgagcgatccactagtccgatcaatagctcaccacctcggtgttggtctccaaccgacccccgagcagaggaaatcatggctgcggccgaaaaagaagccatgttgtttaaggggccaaacgtgtataagaaaaccgtgaatagcaggataggcaaaaccagtagggccagagctcagataaagaagtcaaaggcgaaactggctaaccccagcattgtaacaaagaaaagaaacaaacggaaccagaccaacaaactggttgatgatggaaaaaaaaagccaagagcgaagcaaaagactaacgagaagggaacttctcgtaagcataccacgctgaaggacgagaagattaaaagccagtcaggggctgaagtcaaatttgtgctgaagcatcagaacgtgtctgagttcgcctcgtctagcggcggatcacagcttttgttcaagcaaaaggatatgcctctgatgggctctgcagtggaccaccctctatcggcttcccttccaaccggtatcaatgcccagcagaagctgtcaggttgctttagcagctttctcgagtctaagaagagtgtggacctccagaccttcccctcctctcgcgatgatctgcacccgtctgtagtatgtaatagcatagggccaggggtgtcaaagatcaacgtccaaaggcctcacaatcagtcagcaatgtttactctgaaagagagtaccctcattcagaagaacattttcgatctcagcaaccacctttctcaggtggcccagaatacacagatctcctcaggcatgagtagtaaaatcgaggataatgccaacaacatccagaggaactacctaagctccatcgggaagctgagcgagtatcggaacagtctggagagcaagctggaccaagcctatacacctaacttcctgcattgcaaggactctcagcaacagatcgtctgcattgcggaacagtcaaagcactcggagacctgtagtccaggaaatacagcttcagaggagtctcaaatgcccaataattgctttgtgacctcactgagaagtcctatcaagcagatcgcctgggaacagaagcagcgagggttcatcctggatatgagcaattttaaacctgaacgtgtaaagccccgatctttatctgaggccattagccagacaaaggccctcagtcaatgtaagaatcggaatgtttccacgccgtcagcgttcggcgaagggcagagcggcctggcagtactcaaggagctgctgcagaagagacagcagaaagcacaaaacgcgaatactacacaggaccctctctcaaataagcaccagcctaataagaatatatcaggaagcctagaacacaacaaggccaacaaacggacaaggagtgtgacgtcccctaggaaaccccgtacaccccgaagcactaagcaaaaggagaaaatcccaaagctgcttaaggtggattccttgaatttgcagaactctagtcagctcgataactctgtctccgatgattcccctatcttttttagtgatccgggcttcgagagttgttactctttggaggactctctgtctcccgagcataactataactttgacattaacacgattggacagaccggattctgttctttttattccggctcccagtttgtccctgccgatcagaatctacctcagaagttcctgtccgatgcagtgcaggatctttttcctggacaggccatcgaaaagaacgaatttttgtctcacgataaccaaaagtgcgatgaggataagcatcacactacggatagcgcttcctggatcaggtctggcaccctatcgcctgagatctttgaaaaatctactatagactctaacgaaaatcgaagacacaaccaatggaaaaacagtttccatccgttgactactcggtctaatagtattatggattctttttgcgttcaacaagccgaggactgtctcagcgagaaatcgaggctcaacaggtcttccgtgagcaaggaagttttcctctcactgccccagcctaacaacagcgattggatccagggccatacgaggaaggaaatgggtcaatcactggattccgcaaacaccagcttcaccgccattctctcaagtccagatggcgagcttgttgatgttgcctgtgaagatctcgagctctacgtgtccaggaacaacgatatgctgactcctacaccagattcctcaccacggtcgaccagctccccaagccaatctaagaacggctccttcactcctaggactgcaaatattctgaagccactcatgtcacccccttcaagggaagagattatggccacactcctagaccacgatctctctgaaacaatttaccaggaacccttctgttctaacccgagcgatgttcccgagaagccccgcgagattggcggccgacttttgatggtggagacccgcctcgctaacgacctggccgagttcgagggagacttcagtctggaaggtttaaggctttggaagacggcatttagtgcgatgacacagaacccccgcccagggtcaccactgcgcagcgggcagggcgtggtgaacaagggctccagcaattcacccaagatggtggaagacaagaagatcgtgatcatgccctgtaagtgtgcccccagtcgccagctcgtacaagtgtggctgcaagccaaggaggagtatgagcgctccaagaagctccctaagaccaaaccaaccggcgtggtcaagtcagcagagaacttcagtagctcagtgaaccccgacgataaaccagtggtaccgcccaagatggatgtatccccgtgtattctgcccactacggcgcacacaaaggaagacgttgataattcccaaattgcactgcaggcccccactacaggctgcagccagacagcatctgaaagccagatgcttccgcctgtggcctccgcatccgatcctgagaaagatgaagatgacgacgacaattactacatatcttactcatctcctgactcaccagtgatccccccgtggcagcagcccatcagccccgattcaaaggccctaaacggcgatgatcggccgtccagccccgtagaagagctcccatctttagcattcgagaatttcctcaagcccattaaggacggtatccagaagagcccatgttctgagccacaggagccactcgttatctcaccaataaacacccgcgctcgcaccggtaagtgtgaatcactctgtttccactcaaccccaatcattcagaggaagctgctggaacgtctccccgaagctcccgggctgagcccccttagcaccgagcctaagacccaaaagctatctaataagaagggctcaaacaccgacactctcagacgcgtgctgctgacccaggctaaaaatcagtttgctgctgttaacacaccccagaaggaaacttcccaaatcgatggaccctctttaaacaatacttacggatttaaggtatcaatacagaacttacaggaagctaaggcactgcatgagatccagaatctgaccctaatctccgtagaattacatgctcggacaaggcgagacttagagccggatcctgaatttgacccaatttgcgcattattctattgcatttcttcagacacccccctcccagatacagagaagacagaactgacaggtgtgattgtcatcgataaggacaagaccgtcttcagccaggatattcgctaccagactcctcttctcatcagaagtgggattaccggccttgaagttacctatgctgctgacgaaaaagccctcttccatgagatagcgaatattataaagcgctacgatcccgacattctcttaggatatgagatacaaatgcactcttggggatacttgctccagcgagccgcagcattgagtattgacctctgtagaatgatttcccgagtcccagatgataagatcgagaatcggttcgcagccgaaagagacgagtacgggagctatacgatgagtgaaataaacatcgtcggacgcatcactctgaacctatggcgtattatgcgcaacgaggtggccctcactaactatacctttgagaacgtcagctttcatgtcctccaccagcgttttccgttatttaccttccgggtactgagtgactggtttgataacaaaaccgacctctaccgctggaagatggtcgatcactacgttagtagagtgagaggcaaccttcaaatgctcgaacaacttgacctgatcggtaagactagtgagatggccagactgtttggcatccagttcctgcatgtgctaacccggggcagccagtaccgcgtagaatcgatgatgctccgtatcgcaaaacccatgaattacatccccgtcacacccagcgtccagcagcggagccagatgcgtgctcctcaatgtgtacccctaatcatggagccagagtcgcgcttctactccaacagtgtcctcgtccttgatttccagtccttgtacccttccatcgtaatcgcctacaattattgcttcagcacctgcctgggccacgtagagaacctcggcaagtacgatgagtttaagttcggctgcacttctctaagagtgccgccagacctgctttatcaggttagacatgatattacagtctctcccaatggcgtggcctttgtaaaaccttcagtccgaaagggagtcctaccgaggatgctggaggagattctgaagactcgattcatggtcaagcagtccatgaaggcttacaagcaggacagagccctcagtagaatgttagacgctaggcagttggggctgaaactaatcgctaacgtgacctttggctacacctccgctaatttttccggacgcatgccgtgcatagaagtgggcgacagcatagtgcacaaagctcgcgagacactggaacgggctataaagctcgtgaatgacaccaagaaatggggagcccgtgttgtgtatggagacaccgacagtatgttcgttttacttaagggagccacaaaggaacagagcttcaaaatcggccaggaaattgccgaggccgtcaccgcaacaaacccaaagcctgtgaaactaaagtttgagaaggtgtacctgccttgtgtgttgcagacgaagaagaggtacgtggggtacatgtacgaaaccctggatcagaaggacccagttttcgacgccaagggcattgagacagtgaggagggacagctgtccggccgtttcaaagatcttagaaagatcactgaagctgctttttgagacccgagacatatcacttattaagcagtacgttcagagacagtgcatgaaactgctggaggggaaggcgtccatacaggatttcatcttcgccaaagagtaccgggggtccttttcttacaaaccaggcgcctgtgttcctgccttggaactgacgcggaagatgctgacatacgatagaaggagtgaaccccaagtaggcgagcgggtgccctatgttataatatacgggacacctggagtccccctgatccagctggtgcgacgcccagtcgaggtgctccaagaccctacactgcggctgaacgctacgtactatatcacgaaacagattctgcccccactcgcccgaatttttagtctaatcggcattgatgtgttttcatggtatcacgagctgccgcgtattcacaaagcaacctcatcgtcacgctcagaacctgagggtcgaaaaggaacaattagccagtattttaccactctccattgtcctgtgtgcgacgacctcacgcagcatggaatctgttctaagtgtaggtcccagccccagcatgtggccgtcatacttaatcaggagatccgggaactcgaacggcagcaggaacagctcgttaagatatgtaaaaactgcacgggatgctttgacagacatattccctgtgtctctctcaactgtccagtgctgttcaagctatcccgggtgaatagagagctgagtaaagcaccttatcttcggcaactgttggaccagttctag

SEQ ID NO: 203190 - DNA, 2289 bp, synthetic construct
  misc_feature 1..2289: note = Description of Artificial Sequence: Synthetic coding sequence
  source 1..2289: mol_type = other DNA
atggtggagacccggctggccaacgacctggccgagttcgagggcgatttcagtttagaagggctgcgcctttggaagaccgccttttcagccatgacccaaaacccccgtcccggctcccctctaaggtccgggcagggagtcgtcaacaaagggtcaagcaattcacccaagatggttgaggataaaaaaatcgttatcatgccttgtaaatgcgcccctagtagacagctggtacaggtttggctccaggcgaaggaggagtatgaacgctctaagaagcttccgaagacaaaacctaccggtgtggtgaagtcagcagaaaactttagcagtagcgtgaacccggatgataagccagtggttccccccaagatggacgtctcgccatgcattctccctacaactgcccacacaaaagaagatgtggacaatagccagatcgcccttcaagctcccaccacaggctgctcccagaccgctagtgaatcccagatgttgcctcccgttgcctccgcatctgaccctgagaaagatgaagacgatgacgataactactatatcagttactctagccccgatagtcctgtcattcccccatggcagcaaccaattagtcccgattctaaagcccttaatggcgacgatagaccatcatctccggtggaggaattgccatccctcgccttcgagaatttcctcaaacctattaaggacggcatacaaaaaagcccctgctcggagcctcaggagccactggtcatctctcccatcaacacacgcgcccggacgggcaaatgcgaaagcctctgctttcattccacgccaataattcaacgtaaactcctggaaagattgcccgaagcccctggcctttctcctctaagtactgaacccaagacacagaaactgagtaacaagaaagggtccaatacagatacattgagaagggtgctgctgacacaagccaagaatcaattcgccgctgttaatacgccgcagaaagagacgtcccaaatcgatggtccatcactcaataacacctacgggttcaaagtctctatccaaaacctgcaggaggccaaggctctgcatgagatccagaatctgacattgatttccgtagagctccacgctcgcacccggcgcgacctcgaacccgaccctgaattcgatccaatatgcgcccttttctactgcattagcagcgacacccccctgcctgatactgaaaaaacggagctaactggtgtgattgtaatcgacaaagataaaacggtatttagtcaagatatacgctatcagacaccgcttctgattagatcaggaataacaggcctggaggtgacttacgctgcagacgagaaggcactgttccacgagattgcaaacatcattaaaagatatgacccagatatcctgctcggatatgaaatccagatgcattcctgggggtatctccttcagcgggccgccgcactgagtattgatctgtgtcgcatgatttctagagtaccagatgataaaatcgagaacagattcgccgccgagcgagatgaatacggctcatataccatgtcagaaatcaacatcgtcggcaggatcacattgaacctgtggagaattatgcgtaacgaagtcgcactgaccaattacacctttgagaacgtgagctttcacgtcctccatcagcgcttccccctcttcactttccgggtgctgagcgactggtttgacaataaaactgacctgtaccgctggaaaatggttgaccattacgtctccagagttaggggtaacctacaaatgctggaacagctggacctcatcgggaagacctctgagatggcgaggctattcggtatccagttccttcacgtgttgactagagggagccagtatcgagtagaatccatgatgctgaggatagccaaacccatgaactacatcccggtaactcccagtgttcagcagaggagccagatgagggcaccccagtgcgtgccgcttattatggaacctgagagccgtttttactctaattcagtcctcgttctagattttcagagtctttacccgagtatcgttatcgcctacaactattgcttcagcacttgtttaggtcacgttgagaacctgggcaagtacgacgaatttaaattcgggtgtacttccctgcgcgttcctcccgatctgctctatcaggtcaggcatgacataactgtatctcctaacggtgtggccttcgtgaaaatcgccaacaagtgtagacctgaaggtatggcatag

SEQ ID NO: 203191 - DNA, 3666 bp, synthetic construct
  misc_feature 1..3666: note = Description of Artificial Sequence: Synthetic coding sequence
  source 1..3666: mol_type = other DNA
atgctgcggagcaccggcttcttccgggccatcgactgcccctactggagtggtgcccctggcggcccttgccgacgcccgtactgccacttcaggcaccggggtgctcgaggctcaggcgcccccggtgatggcggggaagctcctcccgccgccgggttgggctatgacccatataaccccgaactgccgaaaccgccggcccagagagagaatggaactctaggactgggcgaggagcctaggcctgacgtcctggaactcgagctagtcaaccaggccatagaggcagttcggagtgaggtcgaacttgagcagaggagatacagggagctcctggaaactacaagagaacataggtctgctgaggcccccgcactcgcgcccagaggaccgaacgccagcccgaccgtgggccccgacgaggacgcgtttcctttggcatttgactattccccaggttcccatggcttactgtcacctgatgcaggttaccaacctaccccactggctgcaccggctgaacctggttccaaatactccctggcgtctctcgatcgcgggcaaggcagaggcggcggtggtggcggcgccctggagtacgtgcctaaggccgtcagccaacctcggcgccattctaggccagttccaagcggaaagtatgtcgtcgacaactctcgacctcccaccgacctcgaatatgatccactgtccaactactcggcgcgccatctgagccgcgcgtctagcagggatgaacgcgccgctaaacgtcctcgcggctctcgagggtccgagccctacacgccagcaccaaaaaaactctgcgacccttttggctcctgtgacgctagatttagcgactcggaggacgaggcagcgaccgtgcctggaaacgagcctacaaccgcttctacccctaaggctcgggcagaccctgagattaaggcaacgggccaaccgccttctaaggagggactggaagcagagggtggaggtctgcgggagacgaaggagacagctgtgcagtgcgatgtcggtgatctgcaacctcctcccgctaaaccagcaagtcccgctcaggtgcagagctcccaagatgggggctgtccaaaggagggaaagcccaagaagaagaagaccggagctccccccgccccatcatgcaaagatggagcccaagggaaagacaagaccaaggataaggggagagggcgtccagtggaaaaaccaagagctgacaaaaagggaccacaggccagcagccccaggcggaaggctgagcgtcctgagggaactaaaaagaagccttcctccgctacacctgtagcaacttctggaaagggccggccggatcggcccgctagacggccgagtcccacctctggggatagcagacccgccgcggggaggggccctcctcggccgctccagctgcccgatcgtaagagcactaaagcccctagtgggaaactggtggagaggaaggcccgctccctggacgagggagcaagtcaggacgcccctaagctcaagaagcgggccctaagccatgccgatttgttcggagacgagtctgaagatgaggccgcagggccaggagtcccgtcagtatggccttctgccctccctagcttgtcgtctgacagcgattccgatagtgatagtagcctcggcttccccgaggcgcaagggccacctaagagactcaaggcaagcccacccccgagtcccgcaccatcctcatcgtcctcttcatccagttctaccagctccgccggcgctgacgtggattattctgccctggagaaggaagtcgactttgactcagatccaatggaggaatgcctccggatattcaatgaaagcacctccgtcaaaacggaagatagaggtcgattagcccgacaaccccccaaggaggaaaaatcagaggagaaaggactttcaggtcttacaactctctttccagggcagaaaaggcgcatctctcacctgagtaagcaggggcaggaggtggagcctcctcgtcgcggccctgcggtgccccctgcacgacctcccaccgcccaagaggtttgttatcttagggcccagcaagcacagcgggcttccgccagccttctccaggctcccgcaagactggctgaaaagagcccttctgtccatatatcggcaccaggagagaaacggcgcatcgcccacataccaaaccccagattagctgctgcacccaccggggccaagcgtactctggcagcttctggaagccagagctccaacggaccagaaccaggaggccagcagctcaaaacacgcactttgtctggaatggctagcaaaaccaccaccactatcatccctaagcgaattgcacatagcccaagccttcagagtctgaaaaaaccaattatcccgaaagagtttggaggcaaagttcctacagtgattaggcaacgctatctaaatctttttattgaagagtgccttaagttttgcacctctaaccaggaagcaatagagaaggctttaaacgaggaaaaagtggcatacgaccgcagcccctccaaaaatatttaccttaatgtggcggtgaacacattaaagaagctgagagggcttgcgccatcagcagtgccgggtttgagtaaaacttctggtcgccgcgtagtgtcccatgaagtggtgctcggtggccgcttagcggccaaaaccagcttcagtcttagcaggccatcaagtccacgcgtggaggatcttaagggagcggccctgtatagcagactgcgcgagtatctgctgactcaggatcaattgaaggagaacggctaccccttccctcatcccgaacgcccaggtggagcaatcatctttacggcagaggagaagcgcccaaaggattcatcttgtaggacatgttgtcggtgcggaactgagtacttggtgagcagtagtggaagatgcataagggatgaagaatgttactatcactggggacggcttaggaggaatagggtggccggagggtgggaaactcaatatatgtgttgctccgccgcagctggaagcgtgggttgccaagtcgccaagcagcacgtgcaagacggaagaaaggagagacttgaaggcttcgtcaagaccttcgaaaaggaattaagcggcgatactcacccaggaatttatgctctagactgtgaaatgagttacacaacctacggactcgagctaacacgggtgacagttgtcgacaccgatgtccacgtggtgtacgataccttcgtgaaaccagataacgagattgtagactacaatacacgcttctccggtgttaccgaagctgacctggccgatactagcgttaccttgcgggatgtgcaggcagtgctactgagtatgttcagcgccgatacaattctgatcgggcactctctggagtcagacctgttagccctcaaggtgatccattccacggtggtagacacaagcgtgttgtttcctcatagactggggctgccttataaaagatctctgagaaatttgatggccgactacctcagacagataatccaagataacgtggacgggcacagcagctccgaagacgctggagcctgtatgcatttggtgatctggaaagtgcgcgaggatgcaaaaacaaagcgatag

SEQ ID NO: 203192 - DNA, 1014 bp, synthetic construct
  misc_feature 1..1014: note = Description of Artificial Sequence: Synthetic coding sequence
  source 1..1014: mol_type = other DNA
atgctgcccagcagcacccggctgggctacgacccctacaaccccgaactgcctaagccacccgctcagcgagaaaatggcacacttggactgggggaggaaccaaggcccgacgtgctggaactggaacttgtgaaccaggcaatcgaggctgtacgatcagaagtcgagcttgagcaaagacggtatcgagaattacttgagactactcgcgaacaccggagtgccgaggcgccagctctggccccccggggcccaaatgctagtcctactgtcggccctgatgaagatgcctttcctctggcattcgactattcccccgggagccatggactcctgagtccagacgcgggttatcagcctacgcctctcgcagctcctgccgagcctggatcgaaatactcgttggctagcctcgatcgcggacagggccgaggaggcggcggaggcggcgccctggaatatgtaccaaaagcagtctcccagccacgtagacatagccgccccgttcctagcgggaaatacgttgtcgataactctaggcctcctacagatttagagtacgacccactttctaattacagcgccagacacctatctagggcatccagtcgagatgagcgtgcagccaagcgtccccgaggttcgcgcggtagtgagccttacactcctgctcccaagaaactctgcgacccgttcggcagctgcgatgcacggtttagcgactccgaggatgaggccgccaccgtccctggcaacgaacccactaccgcatccacgcctaaagcaagagctgatcctgaaatcaaagcaacaggtcaacctccatctaaagaggggctcgaagccgaaggagggggtctgcgggagaccaaggagaccgctgttcaatgtgacgtaggagacctgcagccaccacccgccaaaccggccagtcctgcacaggttcagtcttcacaggatggtggatgccccaaggaaggtaagcctaagaagaaaaagaccggggcctag

SEQ ID NO: 203193 - DNA, 1482 bp, synthetic construct
  misc_feature 1..1482: note = Description of Artificial Sequence: Synthetic coding sequence
  source 1..1482: mol_type = other DNA
atgggcagccacagcccctgcgcccacaccccctgcgccccccccgctcccaccggagcaaagcgtacgctcgctgcatccggctcccagtccagcaatggccccgaacccgggggtcagcaactgaagaccagaacactgagcgggatggcttctaaaacaacaacaactatcatccctaagcgcatcgctcattcaccatctttgcagagcctgaaaaagcccatcattcctaaagagttcggcggcaaagtgcccactgttatccgacagcggtacctgaatctcttcattgaagaatgcctgaagttctgcacctccaaccaagaggcaatcgagaaagcactcaacgaggagaaagtggcctatgaccggtccccaagtaagaatatatacctaaacgtggcagtaaatactctgaaaaagctaagggggttagcaccgtccgcagttcccggcctgtctaagacctctggccggcgcgtggtttcccacgaagttgtgctgggcggacgtctggccgcaaaaacaagctttagcctgtcacgaccctctagtccgcgggtcgaggacctgaagggggcagcactctatagtaggctgagggaatatctgctgacgcaggatcagctgaaagaaaacggctatcctttcccccaccctgagaggcctgggggcgccatcatcttcacagctgaggagaagaggcccaaggattcttcatgtcgtacttgctgccgctgtggaacagaatacttggtttcgtcctctggcagatgtattcgcgatgaggaatgttattaccattggggcaggctgagaaggaaccgcgtggccgggggctgggaaacacagtacatgtgctgtagcgccgccgctggctcagttggctgccaggttgccaaacagcacgtacaagatggacgcaaggagcgcctcgaagggttcgttaaaacattcgaaaaggagctgtccggcgacacacacccaggaatctacgctctggattgcgagatgagttatactacctatggtctcgagctaacacgggtgactgtagttgacactgacgtccacgtggtgtatgacactttcgtgaagcccgacaacgagatcgttgattacaacaccaggttttctggagtcacagaagctgatttggcagatacgagtgtcactctgcgggatgtgcaggcagtgctactctctatgttctctgctgatacaatcctgatagggcattcactcgaaagtgacctactggctctgaaggtgattcattccaccgtcgtggacaccagcgtcctatttcctcaccgcctgggtctgccttacaagaggagcctgcgaaacttaatggcagactaccttcggcagatcatccaggataatgtggacggacatagcagcagcgaggatgctggagcttgcatgcacctcgtgatctggaaggtccgcgaagatgctaagaccaagaggtag

SEQ ID NO: 203194 - DNA, 714 bp, synthetic construct
  misc_feature 1..714: note = Description of Artificial Sequence: Synthetic coding sequence
  source 1..714: mol_type = other DNA
atgctgggcggcagcctgggcagccggctgctgcggggcgtgggcggctcccatgggcgttttggcgcccgcggagtgagggaaggaggcgccgctatggcggcaggtgagagtatggcccagcgaatggtctgggtagatcttgagatgacggggcttgatattgaaaaggatcagattatagaaatggcctgtctcattacagatagcgacctgaatatactcgcagagggccccaacctgattatcaagcaacctgacgagctcctagattcaatgtcggactggtgtaaggaacatcatggaaaatcaggcctgacgaaggctgtgaaggagtctactatcaccctgcagcaggcagaatatgagtttttgagcttcgtccgacagcagacaccccctggcctgtgtccgctggcaggaaactcggttcacgaagataagaagttcttagacaagtatatgccacagtttatgaagcatcttcactatcgaatcattgatgtgtctaccgtgaaggagctgtgcagaaggtggtatcctgaggaatacgagttcgcgcccaagaaggcagcctcacacagggccctagacgacatatcggaatcaatcaaggaactgcagttttacaggaataacatcttcaagaagaagatcgatgagaagaaacggaagatcatcgaaaacggagagaatgagaagaccgttagttag

SEQ ID NO: 203195 - DNA, 753 bp, synthetic construct
  misc_feature 1..753: note = Description of Artificial Sequence: Synthetic coding sequence
  source 1..753: mol_type = other DNA
atgggcaaggccaaggtgcccgccagcaagcgggcccccagcagccctgtggccaagcccggtcccgttaaaaccctcactcggaaaaaaaacaagaagaaaaagcgcttttggaaatcaaaggctagggaagtaagcaagaaacccgcctcaggccccggggccgttgtgaggcctcctaaggcccccgaggactttagccagaattggaaggccctacaagaagtgccccggtggaccggcggcaggcagtaccttgctccaaggcccgtggaacagtctacgattcggaaggagcctcgcaagggccagatggtaattctgtttcagaatgagggcaccagctcaattcgcagtggcaagctcaggagacaacctcagccgcacccccctcgagaagagctcgaagtagtccagaaagaagtagctgaaatgttgaaggggcgaatcctggtgggacatgcattgcacaacgatcttaaagtactgttcttagaccacccaaagaagaaaattcgggatacccagaagtacaaaccattcaaatctcaggtgaaatctgggcgcccaagtttgaggctgctgagcgagaagattttgggactacaggtacaacaagcagaacattgctctatacaagatgcccaggcagcaatgagactctacgtgatggtcaagaaggagtgggaatctatggccagggaccgcaggcccctgctgaccgctcctgatcactgcagtgacgacgcttag

SEQ ID NO: 203196 - DNA, 1269 bp, synthetic construct
  misc_feature 1..1269: note = Description of Artificial Sequence: Synthetic coding sequence
  source 1..1269: mol_type = other DNA
atgggcaaggccaaggtgcccgccagcaagcgggcccccagcagccccgtagcaaagcctgggcctgtgaaaaccctgacgaggaagaaaaataaaaaaaaaaaaagattttggaaatcaaaagcgagggaggtctccaaaaagcccgctagtggacccggtgcagttgtccgcccccccaaggcacctgaggacttctcccagaattggaaagcgctgcaggaatggctgctaaagcagaagagccaggcaccagaaaagcctctggtaatttcgcagatgggtagtaagaaaaaaccaaaaatcatccagcagaataaaaaagagacctctcctcaggtaaagggtgaagaaatgccagcgggcaaggatcaggaggccagccgcggtagtgtgccatctggcagtaagatggaccgaagggccccagttcctcgcacaaaagcctccggaactgagcataataaaaaaggaacgaaagaaaggacaaacggtgatatagttcctgaacggggggacatcgagcacaaaaagagaaaagcaaaggaggcggcacccgccccccctacagaggaggatatctggttcgacgatgtggatcccgctgatatcgaagccgctatcgggccagaggcagccaaaatagcaaggaagcagctgggacagagcgagggaagcgttagcctgtcgctggtaaaggagcaggcattcgggggcttaacccgggcactggccctcgattgtgaaatggtcggcgtcggcccaaagggcgaggagagtatggctgcccgcgtgtcaatagtcaatcagtacggcaagtgtgtttacgataagtacgtgaagcccacagaaccggtcaccgattatcgcactgctgtttcaggaataagacccgaaaatctcaagcagggggaggagttagaggtggttcagaaagaggtagctgagatgctcaaaggtcgcatcctggtggggcacgccctacacaatgacctgaaggtgctgttcctggaccatcccaagaagaagatcagagatactcagaagtacaaacctttcaagagtcaggtgaaaagtggaagaccctccctgcgattactctcagagaagatcttagggctgcaggtgcagcaggccgagcactgctcaattcaggatgcacaagccgccatgcgactttacgttatggtcaaaaaggagtgggaatccatggcccgagatagacgtccactcctgactgccccagaccattgttcagacgacgcttag

SEQ ID NO: 203197 - DNA, 570 bp, synthetic construct
  misc_feature 1..570: note = Description of Artificial Sequence: Synthetic coding sequence
  source 1..570: mol_type = other DNA
atgggcagcaagaagaagcccaagatcatccagcagaacaagaaggagacaagcccacaggtcaagggagaagagatgcctgctggaaaggaccaagaagccagtcggggctcagttccttctggatcaaaaatggacagaagggcccccgtgcccaggaccaaggcctcaggtactgagcacaataaaaaaggcacaaaagaacggactaacggggacatcgtgcccgagcgtggcgatatcgagcataagaagagaaaggctaaggaggccgcgccggctccacccactgaagaggacatctggtttgacgacgtggacccagctgacattgaagccgccattggaccggaggccgctaagatcgctagaaaacaactggggcagtctgaagggtcagtgagcctgtccctggtcaaagagcaggctttcggcggcctaacgcgggcgctggccttggactgcgagatggtgggggtgggccctaagggcgaagagagcatggctgcccgagtgtcgattgtgaatcagtatggcaagtgcgtgtatgacaagtacgtcaagccctag

SEQ ID NO: 203198 - DNA, 1125 bp, synthetic construct
  misc_feature 1..1125: note = Description of Artificial Sequence: Synthetic coding sequence
  source 1..1125: mol_type = other DNA
cccgtggccaagcccggccccgtgaagaccctgacccggaagaagaataagaaaaaaaagaggttttggaaatcgaaggcccgagaggtgtccaaaaagccagcctcagggccgggagctgtcgtgcgaccaccgaaggcgccagaggacttctctcagaattggaaggcactgcaagagtggcttctgaaacagaaatcacaggcgccagaaaaacccttagtgatcagccagatgggctccaaaaagaaacctaaaattatccagcagaataaaaaagaaacatctccacaggtgaaaggcgaagagatgcctgctggtaaagatcaggaggcgagtagaggttccgtcccaagcggctcgaaaatggacagacgagctccagtgcctagaactaaagccagtggcaccgaacacaacaagaaagggaccaaggagagaactaatggggatatagtgcccgagcgtggggacatagagcataagaagaggaaggctaaagaggccgcacccgcccccccaaccgaggaggacatctggttcgacgatgtggatccggccgacattgaagcggcaatcggacctgaggctgccaagatagcccgaaaacagctgggacagagcgaaggatctgtgtccctctctctcgtcaaagaacaggcatttggcgggctcactagagcactagcactcgattgcgaaatggttggagtgggacccaaaggtgaagagtctatggccgcacgggtttccattgtcaatcaatatggcaaatgtgtgtacgataagtatgtgaagccaactgagcccgtaaccgactaccgcacggccgtatcgggaattcgccctgagaatctgaagcagggcgaagaactggaagtagtgcaaaaggaggtggcagagatgttgaagggccgcatcctggtggggcatgccctgcataatgacctgaaatccgggcggcctagcctgaggttgttatcagaaaaaatcctcggcttgcaagtgcagcaagattctgggtgcccaggatccaatgaggcggtaaggcatggggaagaaggcgttggtgagcacgggcctagacaggcacctcctgccgactgttctcgaccactgcagtag

SEQ ID NO: 203199 - DNA, 702 bp, synthetic construct
  misc_feature 1..702: note = Description of Artificial Sequence: Synthetic coding sequence
  source 1..702: mol_type = other DNA
atgggcaaggccaaggtgcccgccagcaagcgggcccccagcagccccgtagcgaaacctggccctgtcaagacattgactcggaaaaaaaataaaaaaaaaaagcgattctggaagtctaaggctagagaagtttctaaaaagcctgcctccggtcctggagccgttgtgagaccccctaaagcacccgaagattttagtcagaattggaaggcacttcaagaggttccacggtggacaggcggcagacaatatctggccccccgcccagtcgagcagtctacgattaggaaggagccacgcaaaggccagatggtgatcttattccagaacgagggaacaagctcaattcgcagcgggaagctgcgccgccagccccaaccccacccgccacgtgaggaactcgaagtggttcagaaggaagtcgccgagatgttaaagggacgcatactggtgggccacgccctgcacaatgacctcaaagttctcttcctcgaccatcccaaaaagaagattagggatacacaaaagtacaaaccattcaagagccaggttaagtcaggaaggccatctctgcgcctgctgagtgagaaaatcctcggactacaggtccagcaggctgagcactgctcgattcaggacgcccaggcagcgatgcggctgtacgtgatggtgaagaaggagtgggagtctatggcttag

SEQ ID NO: 203200 - DNA, 996 bp, synthetic construct
  misc_feature 1..996: note = Description of Artificial Sequence: Synthetic coding sequence
  source 1..996: mol_type = other DNA
atgagccgggcccggggcgccctgtgccgggcctgcctggccctggctgctgcgctggctgcactgctactcctgcccctccctttgcctcgggcccctgcccccgccaggaccccagctccagctccacgcgctcccccttcgcgccctgcagcccctagcttgcgaccagatgacgtgttcattgcggtcaagactacccgaaaaaatcatggcccacgtctcaggctgcttttgcgcacttggatatcacgggctagacagcagaccttcatctttacagacggtgacgatcctgagctggagctgcaaggcggtgatcgggttattaacaccaactgctccgcagtcaggacacggcaggctctgtgctgtaagatgtccgtcgaatacgacaagttcattgaatccggccggaaatggttttgccacgtcgatgatgacaattatgttaacgcaaggtcccttctacacctcctctcatcctttagcccaagtcaggatgtgtaccttggccgcccaagcctggaccaccccattgaggcgacagagagagtgcagggaggacggactgttactaccgtaaaattctggtttgccaccggtggggctgggttctgcctcagtcgcggcttggcgctgaagatgagtccgtgggcatccctgggaagttttatgtccaccgcagagcaggtgaggctgccggatgactgtactgtgggctatatagttgaagggttgcttggtgcgcgtttgttgcatagccccctattccatagccacctggagaacctgcagcgacttcctccggataccctgctccagcaggtgacgctaagtcatggcggacctgagaacccgcataatgtggtcaatgtggcgggcggtttctcactccaccaggatccgactcgcttcaagtcgatccattgcctgttgtaccctgacaccgattggtgcccccgtcagaaacaaggcgcaccgacttctcgatag

SEQ ID NO: 203201 - DNA, 873 bp, synthetic construct
  misc_feature 1..873: note = Description of Artificial Sequence: Synthetic coding sequence
  source 1..873: mol_type = other DNA
atgagccgggccccccccagccggcccgccgcccccagcctgcggcctgatgacgtgttcattgcagtcaagaccacaaggaagaaccacggtccaaggctgcgcttgctgctccggacttggattagccgggcaagacagcaaacatttatattcaccgacggggacgatccagagctggaattgcagggaggtgacagggtgattaacactaattgttctgcagtgcggactagacaggcactgtgttgcaaaatgagcgtcgagtacgacaaattcattgagagtggcagaaaatggttctgccacgtcgacgatgataactatgtaaacgcaagaagcctactgcatctgctcagttcattctcaccatctcaggatgtgtacctgggtcgcccgtcccttgatcatccaattgaggctacagagagggttcaaggtggcagaaccgtgacgacggtaaagttctggtttgccacgggaggggcgggtttctgtctatcaaggggcctagcactgaagatgtccccctgggcctctctgggtagcttcatgtccaccgcggaacaagtgcgcctgccagacgactgcacagttggctatatcgtcgagggcctgctcggcgcacgcctgctgcatagccctctattccacagtcatctggagaacctccaaagactcccaccagatacacttctgcagcaggtcaccctgagccatggcgggcctgagaacccccacaacgttgtgaacgtagccgggggcttctccctccaccaggatccgacaagattcaagtccattcactgcctgctgtaccccgacacagactggtgccctaggcaaaaacagggagcccccacctcacggtag

SEQ ID NO: 203202 - DNA, 1626 bp, synthetic construct
  misc_feature 1..1626: note = Description of Artificial Sequence: Synthetic coding sequence
  source 1..1626: mol_type = other DNA
atgggcagccaggaggtgctgggccacgccgcccggctggccagcagcgggcttttgctccaggtccttttccgcctcatcacttttgtcttaaatgcattcatcctgcggtttctgtccaaggaaatcgtcggcgtggtcaatgtgcgccttaccctgctatatagcaccactttgttcctagctagagaagcctttagacgggcttgtctgtcaggcggaacgcagcgcgattggtcacagaccctcaatctgctgtggctgacggtgcccctgggagtgttctggtcactttttctggggtggatctggctgcagctcctggaggtacccgacccaaatgtagtgccacattatgccacaggcgtcgtgctgtttgggctgagcgcggtcgtggagctgctcggggaacctttctgggtcttggcgcaggcacatatgttcgtcaagctgaaggtcattgccgagtcgctctccgtcattctaaaatcagtgttaactgctttccttgtgctttggctgccccattgggggctgtacatcttttctcttgctcagttgttctataccacagtgttggtgctttgttatgtaatctacttcactaaactattggggagtcctgagagtacaaagctgcagaccctacccgtcagcagaatcaccgatttattgcccaacattacaaggaacggggcgttcatcaactggaaggaagctaagctgacgtggagttttttcaaacagagctttttgaagcagatcctgacagaaggagaaagatacgtcatgacatttcttaatgtcctgaattttggagaccagggcgtctacgatattgtgaacaatctggggtcgctggttgctcggctgatctttcaacccatcgaagaaagtttttatatcttcttcgcaaaagtacttgaacggggaaaggatgctaccctgcaaaagcaagaagacgtggccgtcgcagctgcggtcctggaatcgttgctgaaactggcactgctggcaggcttgacaatcaccgttttcgggttcgcctatagccagttggcgctcgatatatatggagggactatgctgagctccggaagcggaccagtcctgcttagatcatattgcttgtacgtgctgctcctggctattaatggcgtgaccgaatgcttcacgtttgctgccatgtcaaaagaggaagttgatcgatataatttcgtgatgcttgcacttagttcttccttcctggtactcagttatctattgacaagatggtgcggtagtgtggggtttattctcgctaattgtttcaacatgggcatcagaatcacccagtccttgtgcttcattcatcgatattatagaagatccccgcaccggccattggccgggctgcacctcagcccggtcctgctggggacgttcgctttgtctggtggagtgacagcagtctccgaagtgttcctctgctgcgagcagggatggccggccaggcttgctcacatcgctgtgggggcattctgcctcggcgcaacactgggtacggccttcttgacagagaccaaattgattcacttcctgaggactcaattgggtgtccctcgtagaacagataaaatgacctag

SEQ ID NO: 203203 - DNA, 1509 bp, synthetic construct
  misc_feature 1..1509: note = Description of Artificial Sequence: Synthetic coding sequence
  source 1..1509: mol_type = other DNA
atgggcagccaggaggtgctgggccacgccgcccggctggccagcagcgggcttctcctccaggttttattcagattaatcacctttgtgctgaacgcctttattctgcgtttcctgagcaaggagattgtgggcgtggtgaacgtgcgggttccactgggagtgttctggagtctgttcctggggtggatatggctgcaattactggaggtgcccgaccctaatgtggtcccgcactatgccaccggagtggttttattcggcttaagcgcagtggtggagctgctgggcgagcctttttgggttctggctcaggcacacatgttcgtgaaacttaaggttattgctgaatctctcagtgtgatactcaaaagcgtacttactgcttttctagtcctatggctgccacattgggggctctatattttttccctggcccagctcttctatactacagtcctggtcctttgttacgtgatctactttactaagctgctgggcagccccgagagcaccaaactacaaaccctgccggtttcacggatcactgacctgcttcctaatattacaaggaatggggctttcatcaattggaaagaagccaagctgacatggtcctttttcaaacagagcttcctcaagcagatccttacagaaggcgagcgatacgtgatgacgtttctaaacgtgttaaacttcggggatcagggagtctacgacattgtgaacaatctgggtagtttggtagcacggctgattttccaaccgatcgaggaaagtttctacatcttctttgccaaagtgctggagcggggcaaagatgcgactcttcaaaagcaggaggatgtcgccgttgcagccgccgtcctggagtctctgctaaagctggctcttctcgctgggcttacaattacagtattcggcttcgcatactcccagctcgcgctggatatttatgggggaacaatgttgtcgtcgggctcaggccccgtgcttctgaggtcatactgcctgtacgtgctgctgttggcaatcaacggcgttacagaatgctttacgttcgctgccatgagcaaggaagaagtcgatcgttacaacttcgtcatgctagctctgtcctcctcttttctggtgctatcatacctcctgactaggtggtgtggctctgtcggtttcatacttgccaattgctttaacatggggattcgcattactcagagcctctgtttcatccaccgctattatagaaggtcgcctcatagacctcttgcggggctccacttaagtcctgtcctgttagggacatttgccctatcgggcggcgtcaccgctgtgagtgaagtgtttctgtgctgtgaacagggctggcctgcacgcttagctcacatcgctgtgggcgccttctgcctgggcgcaactctcggaactgctttccttactgaaacaaaactgatccatttcctgaggacccaacttggagtgccgcgtcggacagacaagatgacgtag

SEQ ID NO: 203204 - DNA, 4308 bp, synthetic construct
  misc_feature 1..4308: note = Description of Artificial Sequence: Synthetic coding sequence
  source 1..4308: mol_type = other DNA
atggcccagacccccgacggcatcagctgcgagctgcggggcgagattacccgattcctgtggcctaaggaggtcgaattgctcctgaaaacttggctccccggcgagggggccgtccagaaccatgttctggcgctgctgaggtggcgagcttacctcctccacactacgtgcctgcctttaagggtcgattgcaccttctcatatctggaggtacaggcaatggctctgcaggagacacctcctcaggttaccttcgagctggagtctctccgcgaactcgtgctggagttcccaggggtagcagccttggagcagctggcacagcatgtggcggctgccataaagaaggttttccctaggagcaccttaggaaaattgtttaggcgccccacccctgcctcaatgctcgcccggcttgagcgaagcagcccctcagaatcgaccgacccctgttctccatgcggggggttcctggaaacttacgaggccctctgcgattacaacggatttccttttagagaagagatccagtgggacgttgataccatctatcatagacagggctgtaggcatttcagccttggagacttttcacacctggggtccagggacctcgcgttgagcgtcgcagcattgagctacaacctgtggtttcggtgtctttcttgcgtagacatgaaattgtcactggaggtttcggaacagatcttgcacatgatgagccagagtagccaccttgaagaactggtgctggagacatgttccctgcgcggagacttcgtcagaagactggctcaggctctggccgggcacagctcttctggccttagagaactgagtctggccggtaacctcctggacgaccgcgggatgaccgcgctatcacgccatctggagagatgtcctggagccctacgacgtctatccctggcccagacaggtctgacgcctagggggatgcgtgccctgggtagggctctggccaccaatgcagctttcgatagtacattaacccacctggacctttccgggaaccccggggcccttggggcctccgaggacagcgggggcctatactcattcctcagcaggcctaacgtgctgtcttttctgaacctagccggtacggacacagccctggacacagtgcgtggctgctccgtgggaggctggatgacaggaagggctgattggcgcgcaggcagggggggtctaggacctccggctggggttgccaattcgctcccccctcagttattcgcagctgtgtcccgaggatgttgtacttctctcacccatctggacgcgtcaaggaacgtgttcagtaggactaagagccgtgcagctcccgcagcccttcagctctttctgagccgggccaggaccctgcgccatttaggtctcgcagggtgcaagctgcctccagatgcactacgagcgctgctggacgggcttgcactgaatacccacttacgcgatctgcatctggacttaagcgcatgcgagctgcgctcggccggtgcccaggttatacaagacttggtgtgcgatgcaggggccgtctcgagccttgacctggcagacaatggatttggcagtgatatggtgacccttgtcttggccataggacgttctagatctctccgccatgtagctctgggtcgaaactttaatgtacggtgtaaggagaccctagacgacgtgctgcataggatcgtccagctcatgcaggacgacgactgccccctgcagtccctgagcgtcgcagaatcccgcttgaaactcggtgccagcgtgttactcagggctctggctaccaacccaaacctgacggcgctggacatctccggaaatgctatgggcgatgcaggggctaagttgctggcgaaagcacttcgggtcaactcccgtctccgatctgtggtttgggaccggaaccacacatcagccctcggcctgcttgatgtcgcgcaagccctagagcagaaccattcactgaaagccatgcccctgcccttgaatgacgtggctcaagcacaacggagccgccccgaactaacagctagagccgtacaccagatccaggcttgtctgttgagaaacaacagagccgatcctgctagctctgaccacacgactcggctgcagcctctcgggttggtatctgacccaagtgaacaggaagtgaatgaactttgccagtccgtgcaggaacatgtagagttgctggggtgcggtgccggtcctcagggagaagcggctgttcgacaggccgaggatgcgatacagaacgcgaattttagcctctcaatcctccccatcttgtacgaggctggcagtagtcctagccaccattggcagttaggacagaaactggaagggttgcttaggcaggttggggaagtgtgtaggcaggatatccaggacttcactcaggccacgcttgacacagcccgcagcctatgtccacagatgttgcaggggtcaagctggagggagcaactggaaggagtgttggcagggtctagggggctcccagagctgctgcctgaacaactgttacaggacgcattcacgcggttaagagatatgagactgtctattactgggacactggccgagtcaatcgttgctcaggccctggctggtctttccgccgctcgggaccagctagtggagagcctggcccagcaggctaccgtgacaatgcctcccgcactacccgctcccgatgggggtgagcccagtctcctcgagcccggcgaactcgaggggttatttttcccggaagaaaaagaggaggaaaaagagaaggacgacagcccgccgcagaagtggccagagttgtcacatggactccatctggtgccattcatccacagtgccgcagaggaggctgaaccggagcccgagcttgccgcccctggagaggatgccgagcctcaagctggaccctccgcgagaggatcccccagccccgccgccccagggcccccggccggccctctgcctcggatggacctgcctctggcaggccagcccctcaggcaccccacccgcgcccgacccagaccccggaggcagcaccaccacagaccacctccgggtgggccgcaggtgcccccagctctcccccaagaaggaaatggcttatccgctcgcgtggatgagggcgtagaggagttcttcagtaagcgcctcatacagcaggacagattatgggcccccgaagaggatcctgcaacagagggcggagcaactccggtgcctcgcacgctccgtaagaagcttggaaccctcttcgcctttaagaaaccaagaagcacacgcggcccgagaacagatctggaaactagtccaggggcagcaccaagaacccgcaagacaacatttggagatcttctcagaccgcccactagacccagtaggggcgaggagttggggggagcagaaggggatacctccagtccagatcccgctggaaggagtcgcccccgctatacacgggatagtaaagcttacagcatgatcctgttgccagctgaagaggaggctacgctgggcgcaaggccagataagcggcgccccctcgagcgcggcgagacggagttggctccctcttttgaacagagggtccaggtgatgttgcagcgtatcggcgtatctcgagggtcaggtggggccgaaggcaaacgaaagcaatctaaggatggggagattaagaaggccggctcagatggggatataatggactcctcaacagaagctcctcctatcagcatcaagtctcgcacacacagcgttagcgccgatccctcctgtaggcccggccccggctcacagggccctgaatcagccacctggaaaaccttgggtcaacagttgaacgccgagctcaggtcacgggggtggggccagcaggacggtcccggacccccgtcaccagggcaatcgccatcaccctgtcgtacatcaccatcccctgactcccttggcctgccagaggatccctgtttgggaccaaggaatgaagacggccagttaagacccaggccgctcagcgccggccgaagagccgtctccgtacatgaggatcagctacaggccccggccgagcgccctctgaggttgcaaagaagcccggtcctgaagcgcagacccaagttggaagctcccccctccccgagtctgggatccgggttggggacagaacctctaccccctcagcccaccgagccctcgtccccagagcgctcaccgccatcccccgcgacagatcagcggggcggtggccctaacccctag

SEQ ID NO: 203205 - DNA, 1335 bp, synthetic construct
  misc_feature 1..1335: note = Description of Artificial Sequence: Synthetic coding sequence
  source 1..1335: mol_type = other DNA
atgccccccgccctgcccgcccccgacggcggcgagcccagcctgctggagccaggggagttagagggccttttcttcccagaagagaaagaggaggagaaagagaaggatgactcaccgccccagaagtggccggaactctcacacggactgcacctggtgcctttcattcacagcgccgccgaagaggcagagccagaacccgagctcgccgcgcctggtgaggatgccgaaccccaagcagggccgtccgcacgcggctcccccagtccagccgcccctggaccccccgccggccccttaccaaggatggatctacctcttgctgggcaaccattgcggcaccccacacgagcaaggccacgtccaagacgccagcaccatcatcggccgccacctggcggccctcaggtcccacctgctcttccccaggagggcaatgggctgtccgcccgcgttgacgagggcgtggaggagtttttttccaagaggctcatccaacaggacagactctgggcacccgaggaggatcctgccacagaaggcggcgccacccctgtaccaaggaccctgcggaaaaagctggggactttgtttgccttcaagaaacctagatctaccagagggcccagaacagatctggagacatcacccggagcggccccaagaacccggaagaccacatttggagatcttctgcgcccacccactcggccgagcagaggagaggaactgggcggggccgagggtgatacctcctccccggatccagcgggacgctcacgtccgcgttatactagggatagcaaggcttactcaatgattcttttgccggctgaggaagaagctactctgggggcccgaccagacaagcgcaggccgctggaacgcggcgagacagagcttgctccctcctttgagcagcgggttcaggtcatgcttcagcgtataggagtgtcccgggggtctggaggcgccgagggcaaacgaaagcagtcaaaggacggggagattaaaaaagctgggtcagatggtgacattatggattccagcacagaagctccacctatttccatcaagagccggacccattctgtgagcgccgacccctcctgtcgcccgggaccagggagtcagggtcctgaatctgctacttggaagacgctcggacagcagctgaacgccgagttacggtcgagagggtggggccaacaggacggccccggtcctccctcacccggtcaatcaccctccccttgtagaacaccaccccagacagcatgggcctcccagcggaccttggcttgggcccccgagatgaagaatggcccttag

SEQ ID NO: 203206 - DNA, 4119 bp, synthetic construct
  misc_feature 1..4119: note = Description of Artificial Sequence: Synthetic coding sequence
  source 1..4119: mol_type = other DNA
atggcccagacccccgacggcatcagctgcgagctgcggggcgagatcactagatttctatggccaaaggaagtcgagcttctcttgaaaacgtggcttcccggggaaggcgctgtgcagaaccatgtgttggccctgctgcgctggagagcatatcttctgcacaccacctgtctgcccctgcgcgtggattgtacattcagctaccttgaggtgcaagctatggcgcttcaagaaacccctcctcaggttacatttgaactggagtcattgcgagaactcgtactggaattccccggggtagctgccctggagcagcttgctcagcacgtcgcagcagcaattaagaaagtcttcccccgaagcaccttgggcaagctgtttcgcagacccacaccagcctcaatgttagcacggctggaaaggtccagcccaagtgaaagcaccgacccatgctcaccatgtggaggattcctggagacatacgaggcgctgtgcgactacaatggcttcccctttcgcgaggagattcagtgggacgtggacactatctaccacagacaaggttgcagacacttcagtctcggcgacttcagtcatttaggtagtagagacctcgctctgagcgttgcggcactgtcttataatctctggtttcggtgtctatcatgcgtggacatgaagttatcactagaggtgagtgaacaaatcctgcacatgatgtcccagtcctcacatcttgaggagttagtgctcgagacatgttcactacggggggatttcgtacgtcgccttgcacaagctttggccggacactctagttcgggactccgggagctctctctggctggtaacctgctcgatgataggggtatgactgctctgtcacgccacctcgaacgctgccccggggcattgcggcgcctgtccttggctcaaacaggactgactcctcgtggaatgcgagcgctcggaagagcgctggctaccaatgccgcattcgacagcactctgactcacctagacctgtctgggaaccccggagcactcggagcaagcgaggattctggtgggctctactcgttcctgtcacggccaaatgtcttaagctttttaaacttggcagggactgatacagctttggatacactctttgccgctgtgtccagaggatgctgcacgagtctgactcacttagatgctagtcggaacgttttttcaagaacaaagtcccgagccgccccagccgccctgcagctattcctctctcgcgcaagaacactccgccatctgggcctcgctgggtgtaagttgccccctgatgccctgagggccctcttggatggccttgccttaaatacacacctgcgcgacctacacttggacctcagtgcctgcgagctaagatctgcaggggcacaggtcatccaggacttggtgtgtgacgccggtgctgtatcctctctggacctggccgacaatggatttggaagcgacatggtgacattagtgctggccatcggaagaagtcgatccctccggcacgtggccctcggccggaatttcaatgttcgctgcaaggaaaccttggatgacgtgctgcatcgcattgtgcagctgatgcaggacgacgattgcccacttcagagcttatccgttgcggagagccgactcaagctcggggcttcggtgttgctccgcgctctcgcgaccaatcctaacctgactgcactggatatctcaggaaacgctatgggcgacgccggcgctaaactcctagcaaaagcactgagggtcaatagccgactccggtctgtggtctgggatcgaaatcatactagcgcactgggcctgttagacgtcgctcaggccctggagcaaaatcatagcctgaaggcaatgcccttgcccctaaatgacgtcgcccaagcacagcggtcacggcctgagctgacagcccgagcggttcatcagatacaggcctgtctcctccgtaataatagagctgaccccgccagtagtgatcacacgacacgacttcagccccttggcttggtgagcgatcctagtgagcaggaggtgaacgagctttgtcagagtgtgcaagaacacgtcgaacttcttgggtgcggcgctggaccccagggggaagcagccgtgcgtcaggccgaagatgctattcagaacgccaatttttcactttccatcttgcccatcctgtacgaggccggctcctcaccctcccaccattggcaactgggccaaaagcttgagggactgctgcgtcaggtgggagaggtctgcaggcaagacatacaggatttcacacaggccacacttgataccgcgcggtcactttgcccacagatgctccagggttcctcttggcgcgagcagttagagggtgtgctcgccggatcccgaggactgcctgaattgttgccagaacagctgttacaagatgccttcaccaggttaagggatatgcgactaagcattacagggactctagccgaatccatcgtggcgcaggctcttgccggcctcagcgcggccagagatcagctggtagaatccttagcccaacaggccacagttaccatgcctcctgccctgcccgcccctgacgggggagaaccatctttattagaaccaggcgaattggaaggcctattcttccctgaggagaaggaggaagagaaggagaaagacgattccccaccgcaaaagtggcccgaactctctcacggcctgcatctagtccccttcatacattctgcagccgaggaggcagagcctgagcctgagctggccgcgcctggggaagacgccgagccccaggctgggcctagcgcaagagggagccctagcccagccgctccgggtccacccgccggacccctgccaagaatggatttacccttggcaggccagccgctccggcatcccacaagggcccgtcctagacctagaagacagcatcatcatcgccctccgccagggggcccccaggttccaccagcgctgccgcaggaagggaacgggctgtcagccagagtggacgaaggcgttgaggagtttttttccaagaggttgattcaacaagatcgcttgtgggcccctgaggaggaccctgccaccgaggggggagctaccccagtgccaagaaccctgagaaaaaaacttggtactctgttcgcgtttaaaaaacctcgctcaactcggggccctaggaccgatctagaaacttctcctggcgccgctccaagaacacgcaagacaacattcggagacctcttgagaccacccacccggcctagcaggggagaggaactgggaggagctgagggcgacacatccagccccgaccctgcaggccggagccgacccaggtataccagggactcaaaggcctactcaatgatcctgctccccgcagaagaagaggctactttaggcgcgaggccagacaaaaggcgcccccttgaaaggggagaaaccgaactcgccccttccttcgaacagcgcgtgcaggttatgctgcaacgaatcggagttagtaggggatctgggggcgccgagggtaaaagaaagcagtcgaaagacggagaaatcaaaaaagccgggtctgacggcgacattatggattccagtacagaagccccgccgatctctataaagagtcgtacccactctgttagcgccgacccttcctgcaggcctgggcccggaagtcagggccctgagagcgctacttggaagacactcgggcagcagcttaatgcagagctccgtagccgcggctggggccaacaggatggaccaggtccacccagtcccggccaatcccctagcccttgtcgcacctcaccaagcccggacagtctgggcctgccggaggatccatgcctcggtcctcgaaacgaggaaagacccttgcgcttgcagaggtctccggttttaaagaggcggcccaaactggaggcaccgcctagcccttctttagggagtgggcttggaacagaaccccttcccccccagccgacagaacccagttcccctgaaagatctcctccatctcccgccacagaccagagggggggaggaccgaacccgtag

SEQ ID NO: 203207 - DNA, 1305 bp, synthetic construct
  misc_feature 1..1305: note = Description of Artificial Sequence: Synthetic coding sequence
  source 1..1305: mol_type = other DNA
atgggcatgggccggggcgccggccggagcgccctgggcttctggccaactctcgcatttctcttatgttccttccctgcagctacatccccgtgcaagattttaaagtgtaattcagagttctggtcagctacatcgggatcacatgcaccagccagtgatgacacacctgaattttgtgcagcattaaggtcgtacgccctctgtacacgcaggacagcccgaacctgtcggggggatctggcctaccattctgctgtccacggaatcgaggatttgatgagtcaacacaattgtagcaaggacggaccaacaagccagccaaggctgaggactctgcctccagccggcgacagtcaggagcgctctgactcccctgaaatttgccattacgaaaaatcttttcacaagcactctgctacacctaactatacccattgcgggctcttcggcgacccgcacctgcgcacttttacggacaggtttcagacttgcaaggtacagggggcctggcccctcattgataataattatctgaatgtccaggtaacaaacacccctgtgttgcctggctctgccgcaacagctacatctaaactaacaatcatcttcaagaattttcaggagtgtgttgatcagaaagtatatcaggctgaaatggacgaattgccagccgcttttgttgacggctccaagaacggcggagataaacacggagccaacagcttaaaaatcaccgagaaggtatctggacagcacgtggaaatccaggcgaagtatatcggcactacgatcgtagtgcgtcaggtgggcaggtacttgacgttcgccgtacggatgccggaggaggtagtaaatgccgttgaggactgggactcccagggactatatctttgcctgagaggttgtcccctcaaccaacagattgatttccaggcctttcacacgaatgctgaaggaacgggcgcccgcagactggctgcggcctctcctgctcctactgcacccgagacgtttccctatgaaacagccgtagccaagtgcaaagagaagctgcctgtggaagatctgtactaccaggcatgcgtattcgaccttctgaccactggcgacgttaacttcaccctggcagcatactatgcactcgaagatgtgaaaatgttacattcaaacaaagacaagttgcatctgtacgatcggacaagggatcttcctggtagagctgctgccggtctgcccctggctccaaggcctctgctgggggcgctggtgccactgctcgcgctgttgcccgtgttttgctag

SEQ ID NO: 203208 - DNA, 1353 bp, synthetic construct
  misc_feature 1..1353: note = Description of Artificial Sequence: Synthetic coding sequence
  source 1..1353: mol_type = other DNA
atgcagcccccccgggagcggctggtggtgaccggccgggccggctggatgggaatgggtaggggggctggcaggtcagcattgggattctggccaaccttggccttcctgctgtgttcatttccggcggctaccagtccatgtaagattctgaagtgcaactcagaattctggtctgcaacttcagggagtcatgcgcccgcatctgatgataccccggagttttgtgccgccttgagatcatatgccctctgtacccgcagaaccgcccggacttgtcggggggatttagcttatcactctgctgtgcatggcatcgaggatctgatgtctcagcacaattgtagcaaggatggccctacctcacagcccagacttcgcacccttccccctgctggtgactctcaggagcgatcagatagccccgaaatttgtcactacgaaaaaagttttcataaacactcagccactccgaactatactcattgtggattattcggcgatcctcacttgcggaccttcaccgacagattccagacctgtaaagtccagggagcctggccacttatcgacaacaactatctgaacgtacaggtaactaacacccctgtgctccctggaagcgctgccaccgcaacatccaaactgacaatcatattcaaaaatttccaggagtgtgtggatcagaaagtgtaccaggccgaaatggatgagctgccggcagcattcgtggatggatccaagaatggaggagacaagcatggggccaattcattgaaaatcaccgaaaaagtcagtgggcaacacgtagagatccaggccaaatatatcgggaccaccattgttgtacgccaggtgggcaggtacctgacctttgccgtgcggatgccagaggaagtcgttaacgcagtcgaggactgggactctcaggggctatacctgtgcctgagagggtgccccctgaaccagcagatcgattttcaggcctttcacaccaacgcggaagggactggggcacggcggttggcggcagctagtcccgctccaacggctcccgagacatttccttacgaaactgcggttgctaaatgtaaggagaaactgcccgtggaggacctgtactatcaggcctgcgtcttcgatctgctgaccactggcgacgtcaacttcactcttgccgcttattatgcactggaagacgttaagatgctccattctaataaggacaagctgcatttgtacgaccgaacccgcgacctaccaggaagggccgcagccggcctccccctggcgccaagacccctgttgggcgccctcgttcctctgcttgctctgctgcctgtcttttgttag

SEQ ID NO: 203209 - DNA, 1305 bp, synthetic construct
  misc_feature 1..1305: note = Description of Artificial Sequence: Synthetic coding sequence
  source 1..1305: mol_type = other DNA
atgggcatgggccggggcgccggccggagcgccctgggcttctggccaactctcgcctttttactttgttcatttcctgctgccacctcaccttgtaaaatcctaaagtgtaacagcgaattctggtccgcaactagcggctcgcacgcccctgcctcggatgatacccctgagttctgcgctgcacttagatcatatgctctctgcacccgtagaaccgctagaacatgtcgcggagacttggcttatcacagtgcagtgcatggaatcgaagacctgatgtcacaacataactgtagcaaggatggcccaaccagccagcccagactaagaactctgcccccagcaggtgattcgcaggaacggtcagactcccccgagatatgtcattatgagaaaagctttcacaagcactcagcaactccgaattacactcactgcgggctgttcggagacccacacctgagaacctttacagatcggttccagacgtgcaaggtgcagggcgcgtggcccctgatagacaataactatctcaacgtgcaagtgaccaataccccagtgctccctggatccgctgccacagccactagcaaacttaccataatctttaagaactttcaagaatgcgtggatcaaaaggtttaccaggccgaaatggacgaactgccagccgctttcgtggatggctctaagaatgggggcgacaagcatggagccaactctttaaaaatcactgagaaggtctccgggcagcatgtggagatacaggctaagtacatcggaacaaccattgtggtgcgccaagtgggacggtacctcacttttgcggtgcgcatgcccgaggaggtggtcaacgcggtcgaagattgggacagccaggggctctacctgtgtctgaggggttgcccgctcaaccagcagatcgattttcaggcgtttcacactaatgcagagggaacgggtgcccgccgactggcggcagccagcccagcccctaccgcacccgagacttttccttatgagaccgcggtggccaagtgcaaagagaaacttcctgtggaggatctgtattaccaggcatgcgtttttgacctgcttaccactggagatgtcaacttcacactggcagcatattatgcgctcgaagacgtcaaaatgctccatagcaacaaggataaactacatctctacgacagaacacgcgatttgcccgggcgagctgccgctggactgccccttgctccccgtccgctgctcggagcattggtacctctgcttgcactgctgcccgttttttgttag

SEQ ID NO: 203210 - DNA, 1026 bp, synthetic construct
  misc_feature 1..1026: note = Description of Artificial Sequence: Synthetic coding sequence
  source 1..1026: mol_type = other DNA
atgagccagcacaactgcagcaaggacggccccaccagccagccccggctaaggaccctgcccccggccggagattcgcaggagcgaagcgactcccctgaaatctgccactacgaaaagagtttccataagcatagtgctacacccaattacacgcactgtggtttgttcggagacccacacttacgaaccttcactgacaggttccaaacttgtaaggttcagggagcatggccgttgatcgacaataactacttgaatgtgcaggttacaaacacacccgtacttccgggcagcgcggctactgctacatccaagctgaccatcatttttaagaattttcaagaatgcgttgatcaaaaggtgtatcaggctgagatggacgaactgcctgccgcttttgtagacggaagcaagaatggtggcgacaagcatggtgcaaattccctaaaaattaccgagaaagtgtccggacagcacgtggagattcaagcaaagtacatagggaccacaattgtcgtgaggcaggtgggacggtacctgacattcgcagtgcgaatgcccgaggaagtggtcaacgctgtggaggactgggacagtcaaggtctgtacctgtgcctgagaggttgcccgctcaaccagcaaatcgactttcaggcctttcacaccaacgccgagggaactggcgccaggaggctggccgctgcctctccagctccaacagccccggagacctttccttatgagaccgcggtggcgaaatgcaaggagaagctcccagtggaagacctctattaccaagcatgcgtgtttgatctgctgactactggagatgttaactttaccttggccgcctattatgccctcgaagatgtaaaaatgctgcattcaaataaggacaaactacatctctacgatagaacacgcgacctcccggggagggccgccgccggactccccctagccccccgccccctcttaggtgccctggtgcccctcctggcacttcttccggtgttttgctag

SEQ ID NO: 203211 - DNA, 1305 bp, synthetic construct
  misc_feature 1..1305: note = Description of Artificial Sequence: Synthetic coding sequence
  source 1..1305: mol_type = other DNA
atgggcatgggccggggcgccggccggagcgccctgggcttctggcctaccctggccttcctcctgtgcagctttcctgctgctacaagcccctgcaagatcttgaaatgtaactccgagttctggtctgccacgtctggcagccacgccccggcttctgacgatacaccagagttctgcgcggccctgcggtcatatgccctctgcacccgccgcaccgctcggacatgcagaggagaccttgcctatcattccgcagtccatggcatcgaagatttaatgagccagcataactgctccaaagacggacccaccagccagcctcgtttaaggactcttcctccagctggggattcccaggagcgctccgacagtcccgaaatatgtcattacgagaagagtttccataagcactctgcaaccccgaattacacacactgtgggctgtttggggatcctcatctcaggactttcactgataggttccagacatgtaaggtacagggagcctggcccctgattgataacaattatctgaatgtgcaggtgacgaacacacctgtgttgccaggtagtgctgccaccgccacatcaaagctgacaattatcttcaaaaatttccaggaatgtgtggatcaaaaagtgtatcaggctgaaatggacgaactcccggccgccttcgtggacggcagtaagaatggtggcgacaaacatggagcaaactctctcaagattacggagaaggttagtgggcagcacgtggagatccaggcaaaatatataggaacaacaatagtagtgcgccaggtggggcgatatctcacctttgctgttagaatgcccgaggaggtagtgaatgccgtggaggactgggatagccaaggcctttacctctgtctacggggttgtcctctgaatcaacaaattgactttcaagcgttccatacaaacgcagaagggacgggagcccgcaggctggcagctgcctctcccgctccgaccgcacccgagacatttccctatgagactgccgtggccaagtgtaaagaaaagctccctgtggaagatctctattaccaggcttgcgtgtttgatctacttacaacaggggatgtcaattttacgctggctgcctactatgctttagaggatgtgaagatgcttcactcaaacaaagacaaactacacctctatgataggactagggacctgcccgggcgtgcagccgcgggtctgcctctggcccctaggccccttcttggcgctttagtgccactgctcgctctcttgccggtcttctgctag

SEQ ID NO: 203212 - DNA, 1377 bp, synthetic construct
  misc_feature 1..1377: note = Description of Artificial Sequence: Synthetic coding sequence
  source 1..1377: mol_type = other DNA
atgggcggcctgggcccccggcgggccggcaccagccgggagcggctggttgtcactgggcgggcaggctggatgggcatgggtcggggcgctggacggtcagcactcggtttctggccgacactggcttttctgttgtgttcattcccagctgccaccagcccatgtaagatcttgaagtgtaacagcgaattctggagtgccacctctggctcacacgccccagctagcgacgatacacctgaattctgcgccgctctccggagctatgcactctgtacgcggaggacagcccgaacatgccggggagatctcgcctatcattcagcagtccatggcatcgaggatcttatgagccaacacaattgctcaaaggatgggcccaccagccagccccgccttcggactttgccccctgctggagattcccaggagcggtcagactccccagagatctgtcattatgaaaagagcttccacaaacacagcgccactcccaactacacccattgcggcctctttggcgacccacatctgaggacctttacagatcgtttccaaacttgcaaagtgcaaggagcatggccgttgattgataacaactatctaaacgttcaggtgaccaatacacccgtgctcccaggaagcgcagccactgccactagcaagctgacaattattttcaagaattttcaggagtgtgtcgatcagaaggtctaccaggctgagatggacgagttacctgccgcgttcgtcgatggaagcaagaacggtggcgacaagcacggtgcgaattctctcaaaataacagaaaaggtgtccggccagcatgtggaaatccaggctaagtatatcggcacaacaattgtcgtgcgtcaggtgggcaggtatctgacttttgccgtcaggatgccagaggaggtcgtcaacgccgtggaggactgggatagtcaaggactctatctgtgccttcgcgggtgccctctgaatcaacaaattgactttcaggccttccacacaaatgcagaggggactggcgccaggcgtttagccgccgcgagccccgctccaaccgcacccgaaacttttccgtacgaaaccgccgtggctaagtgcaaggagaagctgccagtggaggacctctactatcaggcttgcgtgtttgacttgttgactaccggagacgtgaatttcacactcgctgcctactatgcactcgaagacgtgaagatgctgcattctaacaaagacaaattgcacctgtatgatagaacacgtgatttgcctggtagagcagccgccggcctacctctagcaccacggccacttctcggggcacttgttcccttacttgcattattgccagtgttctgctag

SEQ ID NO: 203213 - DNA, 1437 bp, synthetic construct
  misc_feature 1..1437: note = Description of Artificial Sequence: Synthetic coding sequence
  source 1..1437: mol_type = other DNA
atgatccggaagaagcggaagcggagcgccccccccggcccctgccggagccatgggcctcgccccgcaaccgctccggcacctccacctagcccagaacctacgaggcctgcctggacaggaatgggcctgagggcagcccctagtagcgccgcagcagccgccgcagaggtggaacagcgtaggtctccgggcttgtgtcctccacccctcgaactcctcctgctcctgctgttcagcttgggtcttctgcacgctggagattgccagcaaccagcccagtgtcggatacagaaatgtactacagacttcgtcagcctaaccagccacctcaactctgcggtagacggctttgacagcgaattttgtaaggctttacgggcctatgcaggctgtacccagcgcacgagcaaagcatgtagaggcaacctagtgtaccacagcgctgtgctggggattagcgatctgatgagtcagcgcaattgttcaaaggacggacctacatcctcaaccaatccagaggtaacccacgatccctgcaactatcacagccatgccggtgcacgcgaacatcggcgtggagaccagaacccaccgtcttaccttttctgtggcctcttcggtgacccacacctgcgcacctttaaggacaactttcaaacctgtaaggtggagggcgcttggccactgattgataacaactacctttcggttcaggtcacgaatgtgcccgtggtccccgggagctcagcaacagccacgaataaaattaccatcatattcaaggctcaccacgagtgcaccgatcagaaagtgtaccaggcagttacagatgatctacctgcggcattcgtggacggcacgacttcaggtggagacagcgatgcaaagtccttgaggatcgtggagcgagagagcgggcactacgtcgagatgcatgctaggtacatcggtactaccgtgtttgtaaggcaggtcggacggtacctaactctggcaattcggatgcccgaagacctcgccatgagctacgaggagagccaggatctgcagctgtgtgtgaatgggtgtccattaagtgagcgaattgatgatggtcaaggtcaggtatccgctatccttggccactccctgccaagaacgtcattggtgcaggcctggcctggctacaccctggagactgcaaacactcagtgccatgaaaaaatgccggtgaaggacatctattttcagagctgtgtgtttgacttgctgacaacgggcgatgcgaatttcacagcagccgcgcattctgcgctggaggatgtcgaagctctccacccaaggaaggagcgatggcacattttccccagctccggcaacggaacaccccgtggcggctctgatctgtctgtgagtctcgggttgacgtgcttgattctgatcgtttttctctag

SEQ ID NO: 203214 - DNA, 1314 bp, synthetic construct
  misc_feature 1..1314: note = Description of Artificial Sequence: Synthetic coding sequence
  source 1..1314: mol_type = other DNA
atgggcctgcgggccgcccccagcagcgccgccgccgccgccgccgaggttgagcaaagacggagtcctgggctatgccccccccctttagagctcttgctgctgctgcttttttcccttggcctgctccatgcaggagattgccaacaacctgctcaatgtcgtattcagaagtgcactacagattttgtgtctctaacgagccacctgaacagtgcagtcgacggttttgactctgaattctgcaaagctcttcgtgcatatgccggctgcacccaacgtactagcaaagcttgccgcggcaatctggtctaccactctgcggtgttgggtatatccgacctaatgtcgcagcgtaattgctctaaagacggtcctaccagctcaaccaacccagaagtgacccatgacccctgcaactaccatagccatgccggggctagggaacaccgtcgcggagatcaaaatcctccatcttatttattctgcggtctgttcggagacccccatcttagaaccttcaaagataactttcagacatgcaaagttgaaggtgcctggccactcatagacaataactatttgagtgtgcaagttacaaacgtgcctgtggtgccaggttccagcgcaactgcaactaacaagatcacaatcatatttaaagcccaccacgagtgcacggaccaaaaagtgtaccaggctgtgactgacgatctacccgctgcctttgtggatggcaccactagcgggggagattcagacgcaaagtcactgagaatcgttgaacgggaatccggccattacgtcgagatgcacgctcggtatattggcaccacggtattcgtgcggcaggtaggtcgctatctgaccctagccatcaggatgcctgaggacctggctatgtcctacgaagaatctcaggacctgcagctgtgcgttaatggttgtcctctgtcggaaaggatagatgatggccagggccaggtttccgctattctcgggcattcactgcctcgcacgtccctggtccaagcttggcccgggtacacacttgagactgctaatacacagtgtcatgagaagatgcctgtaaaggacatttacttccagagctgcgtattcgatctacttacgaccggggacgccaacttcacagccgccgcccacagtgctttggaggacgtcgaagccctgcacccgcgtaaggagagatggcatatctttccgtcctctggcaacgggacacctagaggtggatctgatcttagcgtttctttaggtttgacttgtcttattctcattgtatttctctag

SEQ ID NO: 203215 - DNA, 1176 bp, synthetic construct
  misc_feature 1..1176: note = Description of Artificial Sequence: Synthetic coding sequence
  source 1..1176: mol_type = other DNA
atgatcgaggtggtggccgagctgagccggggccccgtgttcctggctggcgaagccctagagtgcgttgtcactgtgaccaatcccctgcccccgactgcaacatcagctagcagcgaggcactggcctgggcgagtgctcagatccactgccagtttcacgcaagtgagagccgggttgccctaccgccgcctgacagctctcagccagacgttcaacccgatagccagaccgtctttctgccccataggggtgagagaggacaatgcatcttgagcacccctcccaagattctgttttgtgacctccgcctggatccaggggaaagcaagtcctatagttattctgaggtgctacctattgaggggccaccgtctttccgtggccaatccgtcaagtatgtttataagctgacaattggttgccaacgtgttaactcccctattaccctgttgagagtgcctcttagggtcttggtgctaaccggtctgcaggacgtgcgcttccctcaggatgaggcagttgccccttcttctcccttcctggaagaggatgaagggggaaagaaggactcgtggctggccgagctcgctggggagaggctgatggccgccaccagctgtcggtcactccatttgtacaacatctccgacggccgggggaaagtaggaacttttgggatctttaagtccgtttataggctgggcgaggacgtggtgggcaccctgaatctgggggagggcactgtcgcgtgcctgcaattttccgtctccctgcagaccgaggagcgcgtccagcccgaataccagcggcgacggggtgccggaggagtgccttccgtttctcacgtgactcacgctagacaccaagagtcctgccttcacactacacggacttccttttctctgccaatccccttgtctagcaccccagggttttgcaccgccattgtttccctaaaatggaggctacactttgagtttgtgacttcccgggaaccggggttggttcttttgccaccagtcgaacagcccgagcctaccacctggactggacccgagcaggtgcctgtggatactttctcatgggatctgcccattaaggtgctgccaactagtcctacattagctagttacgctgctcccgggccaagtacatcgactatcaccatctag

SEQ ID NO: 203216 - DNA, 1296 bp, synthetic construct
  misc_feature 1..1296: note = Description of Artificial Sequence: Synthetic coding sequence
  source 1..1296: mol_type = other DNA
atgacccgggccctgagcggcctggcctgccgggccctgcccgccgggcgtgattctgcagaggggctcggcgtgccaatcccaagtgtggactatgcacgttccgacagcggggcagctatgatagaagttgtggccgagctctcccgcggccccgtgttccttgctggggaagccctcgagtgcgtggtaacagttactaaccccttacctccgactgccacctcagcgagctcagaagccctagcgtgggcctctgcgcagattcactgccagtttcatgcttcagaaagcagagtcgccctccccccacccgattcttcccagcccgacgtgcaacctgactcccagactgtctttttgcctcaccggggtgaacgggggcaatgtattctctccacaccaccaaaaatcctgttctgtgacctaaggctcgaccctggagagtccaaatcctattcttacagcgaagtcctgccaatcgagggcccaccgagcttccgagggcagagcgtcaagtacgtgtataagcttacaatcgggtgtcaacgtgttaatagtcccatcacactccttcgggtacctctccgggttttagtgctcacgggattgcaggatgtgcgatttccgcaggatgaggcggtggctccaagttccccattcctggaggaagacgaaggcggaaaaaaagattcctggttggcggagctggcaggcgagcgcctcatggcagctacatcttgccgctccctgcacctctataacatctccgacggtcggggcaaagttgggactttcggcatattcaagagcgtttatcgacttggtgaggatgtagtcggcacactgaacctcggagaaggaacggtcgcgtgcctgcagtttagcgtatctcttcagaccgaagaacgggtccagcccgagtaccagaggcggagaggggcgggtggcgtcccgtccgtctcccatgtgacgcatgcaaggcatcaggaatcctgtctccacacgacaaggacttctttctccctccccatccccctttcctctactcctgggttttgcacagcaattgtctccttgaagtggcgccttcactttgagtttgtgacgtcgagggagccaggactggttttgcttcctcccgtggaacagccagagccgactacgtggactggcccagagcaggtcccagtggacaccttcagctgggacctcccgattaaagttctgcctacatctccgacattagcgtcttacgccgcccctggcccatccacatcgactattactatttag

SEQ ID NO: 203217 - DNA, 1119 bp, synthetic construct
  misc_feature 1..1119: note = Description of Artificial Sequence: Synthetic coding sequence
  source 1..1119: mol_type = other DNA
atgagcagcaagtacccccggagcgtgcggcggtgcctgcccctgtgcgccctgacccttgaggccgccctgatcctcctgttctactttttcacacattatgacgcgtccttagaagatcaaaagggtttggtcgcctcttaccaagtgggccaagacctgaccgttatggccgcgttggggttgggctttctgactagtaacttccggcgccattcctggagctctgtggcatttaacttgtttatgttggccctgggggtccagtgggccatcctgctggacggctttctgagtcaatttccccccgggaaggtggtgataaccctctttagcatcaggcttgccactatgtccgccatgtctgttctgatcagtgccggagcagtgctgggtaaggttaaccttgcacaattagtagtgatggttttggtcgaggtgacggcactaggaacactaaggatggtgatttctaatattttcaacacggattaccacatgaacctgcgtcacttctacgtgtttgctgcctacttcgggctgacagtagcatggtgtctgccaaagccgctccccaaggggacagaggataatgatcagcgggctaccattcccagcctctccgctatgctgggggccctcttcttgtggatgttttggccatccgtgaactcggcgttactccgctccccaatccagcgtaagaatgccatgttcaatacttattatgctctcgccgtatctgtagtcacggccatctccgggtcttctcttgctcaccctcagcggaagatcagcatgacctacgtccattccgccgtccttgcaggcggtgttgctgtgggcaccagctgccacctcatcccatccccatggctggcaatggtgcttgggctggtggctggtctgattagtatcgggggagctaaatgcctcccagtgtgctgcaacagggtcctggggatacaccatatcagcgtcatgcatagtatcttctccctgctgggactcctcggagaaatcacctacattgtgctgctggtcttacatacagtatggaacggaaatggtatgtttgctcctaagtcacagaatatggagtccacctcgtgcgggtag

SEQ ID NO: 203218 - DNA, 1254 bp, synthetic construct
  misc_feature 1..1254: note = Description of Artificial Sequence: Synthetic coding sequence
  source 1..1254: mol_type = other DNA
atgagcagcaagtacccccggagcgtgcggcggtgcctgcccctgtgtgcactcacgctcgaggccgccctgatactacttttttacttcttcacccactacgacgcttctctcgaggatcagaagggactagttgcaagctaccaagtgggccaggatctgacagtaatggctgccctgggactgggttttctgacatcaaatttccggcggcactcctggagttccgtggcattcaacctgtttatgctggctctgggggtgcagtgggcaatcttgctggatgggtttctcagccaattccctcccgggaaggtcgtcatcaccctgttttctatccggttggcaacaatgagcgctatgtcagtgctcatcagcgcaggggccgttctagggaaggtcaacctggctcaactcgttgtgatggtcctggtagaagtcacagccctggggacccttaggatggtcatatccaatatcttcaacacagactaccacatgaacttgcgtcatttttatgtttttgcagcctactttggtttgacggtcgcctggtgcctgcctaagccattaccgaaggggaccgaagataatgaccaacgggctacaataccaagcctctccgccatgcttggggcactatttctttggatgttttggccttcagtaaactcagccctgctgcggtcgcctatccaacgcaaaaatgctatgtttaacacatattacgcgctcgccgtgtctgtggtgacggctatttcagggagctcactggcacaccctcaacggaaaatctctatgacatacgtccattccgccgtgctagcaggaggcgtcgctgtcggtaccagttgccacttaatcccatcaccttggctggccatggtcctggggttagtggctggactcatttctatcgggggtgccaaatgcctccccgtctgctgcaatagagtactggggattcaccatatcagcgttatgcatagtatcttctcccttttgggcctgctgggcgagattacttacatcgtgctgctcgtgctacacaccgtgtggaacggaaacggcatgatcggtttccaggtgctgctcagtataggggagctttcactagcaatcgttattgccctgaccagcggtctactcaccggccttctcctgaaccttaagatttggaaggcccctcacgtcgccaaatatttcgacgaccaggtgttttggaaatttcctcatctggccgtcggtttttag

SEQ ID NO: 203219 - DNA, 804 bp, synthetic construct
  misc_feature 1..804: note = Description of Artificial Sequence: Synthetic coding sequence
  source 1..804: mol_type = other DNA
atgagcagcaagtacccccggagcgtgcggcggtgcctgcccctgtgtgccctcaccctggaggccgcactcatcttgttgttctacttttttacccactatgatgcctcactggaggaccaaaaggggctggttgcaagttatcaggtgggccaggacctgaccgtaatggcagcactgggtctgggctttctgacctctaacttccggaggcactcatggagttctgtcgccttcaatctttttatgctcgccctgggagtgcaatgggctatactgttggatggattcctaagtcagttcccccccggtaaagtagtcattaccctgttttcgatacggctagcgacgatgtcggcaatgtctgtgctaatctccgccggcgcagtgctcggcaaagtgaacctggcccagctggtggtgatggtgctggtggaggtcacagcattagggactctgcgtatggtcattagcaatatattcaatacatacgtacatagcgctgtactggctggtggagtggctgtgggcacttcctgtcacctcatcccatcaccatggcttgccatggtgttaggacttgtggccggtctgatttctatcggaggtgccaagtgtttgcctgtgtgctgtaatcgggtgctgggcatccaccatataagtgtgatgcactccattttttctctccttgggctgttgggtgagatcacctatatagtcctactcgtgctgcataccgtttggaacggcaacggcatgttcgcacctaagagtcagaacatggagagtacttcctgcggttag

SEQ ID NO: 203220 - DNA, 801 bp, synthetic construct
  misc_feature 1..801: note = Description of Artificial Sequence: Synthetic coding sequence
  source 1..801: mol_type = other DNA
atgagcagcaagtacccccggagcgtgcggcggtgcctgcccctgtgcgctcttactctcgaggcggccctgatactgctgttctatttctttacgcactacgatgcgtcactcgaggaccagaagggcctggtggctagttaccaagtggggcaagatctcactgtaatggctgccctgggcctggggttcctcacatcgaatttccggcgtcactcctggtcatccgtcgcttttaacttgttcatgctggcattgggtgtgcaatgggctattctgctggatgggtttctgagtcaattcccccccgggaaggtcgtgattaccctgttcagtatacgcctggccaccatgagcgccatgagtgtattgatcagcgctggtgcggttctggggaaggttaacctggctcaactcgttgttatggtcctggtggaagtgacggccctgggaaccctgagaatggtcatctctaatatctttaacgtatgttgcaatagggtgcttggtatccaccatattagcgtcatgcattccattttctccctgcttggcctgctgggggaaattacgtatattgttttgctagttcttcataccgtgtggaacgggaacgggatgataggattccaggtgttactgtctatcggggaactgagcttggctattgtgatcgcgctgacctcaggtttgttgactggcctcctgcttaacttgaagatttggaaagcccctcatgtggctaagtacttcgatgatcaagtcttttggaagtttccacatctggctgttggcttctag

SEQ ID NO: 203221 - DNA, 1206 bp, synthetic construct
  misc_feature 1..1206: note = Description of Artificial Sequence: Synthetic coding sequence
  source 1..1206: mol_type = other DNA
atgtacttcatcaaccagcggctgttcctgcggctgtggcgggtgcccgtgatgcgggccagtcactgttatcagagtcagggctggcggcccgtggctgtcggccaggatcttacagtaatggcagccttgggactgggttttctgactagcaatttccggagacattcttggtccagcgtggcatttaatctgtttatgctcgcgttaggagtgcagtgggctatcctgctcgacggctttctgtcccagttcccacctggcaaggtagtcatcaccctctttagcatccgacttgctaccatgagtgccatgtcggtgctgatcagcgccggtgctgtcttaggaaaggttaatttggcccagctggtggtaatggtcttagttgaggtgaccgccctcggaaccctgcgtatggttatttctaacatatttaacactgactatcatatgaacctgcggcacttttacgtgtttgctgcttactttgggctgacagttgcatggtgcttacctaaacctctccccaaagggaccgaggacaacgaccaacgggcaaccatcccttctctgtcggctatgctaggtgctttgttcctttggatgttctggccgtccgttaattctgcactgctcaggtcgccaatacagcggaaaaacgctatgttcaatacatactacgccctggctgtcagcgtggtcaccgccatctccggcagttctctggcccacccacagcgaaagatcagtatgacctatgtacacagtgccgtactggctggaggtgtagccgtcggcacatcctgtcatctgatacctagcccttggctagctatggttctggggttagtagccggactcatctcgatcgggggggccaagtgtctgccagtctgctgcaaccgagtgcttggtatccaccatatcagcgtcatgcatagcattttctccctgctgggcctgctgggggaaatcacatatattgtgcttctggtgctgcacactgtatggaacgggaacggtatgatcggcttccaggtcctgctctcgatcggcgaactttccttggccatagtgattgccctgacgtccggtctgctcaccggactgctgctgaatcttaagatctggaaggccccccacgttgctaagtatttcgacgaccaggtgttttggaagtttccccaccttgctgtgggcttctag

SEQ ID NO: 203222 - DNA, 1065 bp, synthetic construct
  misc_feature 1..1065: note = Description of Artificial Sequence: Synthetic coding sequence
  source 1..1065: mol_type = other DNA
atgagcagcaagtacccccggagcgtgcggcggtgcctgcccctgtgcgccctcactctggaagccgcactaatcctgctgttctacttcttcacccattacgatgccagtctggaggatcagaaaggccttgttgcttcttatcaggtcggccaagaccttaccgtcatggcagccctgggtttggggtttttgactagtaacttccggagacatagttggagctctgtggcattcaacctttttatgctggccctgggcgtgcagtgggcaatactcctagacgggtttctgtctcagtttccaccagggaaggtggtgataacactcttctccatcagacttgcaactatgtccgccatgagcgtattgattagcgccggagccgtcttgggcaaggtgaatctcgctcagctcgtggtaatggtcctcgtggaggtgactgccctgggcacgctgcggatggtcatttccaatatattcaacacggactaccacatgaacctccgacatttttatgtttttgccgcatatttcggactgacagtcgcttggtgtctccctaaaccattgcctaaaggaacagaggataacgatcagagggcaacgatcccctctttgtccgcaatgctcggggctctgttcctctggatgttttggccaagcgtcaacagcgctctgcttcggagccctattcagagaaaaaacgcaatgttcaacacctactacgcccttgccgttagcgtggttactgcgatctctggttcaagcctggcccatccacaacgaaaaatcagtatgacttatgtacatagcgcagttttggctggaggagtggctgtaggcaccagctgccatctgatccctagtccatggctggcaatggttttaggccttgtggccgggctgattagtatcggcggagctaaatgcctgccagactggctccccggccccccccaacattggggcacacaactggggcatcgggacagcagccacgtgtggtctcctgataggttcgcacctaaatcacaaaatatggagtcaaccagctgcgggtag

SEQ ID NO: 203223 - DNA, 1206 bp, synthetic construct
  misc_feature 1..1206: note = Description of Artificial Sequence: Synthetic coding sequence
  source 1..1206: mol_type = other DNA
atgtacttcatcaaccagcggctgttcctgcggctgtggcgggtgcctgttatgcgggcctcacactgttaccaaagccagggctggcgacctgtggcagttggacaggacctaactgtgatggctgctttaggcctgggatttctgacatccaatttcaggagacattcttggtcctcagtcgcttttaacctctttatgctcgcactgggtgtgcagtgggctatactgttggatgggttcctgtcacagtttccccccgggaaagtcgtaataacgctgtttagcatccgccttgcaacgatgtcagccatgagtgttttgatttccgcgggagccgttcttgggaaagtgaatctagcacagttggtggtaatggtcttggttgaggtcaccgcccttgggacccttaggatggtcatatctaatatctttaacactgattaccacatgaaccttcggcacttttacgtcttcgccgcctacttcggtttgacagtggcttggtgcctgccaaaaccactgcctaaaggaacagaggataacgatcagagggctactatcccaagtctttctgccatgctcggcgcattgttcctctggatgttttggccttccgtcaattcagcccttttgagatccccgatccagcggaagaatgcaatgtttaacacctactacgccctcgctgtgtcagtggtgaccgcgattagtggctcttctctggctcatccccagcgtaagatctccatgacatatgtccattcagccgttctggccggcggagtcgctgtgggaaccagctgccatctcataccctcaccctggctcgccatggtgttggggctggttgccggcttaatttccatcggtggggcaaaatgcctgcctgtctgttgcaacagagtgctcgggatccaccacatctccgtgatgcacagcatcttcagcctgctcggcctgctgggagaaatcacatacatagtgctgctcgtgttacataccgtttggaacggcaacgggatgattggattccaggtgctgctgagcattggcgagctaagccttgcaatcgtcatagcactgacgagcggtctcctgactgggcttctgctcaacttgaaaatctggaaggcgccacacgtggcgaagtactttgacgaccaggtattctggaagtttcctcatctcgcggtggggttttag

SEQ ID NO: 203224 - DNA, 1191 bp, synthetic construct
  misc_feature 1..1191: note = Description of Artificial Sequence: Synthetic coding sequence
  source 1..1191: mol_type = other DNA
atgagcagcaagtacccccggagcgtgcggcggtgcctgcccctgtgcgcccttactcttgaggctgccctcatcctactgttttactttttcacccactacgatgcatccctcgaagaccagaaagggctcgtcgcctcttatcaagtgggacaagacctgaccgtgatggctgcactgggccttggattcttgacttcgaatttcagaagacattcttggtcgagcgtagcattcaacctctttatgctggcactgggggttcagtgggccatccttctcgacggatttttgtcccagttcccgcctggtaaagtggttattactctcttctctatccggctggcaactatgagcgccatgtccgtactcatctcagcaggcgccgttctgggcaaagtgaacctggcccagctggtggttatggtcctggtggaagtgaccgctctgggaacgctaaggatggtgatttcaaacatcttcaatacagactaccacatgaaccttcgccatttctacgtcttcgccgcgtattttggtcttacagtggcatggtgcttgccaaagcctctgccaaagggaacggaggacaacgaccaaagggccacaatcccgtccctatctgccatgctcggcgccttgtttttatggatgttctggcccagcgtgaatagcgccttgcttagatcaccaattcagaggaaaaatgcgatgttcaacacgtattacgccttagcagtatccgttgtcacagcgatctcagggtcatcccttgctcacccccagcgtaaaatctccatgacatatgtgcacagcgcagtgttagcaggaggagtggctgtcggcacctcatgccacctcattccctccccctggttggccatggtgctcggccttgtggccggactgatcagcatcggcggtgccaagtgtctgccggtctgctgcaatcgggtgctcggtatccaccatatcagcgtgatgcattctatttttagtctgttgggtctgctcggtgaaatcacctacattgttctgctggttctgcacacagtgtggaatggcaatggaatcttcttgatctggctgcttgatttcaagcagaagcaccctcggaaaacgaggccggtgcaaaagcaggataacttcctttcgctgttaccagcttttgtacgagagaagcggtcgtag

SEQ ID NO: 203225 - DNA, 927 bp, synthetic construct
  misc_feature 1..927: note = Description of Artificial Sequence: Synthetic coding sequence
  source 1..927: mol_type = other DNA
atgagcagcaagtacccccggagcgtgcggcggtgcctgcccctgtgcgctttaactctggaggcagcccttatcctcttattttacttcttcacccattatgacgcctccttggaggatcagaaaggcctcgtcgcgtcgtaccaggtgggccaggatctgacagtgatggccgctctgggactcggcttcttgaccagcaatttcagacgtcactcctggagctccgttgccttcaatctgtttatgctggcgctgggagtgcaatgggccatccttcttgacggattcctcagccagtttccccctggaaaagtggttattacacttttctccatcaggctggccacgatgagtgcaatgtctgttcttatctccgctggggcagtccttgggaaggtcaacctggctcagctggtcgtgatggtcttggttgaggtgaccgcactgggaaccctacgcatggtcataagcaatatctttaacactgactatcatatgaatctccggcatttctatgtctttgccgcctatttcggtttgaccgtggcctggtgccttcctaaaccactgccaaaaggcacagaggataatgaccagcgtgctacaattccttccctcagtgccatgctgggagctttgttcctgtggatgttttggccctccgtgaattccgccctactgaggagccctatacagagaaagaacgccatgtttaacacctactacgccctggccgtctccgttgtgacagccatttctgggtcctccctcgcgcacccacagcgtaagatcagcatggattggctgccaggaccaccccaacactggggaacacaactgggtcatcgtgattcatcacacgtttggagccctgataggtttgcccccaaaagtcagaatatggaaagcacatcctgcggctag

SEQ ID NO: 203226 - DNA, 1197 bp, synthetic construct
  misc_feature 1..1197: note = Description of Artificial Sequence: Synthetic coding sequence
  source 1..1197: mol_type = other DNA
atgagcagcaagtacccccggagcgtgcggcggtgcctgcccctgtgcgccctaacgctcgaggctgctctgattctgttgttttacttttttacacactacgacgcttcactggaagatcaaaagggactcgtggctagttaccaggttggccaagatctcactgtcatggcagcccttggactgggctttctgacatcaaactttcgacggcactcatggagctccgtggcgttcaatctattcatgctcgctctcggcgttcagtgggccattctcttggatggctttctcagtcaatttcccccaggcaaagttgttatcacgctgttcagcatccggcttgccaccatgtccgccatgagcgtgctaatctcggccggtgcagtactaggcaaggtcaatctggcccagctcgttgtcatggtgctagtggaggtgactgccctcggcacacttcgtatggtgatctccaacatctttaataccgactatcacatgaacctgaggcatttctacgtctttgcagcctatttcggcttgacagtagcatggtgcttacctaaaccactgcctaagggtacagaggacaacgaccagagagccactattccttctctttctgccatgctgggagcactgtttctctggatgttctggccaagcgtaaatagcgcgttgctgcgatcgcccatccagaggaagaatgctatgtttaatacttattacgccctcgccgtttccgttgttactgccattagcggatcatcattagctcacccgcagcggaagatcagcatgacctacgtccacagtgccgtcctggcgggcggcgttgccgtggggacatcttgtcatctgattcctagcccatggctcgccatggtgctagggctcgtggcagggctgatctccatcggcggagctaaatgcttgcccgtgtgttgtaacagagtgctcggaatccctcacctgaggcacgcactgcacctgcagcttgccggttccgcttggagggaccatctacactgtgccgccggtgcatcttactgtctggaaagacaatggcacgactggctgcccggtccgcctcagcactggggcactcagctggggcatcgtgattctagccacgtgtggagcccagaccgatttgcccctaagtctcagaatatggagagtacctcttgtgggtag

SEQ ID NO: 203227 - DNA, 939 bp, synthetic construct
  misc_feature 1..939: note = Description of Artificial Sequence: Synthetic coding sequence
  source 1..939: mol_type = other DNA
atgagcagcaagtacccccggagcgtgcggcggtgcctgcccctgtgtgccctgacgcttgaagctgcactgatcctccttttctactttttcacccattatgatgcatctctggaagaccagaaggggctagtggcctcgtaccaggtcgggcaagaccttacagtcatggccgcattggggctgggctttttgacaagcaatttccgcagacattcttggagcagcgtggcgttcaatctgttcatgctggctctgggagtacagtgggcaatcctgttggacggtttcttatcgcagtttccgccaggaaaagtggtcattacgctgtttagtatcagattggcaacaatgtcagcaatgagtgtgcttataagtgccggagctgttctcggtaaagtaaacctcgctcagctcgtggtgatggtgctggtcgaggtgactgctttgggcactctcaggatggtgataagcaatattttcaacacatatgtccatagcgccgtcttggccgggggtgtggcggtgggcacgagctgccacctgatccccagcccatggctggccatggttctaggactggttgcaggcctgatttcaattggcggcgccaagtgtctgcctgtatgttgtaatagggtacttggcatccaccatatctccgtgatgcactctattttttccttgctaggcttattaggggagataacatacatagtgttgctagtcctccacactgtgtggaacgggaacggcatgatcggcttccaagttttattaagcattggggagctctctctagcaattgttatagctctcacctctggccttctgactggactgttattgaacctgaagatctggaaggccccccacgttgccaaatatttcgatgatcaagtgttttggaagtttccacacttagcagtgggtttttag

SEQ ID NO: 203228 - DNA, 1041 bp, synthetic construct
  misc_feature 1..1041: note = Description of Artificial Sequence: Synthetic coding sequence
  source 1..1041: mol_type = other DNA
atgagcagcaagtacccccggagcgtgcggcggtgcctgcccctgtgcgcgctgactctggaggccgcattaatcttgctcttctactttttcacacactatgacgcaagcctggaggatcagaaaggcttggtggctagctaccaggtcgggcaggaccttacagtcatggcggctctcggcttaggattcctgacctccaacttccggcgccacagttggtcttctgtagcgttcaacctcttcatgttggccctgggcgtccaatgggctatcctcttggacggatttttgtctcagtttccacccggcaaggtagtaataactcttttttctatacgactggccaccatgagcgcaatgtcagtgctaatcagcgcaggagcagtgctcggcaaagtgaacttagcccagttggtcgtaatggtcctggttgaagtgacagcactgggaactctcagaatggtgattagtaatatatttaaccctagtgtgaacagcgccctgcttcgctcccctatccagaggaaaaatgccatgtttaacacatactatgctctggcagtgagcgtcgtcactgctattagcggaagttctctggctcacccgcagcgcaagatttctatgacgtacgtgcactcagctgttctcgctggtggagtggcagttggaacctcatgccacctgatcccatctccatggctggcaatggttttaggccttgtcgtctgctgtaatcgcgtgcttggcattcatcacatctccgttatgcactctattttctccctattgggacttttgggcgaaatcacctacatcgtgctgctggttttacatacagtatggaatggtaacggtatgatcggctttcaggtgctgctgagcattggtgaacttagcctggccatcgtgatcgcgctaacttccggattattaaccggcttgttgcttaacctgaagatctggaaagcgcctcatgtagccaagtattttgatgatcaggttttctggaaattccctcatttggcagttggattctag

SEQ ID NO: 203229 - DNA, 1254 bp, synthetic construct
  misc_feature 1..1254: note = Description of Artificial Sequence: Synthetic coding sequence
  source 1..1254: mol_type = other DNA
atgagcagcaagtacccccggagcgtgcggcggtgcctgcccctgtgggcactgacacttgaggctgcactgatcctgctgttttacttcttcacacactacgacgccagcttagaggatcaaaaaggattagtggcatcctatcaggtggggcaagacttgacagtgatggctgcgatcgggttgggatttctcacctcttccttccggagacactcctggtcatcggtcgccttcaacctcttcatgctagccttgggagtccagtgggccattctgctcgatggtttcttgagccaatttccctccggcaaagtggttataactcttttcagcattcggcttgctaccatgagcgctctgtccgtgctcatcagcgtagacgctgtgctggggaaagttaacctagcccaactcgtagtgatggtcctggtggaggtcaccgccctaggcaatctacgcatggtcatatctaatatatttaacactgattatcacatgaacatgatgcacatctacgtgtttgctgcttactttggactgtccgtcgcatggtgtttgcccaagcctctccccgagggtaccgaggataaggatcagaccgccacgattccttctttaagtgcaatgttgggtgctttgttcctgtggatgttctggcctagctttaacagcgcgctcctacgaagccccatcgagcgcaagaacgcggtgtttaatacctactacgctgttgccgtctcagtggttacggcaatttcaggctcgagcttagctcatcctcaggggaaaatctcaaagacgtacgtgcattccgccgtgctggcaggcggcgtggcagtgggtacttcctgccatcttataccctcaccctggctcgcaatggtgctgggactggttgcagggttaatatctgttgggggggccaagtatttacctggatgctgcaatcgtgtcctcggaatcccacattcttcaatcatggggtataatttctcactgctggggttgctgggcgagatcatttacatcgttcttctggtgctggatacagtcggagcaggcaacggaatgattggattccaggtgctgctgtctatcggagagctcagcctcgcaattgtcatagctctaatgtctggcctgctcaccggacttctgctgaacctgaagatatggaaagcacctcatgaagccaaatacttcgacgaccaggtcttctggaagtttccccatctggcagtgggtttttag

SEQ ID NO: 203230 - DNA, 1482 bp, synthetic construct
  misc_feature 1..1482: note = Description of Artificial Sequence: Synthetic coding sequence
  source 1..1482: mol_type = other DNA
atgagcagcaagtacccccggagcgtgcggcggtgcctgcccctgtgggcactcactcttgaagccgccttgattcttttattttatttctttactcactacgacgccagtcttgaagaccagaaggggctggtcgccagctatcaagtgggacaagacctcactgtcatggccgctataggcctgggcttcctaacctcaagcttccgccgacatagttggagtagtgttgctttcaacctcttcatgctcgctctcggcgttcaatgggctatactcttagacggatttctgtcacagtttcctagcggcaaggtggtaatcaccttgttctccataaggctagccaccatgtcagccctcagcgtgttgatttcagtggacgctgtcctcggaaaagttaacctggctcaactggtagtaatggtactagtcgaggttactgcactcggcaacctgcggatggttatctccaacatcttcaatacagactaccacatgaatatgatgcatatctatgtgtttgccgcatatttcggactttccgtggcatggtgtctgccgaaacctctccccgaaggcacagaagacaaggaccaaacagccaccatacctagtctatccgccatgctgggggcactgttcctatggatgttctggccatctttcaatagcgcgctgctaaggtctccaattgaaagaaaaaacgcggtgttcaacacatattacgcggtagcggtttccgtggtgacagccatctccggtagctctcttgcacacccgcagggcaaaatttcaaagacctacgtccactctgctgtgcttgcgggcggagttgcagtggggacttcatgtcacctgatcccatctccttggctggctatggtgctcggtctggtggccggtttgatcagtgtgggtggagctaagtatctgcctggctgttgcaaccgagtgcttggcattccccactcgagcatcatgggatataacttcagcctgctcggtctgctgggtgagattatctatatcgtgttactggtgttggacactgtgggcgctggcaacgggatgagcctcggatggaacttggctgttaagatggctgaagccggagacgaggaattaatgcgacttgacgtttcacagagaaatcatggcggagcagctgtgcccactggaagttggatgccgagcacagaaacgacgattgctcctaattatagagaccatattagcgtggtcagttcttttggctgctggatattgtctaagtctatccaggagaagcagggactgttcaaaaataaaacaacctcttcacactgttgcctgcatctctatgtgcgaaacgcgcatgattcgaaggtgtccaacgttagggctgggacaggcgtccgcgagaacggagtcgaatcctttctgtgccactcattaagacgtatttctccttttatcatgcactgccgcatccaacaatag

SEQ ID NO: 203231 - DNA, 1191 bp, synthetic construct
  misc_feature 1..1191: note = Description of Artificial Sequence: Synthetic coding sequence
  source 1..1191: mol_type = other DNA
atgagcagcaagtacccccggagcgtgcggcggtgcctgcccctgtgggccttgacgctggaggccgcactgatcctgctcttttatttttttacacactatgacgcaagtttggaagaccagaaaggcctagttgcctcataccaagtaggccaggatttgactgtcatggcagcgataggactggggtttctgacctcttctttccgccggcacagctggagcagcgtcgccttcaatctgttcatgctggcgcttggtgtccaatgggccatcctgctagacggtttcctcagccagtttccatctggaaaggttgtcattacattgttttccatacgcctcgctacgatgtccgctctctccgtgcttatcagcgtggacgccgtcctgggaaaagtgaatctggcccaactggtggtcatggttttggtggaagtcacagcactgggaaatctgcggatggttatctccaacatattcaacaccgattatcacatgaacatgatgcacatctatgtctttgcagcatatttcgggctcagtgtggcatggtgcttacccaaacccttgcctgaaggaaccgaagacaaagatcagactgctactattccttcactgtctgcaatgctaggcgctcttttcctgtggatgttctggccctcattcaactccgctttactccgcagtcctattgaacggaagaatgccgtattcaacacgtactacgccgtggccgtgtccgtggtgacagccatctcgggatcctccctggcgcacccgcaaggaaagatttccaagacatacgttcatagcgccgtgctcgccggtggggtggcagtgggaacttcttgccatttgatccccagcccctggctcgcaatggtgttgggactggtagcaggcctgatctctgttggtggcgcgaagtaccttcccggctgctgtaaccgcgtgttgggtatcccccactctagtataatgggatataacttttccctcctggggctccttggggaaattatttatatagtgttgctggtgctggataccgtcggtgctggaaacggcatcttcctgatttggctgttagacttcaaacagaaacacccgagaaagacccgacccgttcagaagcaggataactttctgtcactgcttccggccttcgttagggaaaagcggtcttag

SEQ ID NO: 203232 - DNA, 1137 bp, synthetic construct
  misc_feature 1..1137: note = Description of Artificial Sequence: Synthetic coding sequence
  source 1..1137: mol_type = other DNA
atgagcagcaagtacccccggagcgtgcggcggtgcctgcccctgtgggccctcactcttgaagcagctctcatcctgctgttctatttcttcacgcactacgatgcatctctggaggatcaaaaaggcctggtagcatcctatcaggtagggcaggacctgactgttatggcagctatcggtctcggcttccttacttcaagctttcgccggcacagctggagctccgtcgcttttaatctgtttatgctcgcgctgggggtgcagtgggccattttactggatggatttctctcccagttcccttctgggaaggtggtgatcacactgttcagtataaggctggctaccatgtcagcactgtcagtgcttatctccgtcgatgcagtactcggaaaggtgaacctagcgcagttggttgtaatggtgcttgtcgaagttacagcccttggtaacctgaggatggtgatttcaaatatttttaacacggactaccacatgaacatgatgcacatctacgttttcgccgcgtatttcggattaagcgtggcgtggtgcctgccaaagccgttaccagaggggactgaagacaaggatcagaccgctaccattccctcactctcagctatgctgggcgcacttttcctctggatgttttggccaagcttcaacagcgcactgcttcgctcgccaatcgaacgcaagaacgctgtgtttaacacttactatgctgtggcagtatccgttgtgacggctataagtggcagttcgctggctcacccccagggtaagatctccaaaacatatgtgcactccgccgtactagctggcggagtggcggtaggcaccagttgtcaccttatccccagtccatggctggcgatggtgcttggccttgttgccggtttgatctcagtgggcggagccaagtatctcccggattggctgcctgggcctccacagcattggggcactcaactgggccaccgggactcaagtcacgtatggtctccagacagtttcttaatctggctgttggatttcaagcagaagcatcctaggaagaccagaccagtgcagaagcaagataacttcctgtctctcctgcccgctttcgttcgagagaagcgctcttag

SEQ ID NO: 203233 - DNA, 1464 bp, synthetic construct
  misc_feature 1..1464: note = Description of Artificial Sequence: Synthetic coding sequence
  source 1..1464: mol_type = other DNA
atgagcagcaagtacccccggagcgtgcggcggtgcctgcccctgtgggcactgacactggaggcggcattgatcctgcttttctattttttcacacactacgatgcatcgctcgaagaccaaaagggcttggtggcatcctaccaggtcggccaggatctgactgttatggctgccatcggtttagggtttctcaccagctcttttagaagacatagttggagctccgttgcgttcaacctgttcatgcttgcactgggagtgcagtgggctatcttactcgacggttttctttcccaattccccagtgggaaagtggtcatcacattgttttcgatccgtttggctactatgtctgcactgtcggtcctgatctctgtggatgcagtcctcggcaaagttaaccttgcacaattggtagtcatggttctggtagaagtcactgcactgggaaatctgcggatggtgatcagcaacatattcaatacagactatcacatgaatatgatgcacatctacgtgtttgccgcctactttggtttgtccgtggcctggtgtctaccgaaaccactgccagagggcaccgaggacaaggaccaaaccgccacaatccctagtcttagtgcaatgttgggggccctctttctgtggatgttttggccctctttcaatagcgccctgctcagaagtccaatcgaaagaaagaacgccgtgtttaatacttactacgcagtggcggtctctgtggtgacagcgatctctgggagcagtctggcacatccccaaggaaagatttcgaaaacatacgtgcacagcgctgtgctggccggcggggtagctgttggcacgtcttgccatctcatccccagcccctggctggctatggtcctgggtctcgtcgctgggttaatttccgttggaggggctaaatacctgcccgggtgctgcaatcgtgtgctgggaatccctcacagcagtatcatgggttataatttcagtcttttaggactccttggcgagattatttacatcgtactcctggtgttggacactgtgggcgcagggaatggaatgattggtttccaggtacttctatcaatcggtgagctcagcctcgctatagtcatagctctgatgtccggactattaacaggactgcttctcaacctgaagatttggaaggccccgcacgaggcaaagtattttgatgatcaggttttctggaaattcccgcacttggccgtgggtttctccaagtctattcaggaaaaacagggcttgtttaaaaacaagacaacatcttcccactgttgccttcacctttatgtacgtaacgctcacgacagtaaggtttcaaatgttcgtgctggaactggagtccgagagaacggggtggaatcttttctgtgtcacagtttacggagaatctctccttttatcatgcattgccgaatccagcaatag

SEQ ID NO: 203234 - DNA, 1296 bp, synthetic construct
  misc_feature 1..1296: note = Description of Artificial Sequence: Synthetic coding sequence
  source 1..1296: mol_type = other DNA
atgagcagcaagtacccccggagcgtgcggcggtgcctgcccctgtgggccttaaccctggaagccgctctgatactcctgttttacttttttactcactacgatgcctcacttgaagatcagaagggattggtagctagctatcaggtaggacaggacctaactgttatggcggctatcggcctggggttcctgacatccagctttaggcgacacagctggagttctgtcgcattcaacctctttatgttagctttaggggtgcagtgggccatcctgcttgacgggtttttatcacaattcccttccggcaaggtcgtgattacactcttcagtatccgtctggctacaatgtcagcgctgtccgtactgattagcgtggacgccgtgctgggtaaggtcaacctcgcacagcttgtggtgatggtattggtggaggtcacagcactgggaaatttgagaatggttatctcaaatatcttcaacaccgactatcacatgaacatgatgcatatttatgtattcgctgcctactttggtctgtcggttgcctggtgccttcccaaaccgctgccagaagggacagaggacaaagaccaaaccgcaaccataccatccttgtccgcgatgctgggcgccctcttcctgtggatgttttggccgagctttaacagcgccttactgcggagtcctatcgagcgtaagaatgccgtgtttaatacttattatgcggtagcagtcagcgttgtcactgctatcagcggctcttcactggcccatccccaaggaaaaatatctaagacgtatgtccacagtgcagtgctggccggaggcgtagccgtgggcacgtcctgtcacctgatcccgtcaccttggctggcgatggtcctgggcctggtggccggactgatctccgtaggcggcgccaaatatctgccaggctgttgcaaccgtgtgctcggcatacctcacagcagcattatgggttacaacttttctctgttgggcctgctcggcgaaattatctacatcgtgctattggtcctcgacactgttggcgctgggaacggcatgagcctgggctggaaccttgccgtgaagatggctgaagctggggacgaagaactcatgagactggatgttagccaaagaaaccacggtggggctgcagttcctactggatcttggatgccatccacagagaccaccattgcgcctaactatagggaccatatctccgtggggcttgcaagcagatcgagcagtgccctcggtaattccgcctggccatcatag

SEQ ID NO: 203235 - DNA, 966 bp, synthetic construct
  misc_feature 1..966: note = Description of Artificial Sequence: Synthetic coding sequence
  source 1..966: mol_type = other DNA
atgagcagcaagtacccccggagcgtgcggcggtgcctgcccctgtgggcccttacactcgaagctgcactgattctcctgttctacttcttcacccattatgatgcatccctggaagaccagaagggcctggtggcctcttaccaggttggacaggatctcactgtgatggcagccataggcttaggctttctcacctcgagttttagacgtcactcctggtcatctgtggcatttaacctctttatgctcgctcttggtgtacagtgggcaatactgcttgatggcttcttatcccagttcccctcgggcaaggtggtaatcactcttttttcaattagactcgcaactatgtcagccctgtctgttctgattagcgttgatgccgtgctcggtaaggtcaacctggcccagctggttgtgatggtactggtggaggtgacagccctaggcaatttgaggatggtcataagcaatatcttcaacaccgattatcacatgaacatgatgcacatatacgtctttgccgcctatttcggacttagtgtcgcctggtgtctaccaaaaccccttcccgagggtacggaggataaagaccagacggccactatcccctcactcagcgctatgctgggtgcgctctttttatggatgttttggccctcattcaacagcgccctgctgaggagccccatagagcgaaagaatgcagtgtttaatacatactacgccgtggccgtcagcgttgttaccgcgatttccggaagcagcctggcccatcctcagggtaaaatatcaaaaacttatgtgcatagcgctgtgttagctggaggcgtggcggtgggtacttcatgtcacttaatcccaagtccatggttggccatggtgctcggattggtcgcagggctaatctcggttggtggtgcaaagtatctgcccttcccccacctcgctgttggattctag

SEQ ID NO: 203236 - DNA, 294 bp, synthetic construct
  misc_feature 1..294: note = Description of Artificial Sequence: Synthetic coding sequence
  source 1..294: mol_type = other DNA
atggccggcagccccagccgggccgccggccggcggctgcagctgccactcctgtgcctctttctccaaggagcaactgcagtgctttttgccgtgtttgttcggtacaatcacaagactgatgcggcactgtggcaccggtcgaatcactctaatgccgataacgaattctactttcgctaccccaacggggtgtcactccttctgccaagattggaatgtaacggcactattagcgcccaccacaatctgtgcctgcctggctctagtgactccccggctagcgtaagttag

SEQ ID NO: 203237 - DNA, 462 bp, synthetic construct
  misc_feature 1..462: note = Description of Artificial Sequence: Synthetic coding sequence
  source 1..462: mol_type = other DNA
atggccggcagccccagccgggccgccggccggcggctgcagctgccccttctttgcctctttcttcaaggagcaaccgccgtgctgtttgccgtgtttgtccggtacaatcacaaaacagacgctgcgctgtggcaccggtcaaatcacagcaatgctgataatgagttttattttcgctaccccaaggagagccacagcgtcgcccaagcgggggtacagaggcgaaacctgggatctttacagccaagcccgccacggttacctggccgcgcatgtcatggcctgagaggactctggctgccacatgggctgcctgccgctttgaggttgcagcagaggggtctgcaccttcctcctggtcggctctgtccggccgtggttcacactgggccgggtctgagtccattattgcctagatggccccatccttgttggaggggggagcacgaccagtgctag

SEQ ID NO: 203238 - DNA, 1119 bp, synthetic construct
  misc_feature 1..1119: note = Description of Artificial Sequence: Synthetic coding sequence
  source 1..1119: mol_type = other DNA
atggtgttcgtgggcttcggcttcctgatggtgttcctgcagcggtatggttttagcagcgttgggtttacttttttacttgctgcattcgcgctccagtggtctacgcttgtccagggatttctgcactcctttcacgggggtcatattcacgtgggcgtcgaatctatgatcaatgctgatttctgcgccggtgcagtgctgatctcattcggagcagttctgggtaaaactggccccacccagttattgctcatggccttgctcgaggtggttctgtttggaattaatgaatttgttctgctccacttattgggagtcagagacgccggaggttctatgacaattcatacctttggtgcttattttgggctggtgttgtctagagtgctgtaccgtccacagcttgaaaaatccaaacacagacagggcagcgtttatcatagcgacctcttcgcgatgatcgggacaatattcctgtggatcttttggcctagctttaatgcggcgctgaccgctttgggcgccggacaacaccggacagcacttaacacgtactattcattggcagcgagtaccttgggaacatttgctctctccgccctcgtgggggaggatggccgcctggacatggtgcatattcagaacgccgcgctcgctggcggtgtggtagtgggcacaagttcggaaatgatgttaacacctttcggagcccttgcagctggatttctggccggtacggtgtcaactctcggctacaaattcttcacacctattctagaatccaagtttaaggtacaggatacttgcggagtgcacaatctgcacggcatgcccggcgtgctcggagcccttctgggggtgctcgtggcaggtttggctacgcacgaagcatatggggatggattagaaagcgtgtttcccctgattgcggaaggacagcggtctgcaacgagtcaagccatgcaccagctgtttggactgtttgtgactttgatgttcgctagcgtgggaggaggcctcggggggttgctgctaaagctgcccttcttggatagtccacccagactgcccgccctgagggggccttcgtccctggctggcgcttggcgggcctag

SEQ ID NO: 203239 - DNA, 1374 bp, synthetic construct
  misc_feature 1..1374: note = Description of Artificial Sequence: Synthetic coding sequence
  source 1..1374: mol_type = other DNA
atggccggcagccccagccgggccgccggccggcggctgcagctgcctctcctctgtctgtttctccaaggggccacagcagtgttgttcgcagtgtttgtcaggtacaatcacaagactgatgcagcgttatggcacaggtccaatcattcaaacgcagacaatgagttttattttcgctacccatcctttcaggacgtgcacgcaatggtctttgttggcttcggctttctgatggttttccttcagaggtatgggttttccagcgttggcttcacgtttttgcttgcagcgttcgccttgcagtggagtactctggtccagggtttcctgcacagctttcacgggggtcatatccacgtgggggtggaatctatgatcaacgcagacttctgtgcaggcgccgtgctaatcagcttcggcgctgttcttggaaagactggtccgactcagcttctgctgatggctctgctggaggtagtcctgtttggaatcaacgagttcgtgctgttacacctgctgggagtgagggacgcagggggtagtatgacgatccacacattcggcgcctatttcggactggttcttagccgcgtgctgtacagaccacagctcgaaaaatccaagcatcgccaaggcagtgtctaccactctgacttgttcgcgatgatcggaacaatcttcctgtggattttttggccctcttttaatgccgccctgactgccctgggggccgggcaacatcgtactgcgctgaatacgtactatagtctggccgctagcacactgggaacctttgccttgtccgctctagtgggagaggacggaagactggatatggtgcacatccagaacgcagctctggctgggggagtggttgtcggcacttcctcagaaatgatgctgactcctttcggagccctggccgcaggtttcttggccggtactgtttccacactggggtacaaattttttacccctatcctggaatctaaatttaaggtgcaggacacgtgtggagtgcacaatctccacggtatgcccggcgtactgggcgcactcctgggagtgctcgtggctggacttgccacccatgaagcttatggggatggacttgaatccgtgttcccacttattgccgaagggcagcgcagtgccacatcccaagcaatgcatcagttattcggactattcgtgacactgatgtttgcttcagtggggggcggattgggcggactgcttctgaagctcccgttcttggacccccccgatagccagcactacgaggaccaggttcattggcaggtgcctggggagcacgaagataaggcacagcggcctctccgagtggaagaagctgacacccaggcctag

SEQ ID NO: 203240 - DNA, 1326 bp, synthetic construct
  misc_feature 1..1326: note = Description of Artificial Sequence: Synthetic coding sequence
  source 1..1326: mol_type = other DNA
atggccggcagccccagccgggccgccggccggcggctgcagctgcccttactgtgtcttttcctgcagggggctaccgccgtgttgtttgcggtctttgtgcgctacaaccacaaaaccgatgccgccctgtggcaccgttcaaatcattccaatgccgacaacgagttttactttagatacccaagctttcaagacgtgcacgccatggtctttgtgggttttggtttcttgatggttttcctacagcggtatggattctcaagcgtgggctttactttcctcttagccgcctttgcgctccaatggtctaccttggtgcaagggttcttgcacagctttcatggcggccacattcatgtgggggttgaatctatgattaacgccgacttttgtgccggcgccgtgctgattagttttggtgccgtgcttgggaaaacggggcccactcagttactgctaatggccctcttagaagtggtgcttttcggaattaacgagtttgtactcctgcatctactgggcgttcgcgacgccggaggctccatgacgatacatacctttggtgcctattttggcctggttctgtctcgcgtcctctatagaccacagctggagaaatcgaaacaccggcaaggctctgtctaccactccgatctgtttgccatgatcgggacaattttcctgtggattttctggccttcgtttaacgccgctctcaccgcgctgggcgctggacagcatcgcacggctttaaacacctattactctcttgctgcctcgaccctaggcaccttcgccttgtccgccctcgtcggcgaagacggtagactggatatggttcacatccagaatgccgcgctggcgggtggtgttgtggtaggcacatcatccgagatgatgttgacaccattcggcgccttggccgccggttttctggcaggaaccgtatcgacactgggctacaaattctttactccgattctggaatctaaattcaaagtgcaggatacctgcggagtgcataacctccacggtatgcccggtgtgctcggcgctctgttaggtgttctcgtagctggtcttgccacccacgaggcgtatggtgatggactggagagcgtttttcctctgatcgcagaagggcaacgaagtgcaacttcccaggccatgcatcagcttttcggcctgttcgtcacactgatgttcgcatcagttggcggtgggttaggagggctcttacttaagttaccgttcctggattccccccctcggctgccggctctgagggggcctagttccttagccggagcttggagggcttag

SEQ ID NO: 203241 - DNA, 1230 bp, synthetic construct
  misc_feature 1..1230: note = Description of Artificial Sequence: Synthetic coding sequence
  source 1..1230: mol_type = other DNA
atggtgttcgtgggcttcggcttcctgatggtgttcctgcagcggtatggtttttcaagcgtaggttttaccttcttattggccgccttcgccctgcagtggagcactctggttcagggattcctacactcgtttcacgggggccatatccacgtgggtgtcgaaagcatgatcaacgcggacttttgtgcgggagctgtgctcatctcctttggagctgttcttggaaaaaccggaccgacccagttgctcctgatggctctgctcgaggtggtcttgtttggcattaacgagtttgtgcttctgcatctgttaggggtacgggtctggggcggcatggaatctggggtcggaggaggacagggacagcccctatcccaggaaaggggtggagggggaggagtgctgccactgacaccccccccccaggtgcgtgatgccggagggtctatgaccattcatactttcggagcttatttcggattggtgctctcccgagtgctttatcgcccacaactggaaaaaagcaaacaccggcaggggtctgtgtaccacagtgacctttttgcaatgatcggtacaatcttcctatggattttttggcccagttttaatgcggctctcacagccctgggggcaggtcagcatcgtactgccttgaacacctattacagcctcgctgcgtccactctgggaacattcgcactgtccgcattggttggagaagatgggagactggacatggtgcacattcagaatgccgctctcgcaggcggagtggtggtgggcacctcatcagagatgatgctgaccccatttggcgccctagctgccggcttcctggcgggaaccgtctccacattgggatacaagttcttcactcccattttggagtctaaatttaaggtgcaggatacttgtggcgttcataacctccatggaatgccaggagtgttaggtgcactgctgggcgttcttgtagcggggctcgctacccacgaggcttatggagacggccttgaaagtgtattccctctgattgctgaggggcagcggagcgcaacgtcacaagccatgcaccaactgtttgggctgttcgtgactctgatgttcgcaagtgtcggtggcggcctgggtggcctgctcctgaagctgccctttttagactctcctccacgcttacctgcactgcggggcccatcaagcctcgccggggcgtggcgtgcttag

SEQ ID NO: 203242 - DNA, 1125 bp, synthetic construct
  misc_feature 1..1125: note = Description of Artificial Sequence: Synthetic coding sequence
  source 1..1125: mol_type = other DNA
atggtgttcgtgggcttcggcttcctgatggtgttcctgcagcggtacggcttctcatccgtgggttttacttttcttctagccgcgtttgccctgcagtggagcaccctggtccaaggttttttacactcctttcacgggggccacattcacgtgggagtggagtcaatgattaatgcagacttctgcgcgggggctgttctaatctctttcggcgctgtcttaggtaaaacagggcccacccagctgctgcttatggccctccttgaggtggtcttatttggcattaacgaattcgtactgcttcatctgctaggggtcagggtgtggggcggtatggagtccggagtggggggaggtcagggccagccactgagccaggagcggggcggtgggggcggagtgctcccattgactccaccgccccaggttcgggacgctggcgggtcaatgaccatacacacattcggagcatacttcggcctggtgttgtcccgcgtgttataccgaccgcaactggaaaaaagtaaacatcgccagggtagcgtgtatcactctgatctgttcgcaatgattggaactatctttttgtggatcttttggccatcctttaacgccgccttaacagcactaggagcggggcagcatcgcactgcgttgaacacgtattactccctggctgctagtaccctcggtacctttgcactgtctgccctggtgggcgaagacggaaggctggatatgcctatcctggaaagtaagtttaaagtgcaggacacttgcggtgtgcacaatctgcatggaatgcccggggttctgggggcacttctaggcgtgctcgtggccgggctggctacccacgaggcatatggcgatggtttggaatctgtgttcccgcttatagccgagggacaacgcagtgccacttcccaggcgatgcaccagctctttggcctattcgttactctgatgttcgcctccgtgggcggtgggttaggcggcatcatcctggtgttgtgtctgctggacccttgtgcgctgtggcattgggtcgcaccaagctccatggtgggaggcagagaagcgtcccaaattctgccctaccaccatcagggttcctgctag

SEQ ID NO: 203243 - DNA, 687 bp, synthetic construct
  misc_feature 1..687: note = Description of Artificial Sequence: Synthetic coding sequence
  source 1..687: mol_type = other DNA
atggccggcagccccagccgggccgccggccggcggctgcagctgccattattgtgtttgtttctccagggtgccacagccgtcctgttcgcagtttttgttcggtacaaccataagacggatgcagcactatggcacagatccaaccacagtaacgcagacaatgagttctacttcagatacccccgcacaatcttcctgtggattttttggccttctttcaatgctgcccttactgccctgggtgcaggtcaacatcgaacagcattaaacacctactactccctggcagcttcgactctcgggacattcgcgttgagcgctctggtaggcgaggatggacgcctggacatggtgcatattcaaaacgccgccttggctgggggcgtggtggtggggacaagtagcgaaatgatgctgacaccctttggcgcgctggcagcaggttttctagccgggacggttagcaccctgggtccaagcctcaaccagaacagcaagtctaaaacccatgtggaaagtacaaccagcatggggtgtcgcgggtcgtggggaccaagttggggaagcctgtggctggatctccctcctatgaaactaactgagatgggcgaattcccgcccaatccctactgcagtcgtcatccgtccggcatgacctcggtgatcctctttcactgcgtctag

SEQ ID NO: 203244 - DNA, 1440 bp, synthetic construct
  misc_feature 1..1440: note = Description of Artificial Sequence: Synthetic coding sequence
  source 1..1440: mol_type = other DNA
atggcctggaacaccaacctgcggtggcggctgcccctgacctgccttctgctccaagtcatcatggtgatcctcttcggcgtcttcgtgcggtatgattttgaagcggatgcacactggtggagtgagcggactcacaagaacctgtctgacatggaaaacgagttctattataggtatccatctttccaggacgtgcatgtcatggtgtttgtcggcttcggcttcctgatgaccttcctgcagcgttatgggttctcggctgtgggctttaacttcttgctcgccgcctttggtatccaatgggcccttctgatgcaaggctggttccacttcctgcaggaccgatacattgtggttggggtcgagaatctcatcaatgccgatttctgtgtggcttcggtctgtgtcgcttttggcgcagtgttggggaaggtgagcccgatccagcttctgattatgacctttttccaggtgacactgttcgcagtcaacgagttcatactgctgaacctcctcaaggttaaggatgctggggggtcaatgacaatccatacatttggcgcttactttggcctgactgtgacgcggatactgtataggcgaaatctagagcaaagtaaggaaagacagaatagcgtgtatcagagcgacttattcgccatgatcggaaccttatttctgtggatgtactggccctccttcaatagcgctattagttatcacggcgattctcaacaccgagctgctattaacacttactgctctcttgcggcgtgtgtcctgactagtgtcgccatctcctctgccctccataaaaagggaaagttagacatggtacatatccagaacgcaaccctggctggtggagtcgccgtgggaacagccgcggaaatgatgctcatgccgtatggcgcgctaatcatcggcttcgtctgcggcatcatctcgaccctaggattcgtgtacctgacacccttcttagaaagccgcctccatatccaggacacttgtgggatcaacaatcttcatggaatccctggtattatcgggggtatcgttggcgctgtcactgccgcctctgcctcccttgaggtatatggaaaagaagggctggtgcacagctttgattttcaaggatttaacggcgactggactgccaggacgcaggggaagttccagatttatgggttgctcgtcactctggctatggctttaatgggcgggatcattgtaggcctgatcctgcgactgcctttttgggggcaaccatctgacgaaaattgtttcgaggacgccgtgtattgggagatgccagaaggaaactctaccgtgtacataccggaagaccccacatttaaacccagcggacccagtgtaccttcagtgccaatggtcagccccctacccatggcaagctcagtgccactggttccctag

SEQ ID NO: 203245 - DNA, 1413 bp, synthetic construct
  misc_feature 1..1413: note = Description of Artificial Sequence: Synthetic coding sequence
  source 1..1413: mol_type = other DNA
atggcctggaacacctgcctgctgctgcaggtgatcatggtgatcttgtttggtgtgtttgtgcgatatgactttgaggcggatgcccactggtggagcgagcgcacacataagaatcttagtgacatggaaaacgaattctattatcggtacccttctttccaggatgtccacgttatggtgttcgtgggattcgggtttctgatgacatttttgcaacgctatgggttcagcgctgtgggttttaatttcctcctggccgcattcggaatccagtgggctcttctgatgcagggctggttccacttcctccaggaccgatatatcgttgtgggcgtagaaaacctaattaatgctgacttctgcgttgcttccgtgtgtgtggctttcggagccgtattgggtaaagtgagccccatacagttgctcattatgacgttcttccaagtgactctgtttgctgtgaatgaatttattctgttgaacctgttgaaagtgaaggacgcaggggggtccatgacaatacatacgttcggtgcctacttcgggcttaccgtaacacgaattctctatcgtagaaaccttgaacaaagcaaagaaagacagaacagcgtgtatcagtcagacctgtttgcaatgatcgggaccctgtttctgtggatgtactggccatcattcaactccgcaatttcgtaccatggagatagccaacatcgggcagccattaacacatactgctctctcgccgcgtgcgtccttactagcgtggctatctcctcagccctgcataagaaaggcaaactggatatggtgcacatccaaaatgctacactggccgggggagtggctgtgggcacggctgccgagatgatgctgatgccatacggagccctgataatcggattcgtctgtgggatcatatctacactggggttcgtctaccttactccttttctggaaagtaggctgcacattcaggacacctgtggtataaataacttacatggaatccctgggatcatcggagggattgtgggggcggtgaccgccgcctccgccagtctggaagtgtatggtaaagaggggctggttcactccttcgatttccagggtttcaatggggattggacagcaagaacccaaggtaaatttcagatctacggtctgttagtcaccctggccatggccctcatggggggcatcatcgtgggtctaatcctgaggctgcccttttggggccaaccttccgacgaaaactgctttgaggatgctgtatactgggaaatgcccgagggaaattctacagtgtacatccccgaagaccctacctttaagccttccggaccttccgttccgtcagtcccaatggtatcccccctccctatggccagctccgtacccctggttccttag

SEQ ID NO: 203246 - DNA, 1338 bp, synthetic construct
  misc_feature 1..1338: note = Description of Artificial Sequence: Synthetic coding sequence
  source 1..1338: mol_type = other DNA
atggcctggaacaccaacctgcggtggcggctgcccctgacctgcctgcttctgcaggtgatcatggttattctatttggggtgttcgttcgctacgactttgaagctgacgcccattggtggagtgagaggacacataagaatctgagcgacatggaaaacgagttttactacaggtacccatcattccaggacgtgcacgtgatggtgtttgttgggtttgggtttcttatgacgtttctccaacgatatggatttagcgccgtcgggtttaactttctgctggctgcctttggtatccagtgggccctcctcatgcaagggtggtttcatttcttgcaggataggtacattgtagtgggcgttgagaatctgattaacgctgacttctgcgtcgcttctgtctgcgtggcttttggagcagtgctgggaaaagtcagtcctatccaactgctaatcatgacattcttccaggtgaccctctttgccgtaaatgaattcatcttattaaatttactgaaggtaaaagatgcgggcggttctatgacgatccacaccttcggggcctactttggcctaacagtcaccagaatcttataccggaggaacttggagcagagcaaagagagacagaactctgtgtaccagtctgatctgttcgcgatgatcgggaccttgtttctctggatgtattggccctcgttcaattctgctatatcctaccacggtgactctcagcaccgggccgccatcaacacgtactgctctctcgctgcctgtgtcttaaccagtgtagctattagtagcgcattgcataagaaggggaagttagacatggttcatatacagaacgccactttagcaggtggagtggcagtgggcaccgccgccgaaatgatgctgatgccatacggagcactgattatcggttttgtgtgtggcatcatcagtactctcgggttcgtttacctcacaccttttctcgagagtagactgcacattcaggatacttgcgggatcaataatttgcatggaataccaggaattatcgggggaattgtcggcgccgtaactgccgcttccgctagtctcgaggtgtatggcaaagaagggcttgttcactcctttgatttccagggattcaacggagactggaccgctagaacacaggggaagtttcagatttacggccttcttgtgacactggctatggctttgatgggcgggattattgtggggctgatcctgcggctccctttctggggacagcccagcgatgagaactgtttcgaagacgcggtttattgggaggatctcgagctagcccctaaccagtag

SEQ ID NO: 203247 - DNA, 714 bp, synthetic construct
  misc_feature 1..714: note = Description of Artificial Sequence: Synthetic coding sequence
  source 1..714: mol_type = other DNA
tgagacagccagcaccgggccgccatcaacacctactgcagcctggctgcctgtgttttaaccagtgttgccatctcatcagctctgcacaagaagggaaaattggacatggtgcatattcagaatgctacactggccggaggcgtcgctgtgggaactgctgccgagatgatgttaatgccatatggggctcttatcatcggatttgtttgcggaatcatttcgacccttggcttcgtgtaccttaccccgtttctcgagtctcgacttcacattcaggatacttgtggaatcaacaacctgcacggtattccaggcatcatcggaggaattgtcggggctgttacagccgcatcagccagcctcgaggtatacggtaaggagggtttggtgcactcctttgattttcaggggttcaatggagattggactgctagaacacagggtaagttccagatctatggattactggtgacactggctatggcactgatgggaggcatcatagtgggtctgattttgagactacccttctggggccagccgagcgacgaaaactgctttgaagatgcagtatattgggagatgcctgaggggaacagcacagtctacatccctgaggatccaactttcaaaccttctggtcccagcgtgcccagcgtgcctatggtgtccccactccctatggcttcaagcgttccgctggtgccctag

SEQ ID NO: 203248 - DNA, 429 bp, synthetic construct
  misc_feature 1..429: note = Description of Artificial Sequence: Synthetic coding sequence
  source 1..429: mol_type = other DNA
atggccgccgccgtggccgccgccggcgccggcgagccccagagccctgacgagctcttgccaaaaggtgacgccgagaagcccgaggaagaacttgaggaagacgacgacgaagagttggatgagacgctgagcgaacggctgtggggactgactgagatgttccccgagcgggtgcggtccgccgccggagccacattcgaccttagtctctttgtggcccaaaagatgtacaggttctcacgagccgccctgtggatcgggaccacctcctttatgatactggtattgcccgtcgtgtttgaaacggagaagctgcaaatggagcagcaacagcagctgcagcaacgtcagatacttttggggccaaataccggcctgagcggcggtatgccgggtgccctgccttcacttcccggcaaaatctag

SEQ ID NO: 203249 - DNA, 1083 bp, synthetic construct
  misc_feature 1..1083: note = Description of Artificial Sequence: Synthetic coding sequence
  source 1..1083: mol_type = other DNA
atgagccaggagcggcccaccttctaccggcaggagctgaacaagacgatctgggaagttccagagcgttaccagaacctgtctccagttgggtccggggcctatgggtcagtttgcgcggcatttgatacaaaaacaggactgcgtgtggcggtcaagaaactgtctaggccttttcagagcatcattcacgcgaaacgaacctatagggagcttcgccttctgaaacacatgaagcatgagaatgttatcggtttgctggatgtttttacaccagccagatcacttgaagaatttaacgatgtctatttggtgactcacctgatgggcgccgatctcaataacattgtcaaatgccagaagctgacagatgaccacgtccagttcctgatatatcagatccttagaggtctaaagtacatacatagtgccgacatcatccatcgagatttaaagccttcaaacctggcggtgaatgaagactgcgagttaaaaatactcgatttcggactggctaggcatactgacgacgagatgacgggttatgtcgccactagatggtatcgcgcccctgagataatgctgaactggatgcattacaaccagacagtggatatttggtcagttggatgcatcatggccgaactgctgaccgggaggactctgtttccaggcacagaccacatcaatcaactccagcaaattatgcggttgacaggcactcccccggcttacctcataaacagaatgccgagccacgaggcccgaaactatattcagagccttacccagatgcctaagatgaactttgctaatgtgttcatcggcgcaaacccattggccgtggacttgctggagaagatgctcgtcctagattctgataagaggattacggcagctcaagctctggcccatgcgtactttgcccagtaccacgatcccgacgacgagccagtcgccgatccatatgaccagtccttcgagagccgggatctattaatcgacgagtggaagtccttaacatacgatgaggtcatctctttcgtcccacctcccctcgaccaagaggagatggagtcctag

SEQ ID NO: 203250 - DNA, 1230 bp, synthetic construct
  misc_feature 1..1230: note = Description of Artificial Sequence: Synthetic coding sequence
  source 1..1230: mol_type = other DNA
atgcggttcaccttccccctgatggccatcgtgctggagatcgccatgatcgttctgtttgggctgttcgtagagtatgagaccgaccagaccgtgctggaacaactgaacataactaagcctaccgatatggggatcttttttgagctgtaccctcttttccaagatgtccatgtgatgatcttcgtgggctttggctttctgatgacattccttaaaaagtacgggtttagtagcgttggtattaacttactggtggctgcgctaggccttcagtgggggaccattgtccagggaattctgcaatctcagggacagaaatttaacatcggtatcaaaaacatgatcaacgccgactttagcgctgctaccgttttgatttctttcggagccgtacttggcaagaccagtcccacacagatgttgataatgaccattctcgaaatagtattcttcgctcataatgagtacctcgtgtccgaaatcttcaaggcttccgacatcggggcgagtatgaccatccacgctttcggggcctacttcggattggcggtggcaggaatcctttatagaagcgggctgaggaaaggccatgagaatgaggagtcggcttactactcggacctgtttgcgatgataggcactctttttttgtggatgttttggcctagtttcaattcagcaattgcggaacctggggataaacagtgtcgtgctatcgtgaacacgtacttctccctagccgcctgcgttctgactgcattcgcattcagctcactagtggaacatcgcggaaaacttaatatggtgcacattcagaacgccaccttggctggtggcgtggcagtcggaacatgtgccgacatggccattcatccctttggatccatgatcataggatctattgccggaatggtgtccgtgttaggttacaagttccttaccccattgtttaccaccaagctgcgtattcacgatacctgcggtgttcacaacctgcacggcctccccggcgtcgtgggtggcctcgccggcatagtggccgtcgcgatgggcgcctcaaatacatcaatggcgatgcaggccgcagcactgggctctagcatcggtactgccgtcgtcgggggcctgatgacggggctcattctcaaattgcctctgtggggccagccaagcgatcagaactgctatgatgattccgtttactggaaggtgcccaagacccgctag

SEQ ID NO: 203251 - DNA, 1233 bp, synthetic construct
  misc_feature 1..1233: note = Description of Artificial Sequence: Synthetic coding sequence
  source 1..1233: mol_type = other DNA
atgcggttcaccttccccctgatggccatcgtgctggagatcgccatgatcgtacttttcgggctgttcgtcgagtatgaaacggaccaaacagtgctggagcagctgaacatcaccaagcctaccgacatgggcatctttttcgagctctatcccctattccaggatgtgcacgtgatgatcttcgttggctttggttttttgatgactttcttgaagaaatacggattctcatctgtgggcatcaaccttttggtggccgcattgggactccaatggggcacaatcgtgcaagggattctccagtcgcagggtcagaagtttaatataggtattaagaacatgataaatgcagatttttcagccgctacagtcctgatcagtttcggcgcggtgttgggcaagactagccccacccagatgttgataatgacaatccttgagatcgtcttcttcgcgcacaacgagtacttagtgtcagaaatctttaaagctagcgatatcggggctagcatgacgatacatgcctttggtgcatactttggactcgccgtcgccggcatcctgtatcgatccgggcttagaaaggggcatgaaaacgaggaatcagcatactactccgatctttttgccatgattggcactttatttctatggatgttttggccctccttcaacagcgccatcgccgaaccaggcgataagcagtgtcgggcgattgtcaatacttacttcagcctcgctgcatgtgtactcacggccttcgccttctctagtctcgtggaacatcgagggaaacttaacatggtgcacatccaaaatgctacgctcgctggcggggtcgctgtgggaacatgcgccgacatggccatccatccttttgggagcatgataattggtagtattgcagggatggtgtccgtactgggttacaagtttctgactccattgtttacgaccaagttgagaatccatgacacatgtggagtgcacaacttgcatggcctgccaggggtggtgggcggcctagctggaatcgtcgctgtggccatgggtgcctcaaatacttctatggccatgcaggccgcagctttggggtcctcaatcgggactgccgtcgtgggcggcctgatgacaggcttaatattgaaactacctctgtggggtcagccgtcagatcagaattgctatgacgacagcgtttactggaaggtacccaagactagggtgtag

SEQ ID NO: 203252 - DNA, 1146 bp, synthetic construct
  misc_feature 1..1146: note = Description of Artificial Sequence: Synthetic coding sequence
  source 1..1146: mol_type = other DNA
atgcggttcaccttccccctgatggccatcgtgctggagatcgccatgattgtcctattcggtttatttgttgaatatgagacggatcagactgttctagaacagctgaacattactaaacctacagatatggggatctttttcgagctgtatcctctcttccaggatgtacatgttatgatctttgttggcttcggcttcctgatgactttcctgaaaaagtatggtttttcaagcgttggcatcaatcttctggtggccgctttgggactccagtggggtaccattgttcagggcatcctacagagccagggccagaagtttaatatcggcatcaagaacatgatcaacgccgacttctcagctgctaccgttctgattagtttcggtgctgtgctggggaagacatctcctacacagatgctgatcatgacgatccttgaaatcgtgttttttgcccacaatgagtacctggtgtctgaaatctttaaagccagcgatatcggagcaagtatgacaatccatgcgttcggcgcctacttcggcctagccgtagccgggatcctctataggtccggtctgcgcaaggggcacgagaatgaggagtccgcttattactccgacctcttcgctatgatcggaactttgtttttgtggatgttttggcccagtttcaatagtgcaatcgccgaacccggggacaagcaatgccgggccattgtgaatacgtatttttccttagccgcctgcgtcctgaccgcttttgcattttcttccttggtggagcatagaggaaagctaaatatggtccatatacagaacgctactctggcaggaggcgtcgcagtggggacatgcgcagacatggcgatccatccctttggctctatgatcataggaagtatcgccgggatggtttccgtgctgggctacaagttcctcaccccgctgttcactacgaagctgcggattcacgacacttgcggcgtccacaacctccatggcctcccgggagttgtcggtggcttggccggaatcgtcgccgtcgcaatgggagcttccaatacctccatggccatgcaggctgccgcactgggctcctccatcggcacagccgtggttggcgggctgatgacaggcacctag

SEQ ID NO: 203253 - DNA, 387 bp, synthetic construct
  misc_feature 1..387: note = Description of Artificial Sequence: Synthetic coding sequence
  source 1..387: mol_type = other DNA
atgaagagcctgatcctgctggccatcctggccgccctggccgtggtgaccctctgctacggagaatggcagaaagaggagaatttcggattcgacattgtatctgtcctgagtcttaactggcatagggcacaggagagtcatgagtcaatggaatcttacgagttaaacccctttatcaataggcgcaacgctaatacctttatatctccacagcagcgatggcgggctaaagtgcaggaacgcattagagagcgctccaaacctgtgcatgagcttaacagggaggcctgcgatgattaccgtttgtgtgagcgctatgccatggtgtatggctataacgcagcttacaatagatactttcgcaagagaagggggacgaagtag

SEQ ID NO: 203254 - DNA, 339 bp, synthetic construct
  misc_feature 1..339: note = Description of Artificial Sequence: Synthetic coding sequence
  source 1..339: mol_type = other DNA
atgaccgagaaggcccccgagccccacgtggaggaggacgacgacgatgagctggattcgaagctcaattacaagccacccccccagaagtccctgaaagagctgcaggagatggataaagatgatgagagcctaataaagtacaagaagactctattaggagacggacctgtggtgaccgatccgaaagccccaaacgtggtcgttacgagacttaccttagtatgcgagagcgctcccggcccgattaccatggacctgaccggcgatctggaggctctgaaaaaggaaactattgtactcaaggaaggctccgagtatcgcgtgaagattcattag

SEQ ID NO: 203255 - DNA, 606 bp, synthetic construct
  misc_feature 1..606: note = Description of Artificial Sequence: Synthetic coding sequence
  source 1..606: mol_type = other DNA
atgaccgagaaggcccccgagccccacgtggaggaggacgacgacgatgagttggattctaaactgaactacaagccacctccccagaaaagcctgaaggagcttcaggagatggataaggacgacgaaagtctaattaagtataagaagacattactaggggacggacccgtcgtcactgaccccaaagcgcccaacgtggttgtcacccgtttgaccctggtgtgcgaatccgcccccggccccatcacaatggacttgacgggcgatctggaggcactgaaaaaggaaacgatagttctgaaagaaggctctgaatatcgcgtgaagatccactttaaggtgaaccgggatatagtctccgggttaaagtatgtacagcacacatatcggaccggcgtgaaggtggacaaagctactttcatggtgggttcctacggaccgcggccagaagagtatgagttcctgacccccgtggaggaggcccctaagggcatgctggcccggggtacctaccataacaaatctttttttacagatgatgacaagcaagatcacctttcgtgggaatggaacctgtcgattaagaaggaatggaccgagtag

SEQ ID NO: 203256 - DNA, 606 bp, synthetic construct
  misc_feature 1..606: note = Description of Artificial Sequence: Synthetic coding sequence
  source 1..606: mol_type = other DNA
atgaccgagaaggcccccgagccccacgtggaggaggacgacgacgatgagctagacagcaaattaaactataaacccccgccccagaagagcctgaaggagctgcaggagatggacaaggacgacgagtcccttatcaaatacaagaaaaccctgctgggggacggtcctgtcgtgactgatcccaaagcccctaacgtagttgtgacgagattgacattggtgtgcgaatctgctcccggacccatcaccatggatctgactggcgaccttgaagccctgaagaaggaaaccattgtattaaaggagggatctgagtatcgcgtcaagatacacttcaaagttaatcgcgacattgtatctggcctgaaatatgtgcagcatacataccgtactggagtgaaggtcgacaaggcaacatttatggtaggcagttacggtccaaggccagaggagtacgaatttctgaccccagtagaggaagcgccaaaaggcatgctggcgagagggacttaccacaacaagagtttttttaccgatgatgacaagcaggatcacctatcttgggagtggaacctgagcatcaagaaggagtggacagagtag

SEQ ID NO: 203257 - DNA, 267 bp, synthetic construct
  misc_feature 1..267: note = Description of Artificial Sequence: Synthetic coding sequence
  source 1..267: mol_type = other DNA
atgaccgagaaggcccccgagccccacgtggaggaggacgacgacgatgagctcgattccaagctgaattataagccgcctccccaaaaaagtctgaaggaactgcaggaaatggataaggacgatgagtcactcatcaagtacaaaaagacacttctcggagacggaccagtcgtaaccgaccccaaggcccctaatgtggtggtgacccgcctgaccttagtttgcgagtctgcccccggcccgataacaatggacttgacgtag

SEQ ID NO: 203258 - DNA, 480 bp, synthetic construct
  misc_feature 1..480: note = Description of Artificial Sequence: Synthetic coding sequence
  source 1..480: mol_type = other DNA
atgaccgagaaggcccccgagccccacgtggaggaggacgacgacgacgagctcgatagcaaactgaattataaacctcctcctcaaaaatcgctgaaagaattgcaggaaatggacaaggacgatgagtctcttataaaatacaaaaagaccctcctaggtgacgggcccgtcgtgacggaccctaaagctcctaacgttgtagtcacccgcttgaccctggtgtgcgagagcgcacctgggccaatcacgatggacttgacaggagatctcgaagctctgaaaaaagaaacaatcgtcctgaaagaggggtccgagtatcgcgtgaagattcactttaaggtcaatcgggatatcgtttccggactgaaatacgttcagcatacctacaggactggggtgaaggtggacaaggcgacctttatggtgggctcctacggaccccgcccagaggagtacgagtttctgacccctgtgtag

SEQ ID NO: 203259 - DNA, 1320 bp, synthetic construct
  misc_feature 1..1320: note = Description of Artificial Sequence: Synthetic coding sequence
  source 1..1320: mol_type = other DNA
atggaccccctgagcgagctgcaggacgacctgaccctggacgacacaagtgaggccttaaatcagcttaagctcgcctcaattgacgagaaaaattggccgtctgatgagatgcccgatttccccaagtctgacgacagcaagtcatcaagtcctgaacttgtgacgcacctgaaatgggatgatccttattatgatattgcaaggcaccaaatagtagaggtggcaggtgatgacaaatacggcagaaagattatcgtgttcagcgcatgtaggatgcccccttcccaccagctcgatcacagtaaattactgggatatcttaagcacaccctcgaccaatacgtggaaagtgactacaccctactgtaccttcaccatgggttaacaagcgataacaaaccaagcctgtcttggctgcgggatgcttaccgggaattcgacagaaaatacaaaaagaacataaaggccctgtacatagtgcacccgaccatgtttattaagaccttactgatcctctttaagccactgatctcttttaaattcggacagaagatcttctatgtaaattatctcagcgaactgtccgaacacgtcaagcttgagcaattaggaattcctaggcaggtgctgaaatatgacgacttcctgaaaagcacccagaagagccccgccaccgcccctaaacccatgccgcccagacctcccttgccaaaccagcagtttggtgttagtctgcaacacctacaggaaaagaacccggaacaagaaccaatccctatcgttctgcgtgagaccgtggcctatctgcaggctcacgccctgacgaccgaggggatcttccggcgttcagccaacacccaggtcgtgcgagaggtccaacagaagtacaacatgggactcccggttgactttgaccagtataacgagctgcacctgccagctgtcattttaaagacatttctgcgggagctgccagagcctctgctaactttcgacttgtacccccacgttgtgggcttcctaaacatcgatgagagccaaagggtcccggcaacccttcaggtgctgcaaactcttccagaagaaaactaccaagtgctgaggttcctgacagcctttcttgttcagatctcagcgcactctgaccagaacaagatgaccaatactaacttggccgtagtctttggccccaatctgttgtgggccaaggacgcagccattacacttaaagccattaaccctatcaacacgttcacaaaattcctcttggaccatcagggcgagctttttccttctcctgacccatccgggctgtag

SEQ ID NO: 203260 - DNA, 1377 bp, synthetic construct
  misc_feature 1..1377: note = Description of Artificial Sequence: Synthetic coding sequence
  source 1..1377: mol_type = other DNA
atggaccccctgagcgagctgcaggacgacctgaccctggacgacacctccgaagctctgaatcaactcaagctggcaagcattgatgagaagaactggcccagcgacgagatgcccgacttcccaaagagtgatgacagtaaatctagcagcccagagctggtaacgcacctcaagtgggatgatccttactacgacatcgccaggcaccagattgtagaggtggcaggtgatgataaatacggaaggaagatcatcgtgttctctgcctgtcggatgcctccatcccatcagctggatcactccaagctgctgggttatctcaaacacacactggatcagtatgtggagtccgattatacacttctttacttgcaccatggcctgacctctgacaacaaacctagcctctcctggttgcgtgacgcataccgagaatttgaccggaagtataagaagaacatcaaggctctctatatagtgcaccccacaatgttcatcaagaccctcctgatactttttaagcccctcatctcattcaagtttggccaaaaaatattctatgttaactacctctcagagctctcagaacacgtgaagctcgagcagctgggaatccctaggcaggtcctaaaatatgatgatttcctcaagagcacgcagaaatccccagccactgctccaaagcctatgcctccccgtcctccacttcctaatcagcaatttggggtttccctccaacatcttcaggagaaaaatcccgagcaggaacctattccgatagtgctgcgagaaaccgtggcctatttgcaagcccacgctttgacaacagaaggcattttccgacgctctgccaatacacaagttgtgcgtgaggtccagcagaagtataacatggggctcccagtagactttgaccagtacaacgaactgcacctgcctgctgtcatcctgaaaactttcctgcgggaactgccagagccactcttgaccttcgatctgtatccacacgtggtgggctttctcaacattgatgaatctcagagagtgcctgccaccttgcaggtgttgcaaacccttccagaggagaactaccaggtcctgcggtttcttactgcctttttggttcagatctcggctcacagcgaccagaacaaaatgaccaatactaacctcgccgttgtctttggcccaaatctcctgtgggccaaagacgcggctataactttaaaagctatcaatcctatggctactttcttcttctttttccttaggtggagtctggcactgtcccccggatggtcagccgtagctcgaagccggcacactagcgctttctgggtgcaggctatcttgttgcctcaaccccccgagtag

SEQ ID NO: 203261 - DNA, 579 bp, synthetic construct
  misc_feature 1..579: note = Description of Artificial Sequence: Synthetic coding sequence
  source 1..579: mol_type = other DNA
atggaccccctgagcgagctgcaggacgacctgaccctggacgacacctctgaggcccttaaccagcttaagctggcaagcattgatgagaagaactggccttcggacgagatgcccgattttccgaaaagcgatgacagcaagtcgtcaagccccgaactggtaactcacctgaagtgggatgacccatattacgacatcgctcggcaccaaatcgtagaggtcgcaggcgatgataaatacggccgcaaaattatcgtgttctctgcttgcagaatgccgccaagccatcagctggatcattccaagctgttgggatacctgaaacataccctcgatcagtatgtcgaatccgattacactctgctgtacctgcatcacggcctgacatctgataataaaccctccctgtcatggttgcgtgatgcctatcgggaattcgacaggaaatacaaaaaaaatatcaaagccctttatattgtacaccctacaatgttcattaagacccttctgattctgttcaagcctctcatctcctttaaatttggacagaaaatcttttatgtgaattacttatag

SEQ ID NO: 203262 - DNA, 2361 bp, synthetic construct
  misc_feature 1..2361: note = Description of Artificial Sequence: Synthetic coding sequence
  source 1..2361: mol_type = other DNA
atgggcctgcagcccctggagttcagcgactgctacctggacagcccgtggtttagggaacgtatacgagcacacgaggccgagctggagaggaccaacaaatttattaaagaactcatcaaggacggaaaaaacctgatcgccgctaccaagagtctatctgtcgcacagagaaagttcgctcattcccttagagactttaagttcgagtttatcggcgatgctgtgacagacgatgaaaggtgcattgatgcttccctgcgcgagttctcaaatttcctgaaaaacctggaagaacagcgagagatcatggccttgagcgtcaccgagaccttaatcaaacccctggaaaaatttaggaaagaacagttgggagcggtaaaagaagagaaaaaaaaattcgacaaggaaactgagaaaaattattccctaatagataagcacctgaacctttccgcaaagaagaaggatagccatctacaggaagccgatatacaagtggagcagaaccggcaacatttctatgaactctccctggagtacgtctgtaaactgcaggaaattcaggaaaggaagaaattcgagttcgtcgagccgatgctgtccttcttccagggcatgtttactttttatcaccagggccacgagcttgccaaggattttaaccactataagatggagttgcagattaacatccagaatacacgcaacagattcgagggcactcgcagcgaagtggaggaacttatgaacaaaattcgccaaaacccaaaggatcataagcgggcgtcccaatttactgctgaggggtatctgtatgtgcaggagaaacgcccggctcctttcggttcctcctgggtgaagcactattgcatgtaccgaaaggctgcaaagaagtttaacatgattccattcgagcaccgctcaggaggtaagttaggggacggggaagttttctttctgaaagagtgcacaaagcgacacacagatagcatagacagaaggttctgttttgacattgaagccgcagataggcctggtgtctcactgacgatgcaggctttctctgaagaagaacgtaaacaatggctggaggcccttggcggcaaggaggcgctttcccactcattcaatacggcaattatacctcgcccagaaggaaacgcccagctcgataagatggggttcaccatcattaggaagtgtatctccgctgttgagactagaggaatcaatgaccagggactgtaccgggtagtgggtgtctcttctaaggtccagcggttgctgtctatgctgatggacgtcaaaacctgcaacgaagtcgatctcgagaacagtgccgattgggaagtgaagactatcacatctgcactgaaacaatatctccgcagtctacccgaacctttgatgacctacgagttgcatggcgacttcattgtaccggccaaaagcggctccccagagagtcgcgttaacgcaatccactttctggtgcacaaactgcccgagaagaataaagagatgcttgatatcctggtgaagcacttaacaaacgtgtctaatcacagtaagcaaaacctcatgacagtggccaacctgggcgttgtctttggacctactctcatgcgcccacaggaagaaaccgtggccgctctgatggacttgaaatttcagaatattgtggtggagatcctgatcgagaaccatgagaagatttttcggacaccccccgataccacctttccagagccaacatgcctgtcagcatcacctccgaacgcaccgccacgccagtcaaagcgccaggggcagagaaccaaacggcccgtcgcggtgtataatctgtgcctggagctcgaggatggtgacaacccttatccaagcaaggaggacacccccacctcttccttggattccctctctagcccatcacctgttaccacggccgtacccggtccacctggccccgataagaaccatttacttgccgacggcggatctttcggggattgggcctccacaatccccgggcagacaaggtccagtatggtccagtggctgaatccgcagtccccaactacaacctcttccaactccgctgtaacacctctgagtcccggttcctctccctttccgttctcgccacctgctaccgtggcggacaagccccccgaatctattcgatcccgtaaggccagagccgtgtacccctgcgaagctgagcattcctcagagctctcttttgaaattggggcaatcttcgaagatgtgcaaacctcaagagagccaggatggctcgaagggaccctgaatggaaaacgcgggctgatccctcagaactacgtcaagctattgtag

SEQ ID NO: 203263 - DNA, 1155 bp, synthetic construct
  misc_feature 1..1155: note = Description of Artificial Sequence: Synthetic coding sequence
  source 1..1155: mol_type = other DNA
atgcaggccttcagcgaggaggagcggaagcagtggctggaggccctgggaggcaaggaagcactatctcattcttttaacaccgccattataccccgaccagaggggaacgcccagttggacaagatgggtttcaccattataagaaagtgtatttccgccgtcgagaccagaggaattaacgaccaggggctctatcgggtggtcggtgtgagttccaaggtgcagaggctattgtccatgctgatggatgtcaaaacttgcaacgaagtcgacttggaaaactctgctgactgggaggtgaaaaccatcacatcagccctcaagcagtacctgagaagcctgcccgagcccctgatgacatacgagttgcacggcgactttatcgtgccagctaagtcaggtagcccagaaagtcgcgtcaatgcaatccacttcttggtccataagttgcctgaaaagaataaggaaatgctagacatactcgtgaagcacttgacgaatgtgagcaatcacagtaagcagaacctgatgactgtcgccaacctgggggtggtgttcggtcctaccctgatgcggcctcaggaagagacggtggctgctctgatggatctgaagttccagaacattgtggtggagatcttgattgagaaccacgagaaaatatttcgtactccccctgacaccacatttcctgagccaacttgcctgtcagctagcccacccaacgcacctcccaggcagagcaagcgccagggccagagaacgaagcgcccggttgcggtctataatctctgccttgaactggaggatggggacaacccttatccttcaaaagaggataccccaacgtcatcgctcgattcccttagcagcccaagcccagtgaccactgcagtccctggcccacccggccccgacaagaatcacctgctagccgacggggggagtttcggcgattgggcctcaactattataagaagcagaaaagcacgtgcggtctacccctgtgaagccgagcattcctccgaactgtcatttgaaatcggggcgatctttgaagatgtacagacgagtcgagagcctgggtggcttgaaggtacactgaacggtaagagagggctcattcctcagaactatgtaaagctgctgtag

SEQ ID NO: 203264 - DNA, 3072 bp, synthetic construct
  misc_feature 1..3072: note = Description of Artificial Sequence: Synthetic coding sequence
  source 1..3072: mol_type = other DNA
atgtgggaccagcggctggtgcggctggccctgctgcagcacctgcgggcattttacgggattaaggtaaaaggtgtgcgaggacagtgcgatagaagaaggcatgagacggcagccactgagatcggcggtaagatctttggcgtcccctttaatgccctgcctcatagcgccgtccctgagtacggacatataccctcctttttggttgacgcgtgtacctcacttgaagatcatatccacaccgaggggctcttcagaaaaagtggctcagttatcaggcttaaggccctcaaaaataaggtcgatcacggtgaaggctgtctcagctccgccccaccatgtgacatcgccggactgcttaagcagttcttcagggagctgccagaacccatactgcccgcagatctccacgaagctctgctaaaagcccagcagctgggcaccgaagaaaaaaacaaggccactctcctcttgtcttgtttgttagcagatcatactgtacatgtgttgcgctattttttcaattttctgagaaatgtctccctacgaagttctgagaacaagatggatagttctaacttagcggtgattttcgcccccaatttgctccaaacctctgaaggccatgagaagatgtcctctaacacggaaaagaaactccgccttcaggctgccgtggtacagaccttaattgattatgccagtgatattggaagagtacccgattttatactggagaagatccccgcgatgctgggcattgatgggctgtgtgctacaccgtctctggagggattcgaggaaggggagtacgagacacccggcgaatataagagaaagagaaggcagagcgtgggggactttgtgagcggtgcattgaacaagttcaaacccaaccggaccccttccatcacgcctcaggaagaaaggatagcacagctgtccgagagcccagtgatcctgactcctaatgcaaagaggactctgcccgtagattcttctcatggctttagctcaaagaagcggaaatctataaaacacaacttcaattttgagctgctgccctctaatttattcaattctagcagtacccctgtgtcagtgcatatcgatacttccagcgagggtagtagccaatcaagtctgagcccggtccttatcgggggcaaccacctaattacggccggagtcccccgacgcagtaaacggattgcaggaaaaaaagtttgtcgggtggagtccggcaaggcaggatgcttcagcccaaagatatcccacaaagaaaaagtgaggcggagtctgaggttaaagttcaatctgggaaaaaatgggcgcgaagtgaatgggtgcagcggggtgaataggtatgagtctgtcgggtggaggctggccaatcagcagtccctcaaaaaccgtatcgagagcgtcaaaaccggcctacttttctcgccagacgttgatgaaaagctgcctaaaaaggggtcagagaaaatctccaaaagcgaggagaccctgctgacacccgagcggttagtggggacaaactaccgcatgtcatggacgggccccaacaatagctcattccaggaagtcgatgcaaacgaagcctcaagcatggtggagaacctggaagtcgagaactctctcgaaccggacatcatggttgaaaagagcccagcaacctcctgtgaactaactcccagtaatctgaacaacaaacacaatagtaacattacctcatctccgttgtcaggagacgaaaacaatatgaccaaggaaacccttgtaaaagtgcaaaaggcattttctgaatccggctccaacctgcacgcactgatgaaccagaggcagtcatcagtcactaatgtgggtaaggtcaaactgacagagcccagctacctggaggacagcccagaggagaacctgttcgagacaaatgacctgacaatcgtggaaagtaaagagaaatatgaacaccataccgggaaaggggaaaaatgtttcagcgaaagagactttagtcccctgcagacacagacctttaacagagaaacaactatcaaatgctattccacccagatgaagatggaacacgaaaaggacattcattcgaatatgcccaaagactatttatctaaacaggagttttcttctgatgaagaaatcaaaaagcagcaaagtccaaaagataagcttaacaacaaactgaaagagaatgagaacatgatggagggaaatctacctaaatgtgccgcacattcaaaggatgaagcaaggagctcttttagtcaacagtcaacctgcgtcgtgactaatctaagtaagcctagacctatgcggattgctaaacaacagtctttagagacctgcgagaagacagtgagcgaaagctcacaaatgactgagcaccggaaggtgtccgatcatatccagtggttcaataaactcagcctgaatgagccaaacaggatcaaagtcaaatctcccctgaagttccaacggacgcccgtgcgccagagtgttcggcggataaatagtcttttggagtactcacgccaaccaactgggcacaaactggcttcactgggggataccgcatcccccctggtgaagtccgtgagctgcgacggcgccctttcatcctgcatcgaatctgccagcaaggactccagtgtttcttgcatcaagtctggcccgaaggaacagaaatctatgagctgcgaagaatccaatattggcgctatctctaagtccagcatggagcttccctctaaaagcttccttaaaatgcgcaagcaccccgacagtgtcaatgcctctctccgtagtactaccgtctataaacagaaaatcctgagcgatgggcaggtcaaagtgccccttgatgacctgaccaatcatgatatagtcaaaccagtggtgaacaataatatgggcataagctcgggcattaacaatagggttctgagaaggcccagtgagcgaggtcgcgcctggtacaagggttcacccaaacatcctattggcaaaacccagcttctccctacctctaagccagtcgacctgtag

SEQ ID NO: 203265 - DNA, 2505 bp, synthetic construct
  misc_feature 1..2505: note = Description of Artificial Sequence: Synthetic coding sequence
  source 1..2505: mol_type = other DNA
atggacagcagcaacctggccgtgatcttcgcccccaacctgctgcaaacctccgagggccatgagaagatgagcagcaacactgaaaagaaactgagattacaggcagccgtggtacagaccctgattgactacgccagcgatatagggcgagtgcctgactttatcctggagaagattcctgctatgctcggaatcgatggactgtgtgccaccccttcccttgaaggattcgaggagggggagtacgagaccccaggcgaatacaaacgcaaacgccgtcagtctgtgggagatttcgtcagcggcgccttgaataaatttaagcctaatcgtactccctcaatcacaccgcaggaagaacggattgcccagttgtccgaaagtcccgtcatcctgacacccaacgcaaagaggacactccccgttgattctagtcatggtttctctagtaaaaaacggaagtccatcaaacataactttaactttgagctgctgccgtctaatctatttaattcttcctcaacgcctgtaagtgtacacatcgacacgtctagcgaaggttcaagtcagtccagcctttctcccgttctgatcggaggaaaccatttgataacagcaggcgttcctaggagaagcaagcgtattgccggtaagaaggtttgtagagtcgaatcgggaaaggcgggctgctttagtccaaagatctctcacaaagaaaaggttagacgttcactgaggttgaagttcaaccttggtaagaacgggcgagaggtgaacggttgctcaggggtcaaccgatatgaatccgttggctggagactggccaaccaacagagccttaaaaatcggattgagagcgtaaagactggccttctgttctcacctgatgtggatgagaaattgcctaaaaagggtagcgagaaaatcagtaagtctgaagaaaccctgctgacacctgagagactggtgggtacaaactatcgaatgtcatggacgggcccgaacaacagcagtttccaggaagttgacgccaacgaagcctcatcaatggtggagaacttggaggtggagaatagcctagagccagacattatggtggaaaaatctcccgcaactagctgcgaactgaccccttcaaaccttaataataagcacaactccaatataacatcaagccctctgtccggcgatgagaataatatgacgaaggaaaccctggtaaaagtgcagaaggcattctccgagagtggatccaacttacatgcactcatgaaccagcgtcagtcgtctgtcaccaacgttgggaaggtgaagttgacagagcctagctacctcgaggatagtccagaggagaatctttttgagactaatgacttgactatagttgagagtaaggagaaatatgagcatcataccggaaagggcgagaagtgcttctctgaacgcgacttctccccgctgcagacccagacatttaacagggaaaccaccatcaaatgctactcaacccagatgaaaatggaacacgaaaaggacattcattcaaacatgccaaaagactatctcagcaagcaagagttcagcagcgacgaggagattaagaaacagcaatcccccaaggataagctgaataacaaacttaaagaaaatgagaacatgatggagggcaacctccccaaatgcgctgcccactccaaggatgaagcccggtcgtctttctcccagcagtctacctgcgtcgtgaccaacctctcaaagccaagacctatgaggatcgcaaagcagcagagtcttgagacctgcgagaagacagtttcagagagcagccagatgacggaacatcgcaaggtttcagatcatattcaatggtttaacaaactatccctgaatgagcccaacagaattaaagttaagtccccgttgaagttccaacgaacaccggtgagacagtcagttcggcgaattaatagcctgctggaatattctagacagcctaccggccacaagctggcttctttgggagatactgccagcccactcgtgaagagcgtgtcttgcgatggggcattgagctcctgcatcgagagcgcaagcaaggattcttccgtgtcctgcattaagtctggccccaaagagcagaagtccatgtcctgtgaggaatcaaacatcggggcaatttctaaaagctcaatggaactgccctctaagtcttttttgaaaatgaggaaacaccccgattcagtcaatgcttccctaagaagtacgactgtttacaagcagaaaatcttaagcgatggacaggtaaaagttccacttgacgacctgaccaaccacgatatcgtgaaacccgtcgtcaataataacatgggcatctcttccggaataaacaatcgcgtgttgagacggccatctgagagggggagagcctggtataagggcagccctaagcaccctattggcaaaacccagctgctccccaccagcaaacctgtcgacctgtag

SEQ ID NO: 203266 - DNA, 1506 bp, synthetic construct
  misc_feature 1..1506: note = Description of Artificial Sequence: Synthetic coding sequence
  source 1..1506: mol_type = other DNA
atgtgggaccagcggctggtgcggctggccctgctgcagcacctgagggctttttatgggatcaaggtcaaaggggtgcgggggcaatgcgacagaaggcgacacgaaactgctgccacagaaattggcggcaagattttcggcgtgccgtttaatgcccttcctcacagtgccgtcccagagtacggtcacataccaagctttcttgttgatgcttgtacctctttggaagatcacatccacacggaaggcctgtttaggaagagcgggtccgttatccgcttgaaagctctgaaaaacaaagtggaccacggcgaagggtgcctctcatcagcaccaccttgcgacatagccggcctcctcaaacaattctttagggagctcccagaacccatcctccctgctgacctgcatgaggcactcctgaaggcccaacaattaggcacggaggagaaaaacaaggccacactcctcctgagctgcttactagccgaccacaccgtgcacgtgcttaggtacttcttcaattttttaaggaacgtgagtcttagaagctctgagaataagatggactcctcaaacctagccgtgatctttgcaccaaaccttctacaaaccagcgaaggacatgagaagatgtcctcaaatactgagaaaaaattgagactgcaggccgcggtcgtgcagactcttatcgactatgcctctgatataggaagggttccagacttcatcctggaaaaaatccccgccatgcttggaattgacgggctatgtgcaacccctagcctggaaggattcgaggagggagagtacgagactcccggtgagtataagcgcaagcggaggcagtcggttggagattttgtttccggtgcactgaataagtttaaaccaaaccggaccccttcaatcacaccgcaggaggagaggatagcccagctctcagagtcacccgtgatcttgacgccaaatgccaagcgaaccctgcccgtcgattcaagccacggcttttccagtaagaagcggaagagcattaaacataactttaacttcgagctcctgccgtcaaatctgtttaatagctcctctaccccagtgtctgtgcatatcgatacgagctcagagggatctagccagtcatccctatctccagtactgattgggggaaatcacctcattacagctggtgttccacgacgatctaagcgcatcgccggcaagaaagtgtgccgggtggagagcgggaaagccggatgtttttcaccaaaaatctctcacaaggagaaggtgagacgctccctgcgactgaagtttaacttagggaaaaatggccgggaggtgaatgggtgttccggagtgaaccgctatgaatccgtggggtggcgcttagccaatcaacagagcctgaaaaatcgtatcgagtccgttaagacaggactgctcttttcaccagatgtagatgaaaagcttccgaagaaaggcacattcacgtactattgttag

SEQ ID NO: 203267 - DNA, 2385 bp, synthetic construct
  misc_feature 1..2385: note = Description of Artificial Sequence: Synthetic coding sequence
  source 1..2385: mol_type = other DNA
atgaagatggccgaccggagcggcaagatcatccccggccaggtgtacattgaagtagaatatgactatgagtacgaggcgaaagaccgcaagatagtaatcaagcagggagaacggtatatattagtgaaaaaaactaacgacgactggtggcaggtgaagccagatgagaatagcaaagccttctatgttcccgcccagtacgtgaaggaagtaaccaggaaggccctcatgcctccggtgaagcaggtggccgggctgcctaataacagcactaaaatcatgcagagtcttcatctacagcggtctaccgagaatgtgaacaaactacccgaattgtctagttttggcaagcccagttcttctgtgcaaggaaccggcctgattcgggatgcaaaccagaactttggcccatcttacaatcaaggccagaccgtgaacctcagcctggaccttacccacaacaatgggaagttcaataatgacagccactcacctaaagtgtcaagccaaaatcgtacaagatcattcgggcacttccctggaccggagtttctcgacgtggagaaaacgtcctttagtcaggagcaaagttgcgattctgccggcgagggctccgagcgcatacaccaagacagcgagtccggcgacgaactttcatctagcagtacggagcagatccgcgctacgaccccgcctaaccagggccggccagacagccccgtctacgccaatctccaagagcttaaaatctctcagtctgccctccctccactccctgggtctcccgccatccaaattaacggcgagtgggaaacccacaaagacagctcaggcaggtgttattattataaccgagggacgcaagagagaacctggaaacctcccaggtggacccgagacgcttcaatttctaaaggagactttcagaacccaggagatcaggaatggctcaagcacgtagacgatcagggcaggcagtattactatagcgccgatggctctcggtcggagtgggagctccctaagtataacgcttcgagtcagcagcagcgtgagatcatcaagtcacggtccctggaccggagactccaggaacccatagtactgaccaagtggcggcattccacaatcgtgctggatacaaacgataaggagtcccctacggcttctaaaccttgtttcccggaaaatgagtctagtccatcatcccctaagcatcaagacaccgatcaggaaaagtatgggcttctgaacgtgacaaaaatagccgagaacggtaaaaaagtgcggaagaactggctgtccagctgggcagtgctgcagggtagttccctgttgtttaccaagacacaggggtcgtcaactagttggttcggtagcaatcagagcaagccagagttcactgtcgatttaaaaggggcaactatagagatggcttctaaggacaaaagtagtaagaagaatgtctttgagctgaaaaccagacagggcacagaacttttaatccaaagcgacaacgacactgtgatcaatgattggtttaaggtgctcagtagcaccataaataaccaagccgtcgagaccgacgaggggatagaagaagagatacccgacagccctgggattgaaaagcacgacaaagagaaggagcagaaggaccctaagaagcttcggtcttttaaagtgtcctcaatagactcctctgagcagaagaaaactaaaaaaaatcttaagaagttcctgacccgcaggcctacactgcaggccgttcgcgagaagggatatatcaaggatcaggtgtttgggagcaacctggccaacctgtgtcagcgcgagaacggcaccgtgcctaaatttgtaaagctctgtatcgagcatgtcgaagagcatggactggacattgatggtatctacagagtttccggcaacttagcagtcattcaaaaactgcgtttcgccgtgaaccatgacgaaaagctagacctgaacgacagcaaatgggaggacattcatgtcattaccggggctctcaaaatgttttttagagaactccctgagcctctattcacattcaaccactttaacgatttcgtaaacgccattaagcaagagcccaggcagcgcgtggccgccgttaaggatctcatccggcagctaccaaagccgaaccaagatactatgcagattctgtttaggcatctgcgacgtgtcatcgaaaacggcgagaaaaatcgcatgacctaccagtccatcgcaattgtgtttggccccacactgctcaaaccggaaaaggagacagggaatatagccgttcatacagtgtaccagaaccagatagtggagctaatcctactggaactttcaagtattttcggaaggtag

SEQ ID NO: 203268 - DNA, 2541 bp, synthetic construct
  misc_feature 1..2541: note = Description of Artificial Sequence: Synthetic coding sequence
  source 1..2541: mol_type = other DNA
atgaagatggccgaccggagcggcaagatcatccccggccaggtgtacattgaagtggagtatgattacgaatatgaagccaaagaccggaaaatcgtgattaaacagggcgagcgttatatacttgtgaagaagacaaatgatgactggtggcaggttaagcccgatgaaaacagtaaagcattttacgtcccagcccagtatgtgaaggaggtgacacggaaagcactaatgccaccggtgaaacaggtggctgggctccccaataatagcacgaaaataatgcagagcctccatctgcaaagatccaccgagaatgttaacaagctgcccgagctttccagcttcgggaagccgtccagctccgtacagggcacaggcctcatcagggatgccaaccagaactttggtccctcctacaatcaggggcaaacagtgaacctgtccctcgaccttacgcacaataatggaaagttcaataatgattctcatagccctaaagtgagctcccaaaacaggacaaggagtttcgggcattttcctggcccagagttccttgacgtcgaaaaaacatccttcagtcaggagcagagctgtgactctgccggcgagggtagcgagagaatccatcaagattcagaatccggcgacgaactatcctcatcctccacggaacagatcagggccacgactccccctaatcaggggcgcccggatagccccgtctatgcaaatttacaagagctgaaaatttcccagtccgccttgccgccactgcctgggagcccagctatccagatcaacggcgaatgggagacacacaaggactcgtccggacggtgctattattataaccgtgggacccaggaaaggacctggaagccgccccgctggaccagagacgcatcgatcagtaagggtgattttcagaatccaggagaccaggaactgctgtctagcgaggagaactactatagcacttcttatagccagagtgattcccagtgcggatctcctccccgtgggtggagtgaggaattggacgaacgcggtcacaccctgtacacctccgactacacgaacgaaaaatggctgaagcacgtcgatgatcaaggcaggcagtattactatagtgctgatggcagcaggagcgaatgggaacttcccaagtacaacgcttcctctcaacaacaacgagaaattatcaagagcagatctttggatagaagacttcaggagcccatcgtgttgacaaaatggaggcactctacaattgtgctggatacaaatgataaggagtccccgaccgctagcaaaccctgcttccccgagaatgaatcctctccatcctcgcctaaacaccaggacaccgcgagcagcccaaaagatcaggaaaagtatgggctcctgaacgtcaccaagattgccgagaatggcaagaaggtgcgtaaaaattggctgagctcttgggccgtgctgcaaggatcaagcttgctgttcactaaaacccagggcagttcaacctcctggttcggatcaaatcagtccaaacctgagtttaccgtcgatcttaaaggggctaccattgagatggcatccaaggacaagtcctccaagaagaacgtgtttgaactgaaaacacgccagggaacagagttgctcatccagtcagacaatgatacggtcatcaatgattggtttaaagtgttgtcaagcactatcaacaatcaggccgtggagaccgatgagggtatagaagaggaaatacccgattctcctgggatcgaaaaacatgacaaagagaaagagcagaaggatcctaaaaaactgaggtcttttaaggtgtcgagtatcgatagctctgagcagaagaaaaccaaaaagaacttgaaaaagttcctgactagaaggccaacccttcaggctgtccgggaaaaggggtacatcaaggatcaggtttttggctcaaatctcgctaatctgtgccagagggagaacggcacggttcccaagttcgtgaaactctgcatcgagcatgtcgaggaacacggcctcgacattgatggcatttacagagtgtctggaaacctggctgtgattcagaaactgcgattcgcggtgaatcacgatgagaagctagacctcaatgacagcaaatgggaagacattcatgtaataacaggtgccctgaagatgttcttcagggaactccctgagcccctcttcactttcaatcacttcaacgatttcgtgaacgccatcaaacaagagccacggcagcgggtcgctgcagtcaaggatctaatacgtcaactgcccaagcctaatcaagatactatgcagatcctctttagacacctgagacgcgtcatcgagaatggcgagaagaatcgcatgacctatcagtctatcgctatcgtgtttgggcctacactactgaaacctgagaaggagactggtaatattgccgttcacacagtataccagaatcagattgttgagctgatcctactggagctttccagcatcttcggacggtag

SEQ ID NO: 203269 - DNA, 2385 bp, synthetic construct
  misc_feature 1..2385: note = Description of Artificial Sequence: Synthetic coding sequence
  source 1..2385: mol_type = other DNA
atgaagatggccgaccggagcggcaagatcatccccggccaggtgtacatcgaagtggaatacgattacgagtatgaagcgaaggataggaaaatcgtgatcaaacagggcgaaagatatatattagtcaaaaaaaccaacgatgattggtggcaagtgaagccagacgagaattccaaggctttctatgtgcccgctcagtatgttaaggaagttacaagaaaggccctcatgcctcccgtgaaacaagttgctggccttcccaataattcgaccaaaatcatgcagagtctgcatctccagcggagtaccgaaaacgtcaataaattgcccgaactgtcttcctttggtaagccctctagcagcgtgcagggcacgggcctcatacgggacgcaaaccagaattttgggcccagctataatcagggtcaaacagttaacttgagtcttgatctgacccacaacaacgggaagtttaacaatgattcacactccccaaaagtgagtagtcagaatcggacgcgttcattcggacatttccctgggcccgagttcctggatgtggagaaaacaagtttttcccaggaacagtcttgcgactccgccggggagggaagcgagagaatccaccaagactcagagtctggagacgagctaagcagctccagcaccgaacagatccgcgccactacaccccccaatcaggggaggcctgactctcctgtttatgccaatcttcaggagctcaaaatctcccaatcagctttacctcccctcccggggagtccggccatccagatcaatggggagtgggagacacataaagactctagtggtcggtgttactactacaataggggaacccaggagcgaacgtggaaaccaccaagatggacccgggatgccagtatttctaagggtgattttcaaaatccaggtgatcaggaatggctaaaacatgttgacgatcagggacgccaatactactatagtgctgacggctccaggagcgagtgggaactccctaagtataatgcctcctcccagcagcagcgggagattattaagagccgatctctggaccgcaggctacaggagccgatcgtcctgacgaagtggcgccactccactatcgttttggacacaaacgacaaggaatcaccaaccgcaagtaagccgtgctttcccgaaaacgaatccagcccctcctcgccaaagcaccaggacactgaccaggaaaagtatggccttctcaacgtgactaaaatcgccgaaaacggcaagaaagtacgcaaaaattggcttagcagctgggccgtgctgcagggctcatcgttgttattcaccaaaacccaggggagcagtacctcctggttcggttcaaaccagagtaagcccgagttcacagtcgacctcaagggcgctacgattgaaatggctagtaaagacaaaagtagcaaaaaaaacgtgttcgagctgaagacacgacaggggacagagctgttgatacagtcagataacgacactgtgatcaacgactggttcaaggtgctgtcatctaccattaataaccaggcagtggagacggatgaaggaattgaggaagaaatccccgacagccctgggatcgagaagcatgacaaggagaaggagcagaaagacccgaaaaagctccggagtttcaaggtctcttctatagacagcagtgagcaaaagaagaccaaaaagaaccttaaaaaatttcttacgaggcgacccacactccaggccgtgagggagaagggatacatcaaggatcaggtcttcggatctaatctggctaatttgtgtcagcgagagaacggaacagtgcccaagtttgtgaaactgtgtattgaacatgttgaggagcacggcctcgatatagacggtatttaccgggtgtcaggaaaccttgccgtgattcagaaattaaggttcgctgtgaatcatgatgagaaactagatctcaacgactccaagtgggaagatattcatgtgatcaccggtgcactgaaaatgttctttagagagctcccagagcccctctttacctttaaccacttcaacgattttgttaacgctatcaagcaggagccgaggcagagagtggccgccgttaaagatcttatccgccagttgccaaaacctaatcaggacaccatgcaaattctcttccgccatctccggcgcgtaatcgagaacggggagaagaatcggatgacatatcaaagtattgctatagtttttggtcctactctgctgaagccagagaaagagaccggaaatattgctgtccacaccgtataccagaaccagatcgtggaactcattctgctcgagctgagtagcatctttggccgttag

SEQ ID NO: 203270 - DNA, 2451 bp, synthetic construct
  misc_feature 1..2451: note = Description of Artificial Sequence: Synthetic coding sequence
  source 1..2451: mol_type = other DNA
atgaagatggccgaccggagcggcaagatcatccccggccaggtgtatatcgaggttgaatatgactacgagtacgaggccaaggacagaaagatcgtgatcaaacaaggagagaggtatatcctggtgaagaaaactaatgatgattggtggcaagtgaagcccgatgagaacagcaaggcgttttacgtgcccgcccagtatgtgaaggaggttacccggaaggccctgatgccaccagtaaagcaggtggcggggcttccaaacaattcaacgaagatcatgcagagcctgcacctgcaaagatctacagaaaatgtgaacaaattgcctgaacttagtagcttcggaaaacctagcagctccgtccagggaacagggttaatacgtgatgcaaaccagaactttggcccttcatataaccaggggcagaccgtgaatctgagcttggacttgacccacaataacggcaagttcaacaacgactcacactcacccaaggtcagctcccaaaaccggactaggagcttcgggcacttccctggacccgagttcctcgatgtcgaaaaaacctcatttagtcaggagcagagctgtgactccgcgggtgagggctccgaaaggatccaccaggactcagagtccggggacgaactgagttcttcctctacggaacagatcagagccacgactcctccgaaccaaggcaggccggatagccccgtctacgcgaacctgcaagagctgaagatctcccagagcgccttacccccactccctggttcgccggcgatccaaatcaacggtgagtgggaaacacacaaagatagctccggaagatgttactattataaccgaggaacacaagagaggacatggaaaccccccaggtggacgagggatgctagcatatccaagggtgacttccagaatccaggggaccaggagctgttgagctcagaggaaaactattactccaccagctattcacagagcgatagtcaatgcggttctcctcctagagggtggagtgaagaactggacgaacggggtcacaccctctacaccagcgactacacaaacgagaagtggctgaagcacgtggacgatcaggggcggcagtactactactctgctgatggatcccggtcagagtgggagctccccaagtataacgcgtcttcgcaacaacaacgcgaaattatcaaaagccgtagtctggatcgcagactgcaggaacccatcgtcttgacaaagtggagacattccaccattgtcctggataccaacgataaagaccaggaaaagtacggactccttaatgtgaccaagattgcagagaatggaaaaaaggttcgcaaaaactggctcagttcttgggcagtgctgcaggggagctcacttttattcacgaaaacgcaggggagttccacatcatggtttggatcaaaccagtccaaacctgagttcacggtggacttaaagggcgccactatcgagatggcctctaaagacaagagttccaagaagaatgtgtttgaactgaaaacgaggcaggggaccgagcttctcatacaatctgacaacgataccgtcatcaacgactggttcaaggtcctgagttcgacgatcaacaaccaggctgtggagactgatgagggtatagaagaagagattccagactcccccgggatcgaaaaacatgacaaagagaaagagcagaaagatcctaaaaagctgaggagcttcaaggtgtcttcaattgacagttctgaacagaagaaaactaaaaagaacctgaagaaatttctgacccgacgccccacactccaagcggtaagagaaaaaggctacatcaaagatcaggtcttcggaagcaatttggccaacctgtgtcaaagggagaatgggacagttcccaaattcgtaaagttgtgtattgaacacgtagaagagcacgggctggacatcgatgggatataccgggtctccggcaatttagccgtgattcagaaacttagattcgcggtgaaccatgacgagaagctggatctgaacgattctaagtgggaagatatccacgttatcactggagcactcaaaatgttctttcgtgagctgcctgagccgctgttcacttttaatcactttaacgatttcgtcaatgccatcaaacaggagccccggcagcgggtcgccgctgtgaaagacctgattcgacagctgcctaaaccaaaccaggataccatgcaaatcctctttaggcatctaaggagggttattgagaacggcgaaaaaaacaggatgacatatcagagcattgccattgtcttcggcccaactctcctcaagccagagaaggaaaccggaaatatcgccgtgcacacagtgtaccagaaccagattgtggagctgattctgctggagctgtcatctatctttgggcggtag

SEQ ID NO: 203271 - DNA, 2526 bp, synthetic construct
  misc_feature 1..2526: note = Description of Artificial Sequence: Synthetic coding sequence
  source 1..2526: mol_type = other DNA
atgaagatggccgaccggagcggcaagatcatccccggccaggtgtacattgaggtagaatacgactacgaatacgaggccaaggatcgaaaaattgtgattaagcagggggaacgctatatcctggtcaagaagactaatgacgattggtggcaggtcaaacccgacgaaaactccaaggccttctacgtgcccgcccagtatgtgaaggaggtgactcggaaggcgctcatgcctcctgtcaagcaggtcgccggcctgccaaacaatagcaccaagataatgcagtccctgcacctgcagcgcagcactgagaatgtcaataagttgcccgaactatccagttttggcaagccgtccagctctgttcagggcaccgggctcatcagagatgccaatcagaatttcggaccgtcatacaatcaaggccagactgtcaatctttctctggacctgactcacaacaatggaaaatttaataatgattctcactccccaaaagtaagctcgcagaacagaacccgcagttttggacacttccccgggcccgagttccttgatgtagagaagactagtttttctcaggaacagtcctgtgattccgcgggagaaggatcagaaaggattcatcaggacagtgagtccggggatgaactgtcctcctccagcaccgaacagatcagagcaaccacccctcccaaccagggtcggcctgattcccccgtgtatgccaacctgcaggagcttaagatctcccagtccgcgctgcctccactcccggggtctccggccatacagatcaatggggagtgggagacacataaggattccagtgggcggtgttattattacaataggggcacgcaggaacgcacctggaaacctcctaggtggacccgggacgcaagcataagcaagggggactttcagaaccccggggatcaagagttactctcaagcgaagagaactactatagtacttcgtatagccagtcagacagtcaatgcggatccccgccacgagggtggagcgaggagctcgacgaaaggggacacactctgtatacatccgactacactaacgaaaaatggctgaagcatgtggacgatcaggggcgccagtactattactctgcggatggcagtagatcggagtgggaactgcccaagtacaacgcctccagccagcagcagagagaaatcatcaagagtagatctctggatcgacggctgcaggaaccaatcgtgctcaccaagtggaggcattctacaattgtgctggataccaatgataaggagagcccgactgcctcgaagccctgtttccccgagaacgagtccagccccagcagcccaaagcaccaggataccgatcaagagaaatatggactgcttaacgtgacaaagatagccgaaaacggtaaaaaagttcgcaagaactggctcagctcgtgggccgtgctgcagggcagctccctcctcttcacgaagactcaggggagttcgacatcctggttcggaagcaaccagtcaaaacctgagttcactgtcgacctcaagggcgcaacaatcgagatggcttctaaagacaaatcgtcaaaaaagaacgttttcgagctgaagacaagacaaggcaccgaactgcttatccagtcagataatgacacagtgatcaatgactggtttaaagtgcttagttctactattaataaccaggccgttgagacagacgagggaattgaggaggaaattccagattctccaggcatcgaaaagcacgataaggagaaggagcagaaagatccgaagaagctaaggagcttcaaagtcagctcgatagactcctccgaacagaagaagactaaaaaaaatttaaagaaattcttgacacgcaggccaacactccaggccgttagagaaaaggggtacatcaaggaccaggtttttggtagtaatttggctaacttatgtcagcgggagaacgggaccgtgcctaagttcgtcaagttgtgcattgagcatgttgaggagcacggcctagatattgatggtatctaccgggtgtcagggaatcttgccgtcatacagaagctgcgatttgctgtaaaccatgacgaaaagcttgatcttaacgactctaaatgggaagacatccatgtcatcacaggagccctcaaaatgttttttcgggaattacctgaaccacttttcaccttcaaccactttaatgactttgtgaatgctatcaagcaggagcctaggcaaagggtggcagccgttaaagatttaatacgccagctgcccaaacccaatcaggacaccatgcagatactttttaggcatctcaggagggttattgagaacggcgagaaaaatagaatgacttatcagtccattgccattgtttttggccctaccctactgaagcccgaaaaggagacaggtaacatcgccgttcacaccgtgtatcagaatcaaatagttgagttgatattgttagagttgtcttcaatcttcggcagatag

SEQ ID NO: 203272 - DNA, 591 bp, synthetic construct
  misc_feature 1..591: note = Description of Artificial Sequence: Synthetic coding sequence
  source 1..591: mol_type = other DNA
tgaagcaccagctacagccagagcgacagccagtgcggcagccccccacgcgggtggtctgaggagctcgacgaacgggggcacacactttacactagcgactacactaatgaaaagtggttaaaacacgtggatgaccagggcaggcagtactattacagcgccgacgggagccggtccgagtgggaattgcctaagtacaatgccagcagccaacagcagagagagatcatcaagtctcgcagcctggatcggcggctacaggaaccaattgttctcactaagtggcgacattccaccatcgttctggacaccaacgataaggaatcaccaacagcatcaaaaccatgcttccccgagaatgagtcttcaccttctagcccaaaacatcaggacactgatcaggagaaatacggcctgttgaacgtcaccaagatcgccgaaaacgggaagaaagttaggaagaattggctgtcaagctgggctgtacttcagggaagctcacttctattcaccaagactcagggatccagcacgtcttggtttggctccaaccagtctaagcctgagttcactgtggaccttaagtag

SEQ ID NO: 203273 - DNA, 2646 bp, synthetic construct
  misc_feature 1..2646: note = Description of Artificial Sequence: Synthetic coding sequence
  source 1..2646: mol_type = other DNA
atgaagaagcagttcaaccggatgaagcagctggccaaccagaccgtaggccgcgcagaaaaaaccgaagtgttatctgaggacttgctgcagatcgagcggagattggacactgtgaggtcaatttgtcatcactcacataagagacttgtcgcatgttttcagggacagcatggaacagacgccgaaagacgccacaaaaagctgcccttgacagctttggcccaaaacatgcaggaggccagcacccagctcgaggatagcctcctaggcaaaatgcttgaaacctgcggggatgctgaaaaccaactcgccctcgaattatcacaacacgaggtgttcgtcgagaaagaaatagtagatccactctatggcattgctgaggttgaaatccccaacattcagaaacagcgcaagcagcttgcccggctggtgctcgactgggactcagtgagggcccggtggaaccaagctcacaagagctcaggcactaacttccagggtttgcccagcaagatcgatactctgaaggaggaaatggacgaagccggtaataaagtggagcagtgcaaggatcagctggccgccgatatgtacaatttcatggctaaggagggggaatacggcaagttcttcgtcacgctgttggaggcccaggcagactatcaccgcaaggctctcgcagtgctcgagaaaactctccctgaaatgcgcgctcaccaagataagtgggctgagaaacccgcctttgggacacccttggaggaacacttgaaacgctctgggagggaaatagccctccccatagaagcatgcgtgatgctgctactagagactggaatgaaggaagaagggctgtttaggatcggcgcaggagccagtaagctcaaaaagcttaaggctgctcttgattgttccacttctcatttagacgagttctatagtgaccctcatgccgtggcgggcgctttgaagtcatacttgcgagagctcccggaaccactcatgactttcaatctctacgaagagtggacccaggtggcatccgttcaggaccaagataaaaagctgcaggacctgtggcgaacttgccagaagttgcctccacaaaatttcgtgaacttccggtacctcatcaagttcctggcaaagctggcccagactagcgatgtgaacaaaatgaccccctctaatatcgcaattgtgcttggtccaaatttgctgtgggccaggaacgagggcacactcgctgagatggccgctgctacctctgtgcatgttgttgctgtgatcgaaccaatcatccagcatgccgattggtttttcccggaggaagtcgagttcaatgtctcagaagcatttgtgccccttacaaccccttcctccaatcattcttttcacaccgggaatgatagcgacagtggaaccttagaaaggaaacgacccgcttcaatggctgtgatggagggcgacttggtaaagaaagaaagcttcggagtgaaattaatggacttccaggctcacagacgaggcggaacactcaacagaaagcatatttctcctgcgttccagccgccattgccccctactgatggatctacggtagtgcccgccgggccggagccaccaccccagtcaagccgggctgagagcagctctgggggcggcactgtcccatcctccgcgggtatccttgaacaggggccgtccccgggagatgggtctccacctaagccgaaagatcctgttagcgcggctgttccagccccgggcaggaacaactcccagattgcttctgggcagaaccagccacaggcagctgcgggatcacatcagctcagtatgggccaaccccacaatgcagccgggccgtccccccacactttgcggcgcgcggtgaaaaaacctgctccggctccacctaaaccaggaaacccacccccaggccacccaggaggccaatcctcgagcggcacctcacaacatccaccttccctgtcgcccaagcccccgacccgcagcccgagccccccaacacagcataccgggcagcccccaggccagccaagtgcaccatctcagctgagcgcccccagacggtactcctccagtttgtcacctatccaggctcccaatcatcccccaccccagccgccaacacaggcgacacctctgatgcacactaaacctaactcccagggcccaccaaatcccatggctcttcccagcgagcacggtctagagcaaccttcccacacaccaccccaaacacccactcctccatccacgccaccccttggaaagcagaacccttcactgccagccccacagactctggcaggcgggaaccccgaaacggcccaaccccatgctggcactttaccaagacctcgacccgtgcctaaacccagaaacaggcccagtgtccccccacctcctcagccacccggagtgcactcagctggtgattctagcctcacaaatactgcaccaaccgcaagcaagattgtgactgactctaactcacgcgtcagcgagccacatagatctatcttcccagaaatgcattctgactctgcctctaaggacgtgccaggccgtattcttctggatattgacaatgacacagaatccactgccctctag

SEQ ID NO: 203274 - DNA, 2412 bp, synthetic construct
  misc_feature 1..2412: note = Description of Artificial Sequence: Synthetic coding sequence
  source 1..2412: mol_type = other DNA
atgaagaagcagttcaaccggatgaagcagctggccaaccagaccgttgggcgcgccgagaagactgaagtgctctcagaggacctgcttcagatagaacggagactcgataccgtgcgctcaatctgtcaccatagtcataagagattggtggcttgctttcagggacaacatgggaccgatgccgaacgtaggcacaaaaaattgcccttgaccgccttggcccagaacatgcaagaggccagcacccaactggaagatagtctgctggggaaaatgctcgaaacttgtggtgacgcggaaaaccaactcgcgctcgaactgagtcagcacgaggtgtttgtagaaaaagagattgtggaccccctgtacggcatcgctgaggtggagatccccaacattcagaagcagcgaaagcaattggcacgtctggtccttgattgggacagcgtgcgggccaggtggaatcaggctcacaaatcttcggggactaattttcagggcctcccttcaaagatcgacacccttaaggaggagatggatgaggctggaaataaggttgagcaatgtaaggatcaattggcggccgatatgtataattttatggccaaagaaggcgagtatggcaagttctttgttaccttgctggaagcccaggccgactaccatagaaaggccctcgcagtccttgagaagactcttccagaaatgagggcccaccaggataagtgggctgagaagcctgcttttggtactcctctcgaggagcaccttaagcggtccggacgcgagattgcgctgccaatcgaagcctgcgttatgctattgctcgagaccggtatgaaggaggaggggctcttccgtattggcgccggcgcttctaagctgaagaagctgaaagccgctcttgactgctcaacttcccacctggacgagttctactcagatccgcacgccgttgccggtgcactgaaatcctacctacgtgagctcccagaacccctgatgacattcaatctgtatgaggagtggacacaggtagcttcagttcaagaccaagacaaaaaactccaggacctgtggaggacctgccagaagttaccccctcagaactttgtcaactttaggtacctcattaaattccttgctaagctcgcccagactagcgatgtgaacaagatgacgccatcaaatatagccatcgtgttggggcctaatcttctctgggcccggaatgagggaaccctagctgaaatggctgcagcgactagcgtacacgttgtggccgtgatagaacctataattcaacacgcagactggttctttcctgaggaagtcgaattcaatgtcagtgaagcgttcgtccccctgaccactccaagctcaaatcacagttttcacactggcaacgattcagactctggaacactggaacgcaaaagacccgctagcatggccgtgatggagggtgacctggtgaagaaggagtcaccccccaaacctaaggaccccgtatcagctgcggtcccggctccggggcgaaacaactctcagatcgctagcggtcagaatcagccccaagctgccgccggctctcatcagctgtcaatgggccagcctcataatgccgcgggaccatcccctcatacactgagacgtgccgtgaaaaagcccgctccggcaccccctaagcctggcaaccctccacctgggcaccccggagggcagagttcatccgggacctcccagcatccccccagcttaagcccaaagcctcccacccggagcccttcccccccaacccagcacaccggccagccccccgggcagccatctgcaccctcccagctgtctgcaccacggagatacagctcatctctctctcccattcaagctcccaaccacccacctccccaacctcctactcaggctactcctttgatgcatactaaacccaattctcagggccccccaaaccccatggccctaccatcagaacacggactcgagcagccatctcatactccaccacagaccccaactcctccctctaccccccccctgggtaaacagaatccctctctgcccgcccctcaaacactggccggcggaaaccctgaaacagcccagccccatgcggggacgctgccccggccgcgcccggtgcctaagcctcggaaccggccatccgtgcctcccccccctcaaccacccggcgtgcacagtgcgggagacagttcgttgacaaataccgccccgaccgcttcaaaaatcgtcactgacagcaactcccgggttagtgagccgcaccggtcgatctttcctgaaatgcattctgactcagctagcaaagatgtgcctggccgcattctcctcgatatcgataatgacactgaatctacagccctatag

SEQ ID NO: 203275 - DNA, 681 bp, synthetic construct
  misc_feature 1..681: note = Description of Artificial Sequence: Synthetic coding sequence
  source 1..681: mol_type = other DNA
atgaagaagcagttcaaccggatgaagcagctggccaaccagaccgtgggcagagcagaaaagacagaagtgcttagcgaggatctactccagatcgaacggagattggacacagtccgctcgatttgccaccacagccataagcgtctagttgcatgttttcagggccagcacgggacagatgccgaaaggcgacataaaaagctgcccctgaccgccctggcccaaaacatgcaggaggcctccactcagctagaggactctctcctaggcaagatgctggaaacgtgcggggatgccgagaatcagcttgcactggaactcagtcagcacgaggtattcgtcgagaaggagattgttgaccccctctacggaatcgctgaggttgaaattccgaatattcagaaacagcgaaagcaactagctcggttagtcctggactgggactccgtccgcgcaagatggaaccaggcccacaaatcatccggcaccaactttcagggtctgccttctaagattgatacgcttaaagaagagatggacgaagccgggaacaaagtcgaacagtgtaaagatcagctggcagccgatatgtacaattttatggcgaaagaaggtgaatatggcaaattttttgtcacaattagcggccgcaagaaccaaccgctgggccttccctag

SEQ ID NO: 203276 - DNA, 2523 bp, synthetic construct
  misc_feature 1..2523: note = Description of Artificial Sequence: Synthetic coding sequence
  source 1..2523: mol_type = other DNA
atgaagaagcagttcaaccggatgaagcagctggccaaccagaccgtcgggcgggccgaaaagaccgaggtcctgtccgaagacctcttacagatcgaacgccgcttggacactgtcaggtccatttgtcatcactcgcacaaacgccttgtcgcttgctttcagggccaacacgggactgatgctgaaaggaggcataagaagctgcccctcacagctctcgctcaaaatatgcaggaggccagtacacaactggaggacagtctgctaggaaagatgctggaaacatgcggcgacgccgagaaccaactggcattagagctctctcagcatgaggtcttcgtggagaaagagatagtagaccctctctatggaattgcagaggttgaaatccctaatatccagaagcagcgcaagcagttggcaagacttgtcctggattgggattccgttcgcgccagatggaaccaggcccataaaagtagtgggacaaacttccagggtcttcctagcaaaatcgacactttgaaggaagaaatggacgaggctgggaataaggttgaacagtgcaaggaccagctggctgctgacatgtataatttcatggcgaaagaaggtgaatacgggaagtttttcgtcacacttctcgaagcgcaggccgactaccatcggaaagccctcgctgtccttgagaaaactctgcctgagatgcgagctcatcaggataagtgggccgaaaagccggcctttgggacacccctagaggagcacctaaaacgaagtgggagagagatcgccctgcccatcgaggcctgtgtcatgctcttgctagagaccgggatgaaggaagagggcctgtttaggatcggagcgggcgccagcaagcttaagaaactgaaagcagccctcgactgttctacaagtcatctagacgaattctattccgacccacatgctgtcgccggggctctcaaatcttacctcagggaactgcccgaacctctgatgacctttaatctgtacgaggaatggacacaggtggcctccgtgcaagatcaggacaaaaaactccaagacctgtggcggacttgtcagaagctgcccccacagaactttgttaatttccgatatctgatcaaattccttgcaaaactcgcccagacatcagacgttaacaaaatgaccccatctaacattgcaattgtccttgggcccaatttgctgtgggccaggaacgaaggaacgcttgcagaaatggcagccgctacttccgtgcacgtggttgctgtgatcgaacccattatccagcatgctgactggttcttccctgaggaggtcgaattcaacgttagtgaagcttttgtccctctgactacgcccagctcaaaccactcctttcacacaggcaacgattccgactccggcacgctcgagcggaagcgtcccgcctctatggccgtgatggaaggtgatctggtgaaaaaggagtccttcggggtgaagttaatggatttccaagctcacagaaggggcggaaccctcaatcgcaagcatatctcgcctgcatttcagccgccgctcccacctactgatggcagtactgtggtgcctgctggacccgagccgcctcctcagagttcccgtgcggagtccagtagcggtggcggaacggtcccatctagcgccggcattctggaacagggaccatctcctggcgatgggtctcctcctaagcccaaagaccccgtttcagccgcagttccggcccctggccgcaacaattctcaaatcgctagcggccaaaatcagcctcaggccgcagcaggcagccaccagctctcgatgggccagccccacaatgcagccggtccaagccctcataccttacgaagagcagtaaagaaaccggcccccgccccacccaaacccggtaacccccctcctggacacccgggaggacagagctcatcaggtacatctcagcaccccccctcgttgtcaccaaagccaccaacgcggtccccaagccctcccacgcaacatacaggacagccacctggccagccgtcagcaccaagccagttgagtgctccacggcggtattcaagctctttgagtccaatccaagcgcccaaccacccaccgccgcagccaccgacccaagcgactcccctcatgcatactaagccaaatagccagggaccccccaatcccatggcactgccatcagaacatgggttggagcagcctagccatactcctccacagacacccacgcccccgagtacccccccactgggcaagcagaatccgagtcttccagccccccaaaccttggcaggtggtaatcctgagacagcccagccgcatgcgggcaccttaccgcggccccggcccgtgcctaaacctaggaacagaccttccgttcccccccccccacaacctcctggtgtgcatagcgcaggggattcgtctttgaccaacaccgcccccaccgccagtaagattgtcactggagtctag

SEQ ID NO: 203277 - DNA, 1992 bp, synthetic construct
  misc_feature 1..1992: note = Description of Artificial Sequence: Synthetic coding sequence
  source 1..1992: mol_type = other DNA
atgagctggctgagcagcagccagggcgtggtgctgaccgcctaccatccttcaggaaaggaccaaaccgtggggaatagtcacgccaaagccggagaggaagccaccagctcgcgtagatatggccagtacacaatgaaccaggagtcaaccacaataaaggtaatggaaaaacctccatttgatcggagtatctcccaagactccttagatgagctgtccatggaagattactggatagagcttgaaaatatcaaaaaaagcagtgagaattcccaggaagaccaggaagtagtggtcgtcaaagagcccgatgagggcgagctcgaggaggaatggctcaaagaggctgggctctccaacctgtttggcgaatcagccggggatcctcaggagtctatagtattcttgagcaccctgaccaggacccaggcggcagcagtgcagaaacgtgtggaaacggtttcacaaacgttgcggaagaagaacaagcagtaccagataccagatgtccgcgacatcttcgctcagcagagggaaagcaaagaaacagcccccgggggcaccgaaagccagtctctgcggaccaacgaaaacaagtatcaggggagagatgacgaagcgagcaatttggtcggcgaggaaaagctcatacctcccgaagaaaccccagcaccagagacggacatcaatctggaggtgtctttcgccgagcaggccctgaaccagaaggagagcagtaaggaaaaaatccagaagagcaaaggcgacgacgccacactcccatcctttcgtctccctaaagacaaaacaggaactaccaggatcggcgacctggctcctcaggacatgaaaaaggtgtgccacttggctctcatagagttgacagctctgtatgatgtgctggggatagaactgaagcagcagaaggcggtgaagattaaaaccaaggattcaggactgttctgcgtcccactcactgcacttctcgagcaagatcagagaaaggtgccgggcatgagaattcctctcatttttcagaaactgatttctcggatcgaagaacggggcctggaaaccgaaggtctgctccggattcctggtgcggctataaggatcaagaatctttgccaggaactggaagccaagttctacgagggaacctttaattgggagagcgtcaaacaacacgacgccgccagcctcttgaagcttttcattcgggagctgcctcagccacttctgtcagtcgagtacttgaaagcatttcaggctgtgcagaatctgcctaccaagaaacagcagttgcaggccctcaacctattggtcattctcttaccagatgcaaatcgagatactctcaaggccttgcttgaattcctgcagcgtgtcattgacaacaaagaaaaaaacaagatgaccgtcatgaatgttgctatggtgatggcaccaaatctgtttatgtgccatgccctcgggctcaagtcaagcgaacaacgcgagtttgtgatggctgccggaaccgctaacaccatgcatctattgatcaagtatcaaaaactcctgtggactatccctaagtttatcgtgaatcaggtgagaaagcagaatactgaaaatcataagaaggataaacgggcaatgaaaaaattattgaagaagatggcctatgatcgggaaaagtacgagaaacaggacaagtcaacgaatgatgctgatgtgcctcagggagtcatccgggttcaggctccccatctgagtaaggtctccatggccattcagctgaccgaagagttgaaagctagtgatgtgctggctaggttcctgtcccaggaaagtggcgtggctcagacattgaaaaaaggagaagtgttcctctacgaaattggtgggaatattggcgagcgatgcctcgatgatgacacatacatgaaagacctctatcagcttaatcctaatgcagagtgggtcatcaaaagtaaacccttgtag

SEQ ID NO: 203278 - DNA, 1857 bp, synthetic construct
  misc_feature 1..1857: note = Description of Artificial Sequence: Synthetic coding sequence
  source 1..1857: mol_type = other DNA
atgaaccaggagagcaccaccatcaaggtgatggagaagccccccttcgataggagcataagccaagacagcttggatgagttgagcatggaagattactggatcgagctggagaatatcaagaagtcttcagagaattcacaagaagaccaggaagtggtggtcgtgaaagaacctgatgagggcgaactggaggaggaatggttgaaggaggcagggctaagcaatttattcggcgagtcagctggcgacccccaagagagtatcgtctttcttagtaccctgactcgtacacaagcggcagcagtgcagaagcgcgttgaaactgtttcacagaccctgaggaagaagaataagcaataccaaattcccgatgtgcgcgatatatttgctcagcagagggaatcgaaagaaactgctcctggaggtacagaatctcagagtttgagaaccaatgagaacaagtatcagggcagggacgacgaggcctccaaccttgttggggaagagaagctaatcccaccagaggagacacctgccccggaaacagatattaacctagaggtgtcattcgcggagcaggcactgaatcaaaaggagtccagtaaagaaaaaatccagaaaagcaagggtgacgacgccactctgccaagcttcagactccctaaggataagaccggcaccaccaggattggtgacctggcacctcaggacatgaagaaggtgtgccatttagcgcttattgaactcaccgcactatatgatgtcctaggtattgagttgaagcaacagaaggcagtaaaaattaagacaaaagattctggcttgttctgtgtccctctcactgcactcttagagcaggatcagcgaaaggtgcctggaatgagaattcccttgatatttcagaaactcatctcccggatcgaagagcggggcctggaaaccgagggtttactgagaattcccggggctgccatacgtataaagaacttatgtcaggagctagaagccaaattttatgagggcacttttaactgggaatccgtgaagcaacatgacgcagcctcacttctcaaacttttcatccgagagttaccacagccgctattgtctgttgagtatctaaaggcctttcaggcagtgcagaatctgcctacaaagaagcaacagcttcaggctcttaatttgctagttatcttacttcctgatgccaaccgggataccttgaaggccttgctcgagtttttgcaacgggtgatcgataataaggaaaaaaacaagatgactgtgatgaatgttgccatggtgatggcacccaacttattcatgtgccacgcgctcggcttgaaatcgtctgagcaaagagagtttgtcatggccgccgggactgccaacacaatgcacctcctcattaaatatcagaaactcctatggacgattcctaaatttattgtgaatcaggtgcgcaagcaaaacaccgaaaaccacaagaaggacaagcgcgcgatgaaaaagttactcaagaaaatggcctacgatcgcgaaaaatacgagaagcaagataaatccaccaatgacgccgacgtccctcagggggtgattagagttcaggctcctcatctaagtaaagtgagcatggcgatacagcttacagaagagttaaaagcttccgatgtgctcgcccgcttcctgtctcaggagagcggggtcgcacagaccttaaaaaagggcgaggtgtttttatacgagattggggggaacattggcgaaaggtgcttggacgatgacacatatatgaaggacctctaccagcttaacccgaacgccgaatgggtgatcaaaagcaaacctctgtag

SEQ ID NO: 203279 - DNA, 1485 bp, synthetic construct
  misc_feature 1..1485: note = Description of Artificial Sequence: Synthetic coding sequence
  source 1..1485: mol_type = other DNA
atggccaccgaggcccagagcgagggcgaggtgcccgcccgggagtccgggcggagtgatgcgatctgtagtttcgtcatttgtaatgacagctcactgaggggccagcctatcatctttaaccccgatttctttgttgagaaactccggcacgaaaaaccagagatctttacagaactggtagtttcaaacatcactagactgatcgacctgccaggtaccgaactcgctcagctcatgggagaagtggatctgaaacttcccgggggcgccgggcccgctagcggttttttccgttccttaatgtctctcaagcgtaaagagaagggggtgatcttcggttcccctctcacagaggagggaatcgcacagatctatcagttgattgaatatctgcacaagaacctgcgggttgaagggttattccgagtacccggcaattctgtgcgtcagcagatcctgcgtgatgcactaaataatggcaccgacatagacctggaatccggcgagtttcattccaacgatgttgccaccttgttgaagatgttcctgggagagttgcctgaaccgctgttaacccacaagcactttaacgcacaccttaaaattgcagacttaatgcagtttgatgacaaaggcaacaagacaaatatacccgacaaagacagacaaattgaagccttacagctgctttttctcattctcccgccccctaaccggaaccttctgaagctcctgttggacctgttatatcaaacagcaaaaaagcaggataagaacaagatgagcgcctataacctggccctcatgttcgcccctcacgtcctgtggcctaagaacgtcacagcgaacgatcttcaagaaaacatcaccaagctgaattcaggtatggcttttatgattaagcacagtcagaaactgttcaaggcaccagcatatatcagggagtgtgctcgcctccactatctcggatctaggacccaggcctctaaggatgatctcgacctcattgcttcctgtcacactaagagttttcaacttgcgaagtcccagaaaaggaatcgggtcgattcttgcccacatcaggaagagactcaacaccataccgaggaggctcttagagagttgttccaacacgtgcacgacatgcccgagagtgccaagaagaagcagctgataaggcagtttaataagcagtccctgacccagacaccaggccgggagccttctactagtcaggttcagaagcgcgcaaggtctaggtcatttagcggcctcatcaagcggaaagtgctgggcaatcagatgatgagcgaaaaaaagaagaagaaccccacaccagaaagcgtggccataggagagctaaagggaacatcaaaggaaaatagaaatctacttttcagcggaagtcctgcagttactatgaccccaacgaggctgaaatggagcgaaggaaagaaagaagggaaaaaagtgttcctgtag

SEQ ID NO: 203280 - DNA, 1458 bp, synthetic construct
  misc_feature 1..1458: note = Description of Artificial Sequence: Synthetic coding sequence
  source 1..1458: mol_type = other DNA
atgccccaccagaagctgagcgccctgatcgacgccatctgcagctttgttatctgcaatgacagtagccttaggggacagcccatcattttcaatccagacttctttgtcgaaaaactccgacacgaaaaacctgagatattcacggaacttgtagtatcaaacatcactcgactgatagatctccctggcaccgaactggcacagttgatgggagaggtggacctgaaactgcccggcggggctggtccagcctccggattcttcaggtccctcatgtcactgaagaggaaggaaaagggtgtgatctttgggtcccctctcacagaggaggggattgctcagatataccagctaatagagtacctacacaaaaatctgcgggttgaaggcctatttagagtgccaggcaattcagtccgccaacagatcctgagggatgcactgaacaatggaacagacatagatctggagtctggcgagttccactcaaacgacgtggctacacttttgaagatgttccttggtgagctgcccgaaccgcttctcacgcataagcactttaatgcccacctcaaaattgctgaccttatgcagttcgatgacaagggaaataagaccaatatccccgataaggacagacagatagaggcgctgcaattgttgtttctgattttaccaccacctaatcggaacctcctgaagcttctgttggatctgctctatcagacagctaagaagcaggataagaacaaaatgtctgcctacaatctggctctcatgttcgcaccacacgtcctttggcctaagaacgtcactgccaacgacttacaggagaacattaccaagctcaattccggaatggcctttatgatcaagcattcacagaaactgtttaaagctccggcctacatcagagagtgcgccagactccattatctgggttcgaggactcaggcctcaaaggacgatctggacttgattgcatcgtgtcatacaaaatcctttcaattagctaagagccagaaaaggaatagagtcgatagttgcccccatcaggaagagactcagcatcatacggaggaggccctcagagagctgtttcagcacgtccacgatatgcctgagtcggctaagaaaaaacagttgattcgacagtttaataaacagtccctgacacaaaccccaggccgcgaaccctccacctcccaggtccagaagcgtgcaaggtccaggagcttttcaggcctgataaagaggaaagttcttgggaaccagatgatgagcgaaaaaaagaaaaagaacccaactccagagtccgttgccattggggagctgaagggaaccagtaaagaaaatagaaatcttctgttttcaggctccccagccgtgactatgacccctacgaggctcaagtggtctgaggggaagaaggagggtaagaaggtcttcttgtag

SEQ ID NO: 203281 - DNA, 1398 bp, synthetic construct
  misc_feature 1..1398: note = Description of Artificial Sequence: Synthetic coding sequence
  source 1..1398: mol_type = other DNA
atggccaccgaggcccagagcgagggcgaggtgcccgcccgggagagcggcagaagtgacgccatttgcagcttcgtgatatgcaacgatagctctcttagagggcagccaataatattcaaccctgatttcttcgtggagaagcttcgccacgaaaagcctgaaatctttaccgagctggtggtgagtaacatcactcggttgattgacctacccgggacagaactggctcagctgatgggggaagtcgacctgaaactgcccggcggcgcaggacccgcaagcggattttttcgctcactaatgtctttgaagaggaaagaaaaaggggtaatcttcggatcccccttgacggaagagggcatcgcccagatctatcagttgatagagtacctccacaaaaacttgcgcgtcgaaggccttttcagggtccccggcaatagcgtaagacagcagattctccgggacgcactcaataatgggacagacatcgatctcgaatctggggaattccactcaaatgatgtggccacattactgaaaatgttcttgggtgagcttcctgagcctctcctgacacataaacattttaatgcccacttaaaaattgccgacctgatgcagtttgatgataaggggaacaagaccaacattccagacaaagaccgccagatcgaggctcttcagcttctgttcttgattctaccaccccctaaccgtaatctcttaaagttactcctcgacttgctgtaccagacggcaaagaaacaggacaaaaataagatgagcgcgtacaatttggctttgatgtttgccccccatgtgctctggccaaaaaacgcccccgcttacatcagagaatgtgcccgtctgcactaccttgggagccggactcaggcgtcaaaggacgaccttgacctgatcgcctcgtgtcatactaaaagtttccagctcgccaagtcacaaaagcgaaatcgggtggacagttgtcctcaccaggaggagacacagcatcatacggaagaagcattaagagagctttttcagcacgtccacgacatgccggaatcggccaagaagaaacagctcatcaggcagttcaacaagcagagcttgacacagacccccggcagagagccctccaccagtcaggttcagaaaagagcccgcagtagatccttctcagggctgataaaacggaaggttctgggaaaccagatgatgtccgaaaagaagaagaagaaccctacgcccgaatccgtggcgattggggagttgaaaggaacatcaaaagagaatcgcaacctgctgtttagtgggagtcccgccgtcacaatgacgcccactcgtctcaagtggtctgagggaaagaaagagggaaagaaagcatttgtctag

SEQ ID NO: 203282 - DNA, 1485 bp, synthetic construct
  misc_feature 1..1485: note = Description of Artificial Sequence: Synthetic coding sequence
  source 1..1485: mol_type = other DNA
atggccaccgaggcccagagcgagggcgaggtgcccgcccgggagagcggccggtccgatgccatctgcagtttcgttatttgtaatgactcatctcttcgaggccagcccattatctttaaccctgattttttcgtggaaaagttgcggcacgagaaaccagagatcttcacagagctcgtggtcagcaacataacacggctgatagacctcccgggtactgagttggcacagctcatgggtgaggttgatctgaagctgcccggaggagctggacctgcgagcggattcttccgttccctgatgtcccttaaacggaaggaaaagggcgtcattttcgggtcccccctgacagaagagggtatcgcccagatatatcagctcatcgagtatttgcataagaacctgcgtgtggagggactctttagggtcccagggaattccgtgcgccagcagattctgcgagatgctttgaacaacggaaccgacatcgacctcgagagcggcgagttccattccaacgatgtggcgaccctgcttaagatgttcttgggcgagctgcccgagcccctcctgacacacaaacattttaatgcccatctgaaaattgcagatctcatgcagttcgatgacaaaggcaataaaactaacattcctgacaaagaccgccagatcgaagctctccagttgctctttcttattttgccccctccaaaccggaatttactgaaactgttactggacctcctgtatcaaaccgccaaaaaacaggataaaaataaaatgtcagcctacaacctggcgttgatgtttgcgccacacgtcctgtggcccaagaatgttacagctaacgacctgcaagaaaacatcaccaagctgaattctggaatggcattcatgattaagcatagtcaaaaactgttcaaagctccagcatacatccgcgaatgtgcacggttgcactatttaggctcccgcacacaggcaagcaaggacgatttggatctgatcgcctcctgccatactaaaagttttcagctggcaaaatcacagaagcgaaacagggttgactcatgtccacatcaggaagagactcagcatcacaccgaggaggccctgagggagttgttccagcatgtgcacgatatgcccgaatcagcaaaaaagaaacagctgatccgccaattcaacaaacaatccctcacacagaccccaggcagggaaccgagcaccagtcaagtacaaaagagggcacggagtaggtccttcagcggccttattaaacggaaggtgcttggtaaccagatgatgtctgagaagaagaagaaaaatccaacacccgagagtgtagctataggggagcttaagggaacctctaaagagaatcggaatctcctgtttagcggatcccctgctgttactatgactcctactagactcaaatggtctgaagggaagaaagaggggaaaaaaggcttcctttag

SEQ ID NO: 203283 - DNA, 1458 bp, synthetic construct
  misc_feature 1..1458: note = Description of Artificial Sequence: Synthetic coding sequence
  source 1..1458: mol_type = other DNA
atgccccaccagaagctgagcgccctgatcgacgccatctgcagctttgtcatctgtaacgattcttctcttagagggcaaccaatcatttttaatccagatttttttgtggagaaactgcgccacgaaaaacctgagatcttcaccgagttggtggtttctaatattactaggctgatcgacctgcctggcacggagctcgctcagttgatgggagaagtggatctgaaacttcccggcggtgctgggcccgcatcaggctttttccggtcactcatgagtttgaagcgcaaagagaagggagtcatattcggtagccctcttacagaggaaggaattgctcaaatctatcagttgatcgagtatttgcacaagaatctacgggtcgaggggctgtttcgagtccctgggaattcagtgcgacagcagattctgcgtgatgccctgaacaacggcaccgatatagacctggagagcggagaatttcattccaacgatgtcgcgaccctgctgaaaatgtttcttggggaactgccagagcctctgctaacacacaagcactttaatgctcacttgaagattgcagacctgatgcagtttgacgataaggggaacaagaccaatatccctgacaaagatcgccagattgaagccctgcaactgctttttctgattctgccgccccccaatcgcaacctcttgaaactgctcctcgacctactttaccaaaccgcaaagaagcaggacaagaataagatgagcgcatacaatttggcccttatgtttgctcctcacgtcctatggcccaagaacgtgactgcgaatgacctccaggagaatatcaccaagttgaactctggtatggccttcatgattaagcatagccaaaaactgttcaaggcacccgcctatatccgggaatgtgctagacttcactatctcggctctagaacccaggccagtaaagacgacctcgatctaatcgctagttgtcatacaaaatccttccagctggctaagtcacagaagaggaaccgggttgactcctgtccccaccaggaagagactcagcaccacacagaagaagcgctccgtgagttgttccagcacgttcacgatatgccagaatccgccaaaaagaaacagttgatcagacagtttaataaacagagccttacacaaacacccgggagagaaccctctactagccaagtacagaaaagagctcggagtcgctcgttctccggtctgataaaaaggaaggtgttgggcaaccagatgatgagcgagaaaaagaagaaaaatcctaccccggaatccgtggccattggcgaattaaaggggacgagcaaagaaaaccgcaacctgctcttcagcggtagtccagcagttacaatgacccctactcggctgaagtggtccgaggggaaaaaggaagggaaaaaagggttcctttag

SEQ ID NO: 203284 - DNA, 942 bp, synthetic construct
  misc_feature 1..942: note = Description of Artificial Sequence: Synthetic coding sequence
  source 1..942: mol_type = other DNA
atgttcctgggcgagctgcccgagcccctgctgacccacaagcactttaacgctcatctgaaaatcgccgacctgatgcagttcgacgataaggggaataaaacaaacatccccgacaaggatcggcagatcgaagcattgcaactgctctttctaattctgccgccaccgaatcggaacttactaaaattgctcctagatttgttgtaccagaccgccaaaaagcaggataagaacaaaatgagtgcttataacctcgcgttgatgttcgccccacacgtgctgtggccaaaaaacgtaacagcaaacgacttgcaggaaaacatcacaaaacttaattccggaatggccttcatgataaagcattcacagaagctgttcaaagcgcctgcgtacatccgagagtgcgccaggctccattaccttgggagtcggacgcaggccagtaaggacgacttagatcttatcgcctcgtgccatacaaagagtttccaactggctaaaagccagaaaaggaaccgggtcgactcctgtccgcatcaggaggagacccagcatcacacagaagaagcactcagagaattattccagcacgtacacgatatgccggagtctgcgaaaaaaaagcagctcatccggcagtttaacaagcagtctctgacacagaccccaggccgggagccttctacttcacaggtccagaagagggcaaggagcagatcattctctggcttgatcaaacgtaaagtcctcggtaatcagatgatgtcggaaaagaaaaagaaaaaccccacccccgagagcgtggccattggcgaactcaaggggacgtctaaagagaacagaaatctgttattctcaggatcacctgcggtgaccatgactcctactcgactcaaatggtcagaggggaagaaggaaggtaagaaggggttcttatag

SEQ ID NO: 203285 - DNA, 1554 bp, synthetic construct
  misc_feature 1..1554: note = Description of Artificial Sequence: Synthetic coding sequence
  source 1..1554: mol_type = other DNA
atggccaccgaggcccagagcgagggcgaggtgcccgcccgggagagcggccgcagcgatgctatttgcagctttgttatatgcaacgactcaagcctgaggggacagcccataatctttaatccagacttttttgtggaaaaactgcgacacgaaaaaccagagatctttacagaactggtcgtgtcaaacattacccgtctgatagatctgcccgggacagagcttgcacaactcatgggggaggtggacctaaaattacccggaggcgccggcccagctagcggattcttccgctccctgatgtccctaaagaggaaggagaaaggcgtgattttcgggagcccgttgaccgaagaagggatcgctcaaatctaccagctgatcgaatacctgcacaagaaccttagggtggagggcctgtttcgggttcctggcaatagcgttagacagcagatactgcgcgatgcactcaataacgggaccgatattgatctggagtctggagaatttcactcgaatgacgtggctacacttctcaagatgttcctgggcgaactccctgagcctctactcacccacaaacacttcaatgctcatttaaagattgctgatctcatgcagttcgacgacaaggggaacaagaccaacattccggataaggaccgccaaatagaagcccttcagctactttttctgattctgcctcctcctaatcggaatctcctgaagttgctgctggatctcctgtatcagaccgcaaagaagcaggataaaaataaaatgagcgcctacaacttggctttaatgtttgccccgcatgtcctctggcctaaaaacgttaccgccaacgatttgcaggaaaacatcacaaagctgaattctgggatggccttcatgataaagcactcccagaagttattcaaggcgccagcatatattagagagtgcgccaggttacactacctgggcagtcgaacccaggcatccaaggatgacttggacctgatcgcctcctgtcataccaaaagtttccaactcgccaagagccagaagaggaacagggtggacagctgtccacatcaggaggagactcagcatcacacagaagaagcactacgggaactgtttcagcatgtccacgacatgcctgagtcagcgaagaagaagcaactgatccggcaattcaataagcagagcttaacgcaaacccccggcagagaaccttccacctcccaggtccaaaaaagggcccggagccggagcttttccgggttaataaagcggaaagtgctggggaaccagatgatgagcgaaaagaaaaagaagaaccccacgcccgaatctgtggctatcggcgaacttaagggcactagtaaggaaaaccgcaatttgctgttttctggcagcccagctgttacgatgactcctacacgcctgaaatggtccgaggggaaaaaagaaggaaagaaggggaattccatggccaccacctcgctgggctccatccgcatgactctgagagggtctagcagctgcgggtgttgctcatag

SEQ ID NO: 203286 - DNA, 3654 bp, synthetic construct
  misc_feature 1..3654: note = Description of Artificial Sequence: Synthetic coding sequence
  source 1..3654: mol_type = other DNA
atggcccagcccgtggagatcagcccccccgacagcagcctgagcaaacagcagacctcaactcctgtgctgacacagccaggccgggcctaccggatggagatccaggtgcccccatcgcccaccgacgtcgctaagagcaacacagccgtgtgtgtatgcaacgaatcggttagaacagtgatcgttccctctgagaaggtcgtggatctgctctctaatcgcaacaatcatacaggcccaagccacagaaccgaagaagtgcgctatggcgtctctgagcagacttccctgaaaacagtctcgagaacgaccagcccacctttatctattcccactacccacctcattcaccagccagcggggtctcgttctctggagccgtcaggcatccttctgaagtccggtaactacagcggtcacagcgacggaatctcatcgtcaagaagtcaggccgtcgaagcacctagtgtgtctgtaaaccattattcacccaactcgcatcaacatattgactggaagaactacaagacctacaaagaatacatcgacaatcgacggttgcacattggttgtcgcaccatccaggaaagacttgactcgctgcgcgccgctagtcagtctaccactgactacaatcaagtagtgccaaaccgaacaaccctgcagggcaggagacgtagcacttcacacgatagagtgccacaatcagtgcagattcgccagcggtcagtttcacaagagaggctagaagattctgtgctgatgaaatactgtcctaggagcgcctcgcagggggctctgaccagtccaagcgtgtctttctcgaatcatcggactcgatcatgggattacatcgagggtcaagatgaaacacttgaaaatgtgaactcaggtactccaattccagacagcaatggcgaaaaaaagcaaacttataaatggtctgggtttactgagcaggatgatcggagaggcatctgcgaaagaccacggcagcaggaaattcacaagagttttcgagggagcaactttaccgtcgcaccctctgtcgtaaatagcgacaataggcgaatgtcaggccgtggtgtggggagcgtgagccaattcaagaagattccccctgatttgaaaacgttacagagcaacaggaacttccagactacctgcggcatgagcctgcctcgaggaatttcccaggatagaagcccactggtgaaggtacgctccaactctcttaaagcccccagtactcacgtaacaaaacctagtttcagtcagaagagcttcgtgagcatcaaggaccagcgccccgttaaccacctccaccaaaactctctcctgaatcagcaaacttgggtacgaacggattctgctcctgaccagcaggtcgaaaccgggaaaagcccatctttgagcggcgcctctgcaaaaccagctcctcaaagttctgaaaacgccggcaccagcgacctggagttgcccgtgtctcagcgcaaccaagatctgtccctgcaggaagccgagacagagcagagtgatacgctcgacaataaggaagctgttatcctccgtgagaagccgccttctggccgccaaaccccgcagcccttgcggcaccagtcatatattctggccgtaaacgaccaggaaaccgggagtgataccacttgttggctgcccaacgacgctagaagggaagttcacattaagcgcatggaggagaggaaagcctcgtccaccagcccacctggagactcgctggcatctattccctttatcgacgagcccacatctccctctatcgatcacgatatcgcgcatattcctgctagcgccgtgatctccgcgtccacaagtcaggtaccgagcattgctacggtgccgccatgcttaactactagtgctccccttattagacgccagctgagccatgatcatgagtcagtaggtccaccttcactggacgcccagcccaattccaagaccgagcgatccaaaagttacgacgaaggtctggatgattatagggaggacgctaaactgagctttaagcatgtaagctccttgaagggcattaagatcgcggacagccagaagtccagcgaagacagcggaagcaggaaagatagttctagcgaagtgttcagcgatgcggctaaagaagggtggctgcacttccgccccttagtcactgacaagggtaaacgcgtagggggcagtatccgtccctggaagcagatgtacgtggtgttgcgaggtcattccctctacctctacaaggataagagagagcagactacgccaagtgaggaggagcagccgatctccgtgaacgcttgcctgatagatatttcctatagtgaaacaaaacggaaaaatgtcttcagattaacaacgtcagactgtgaatgcttgtttcaggccgaggacagggacgatatgttggcatggatcaaaacaattcaggagtcttctaacttgaatgaagaagatacgggcgtgacgaatagagacttgatcagtaggcggatcaaggagtataataacttgatgtccaaagccgaacagcttccaaagacaccccgccaaagcttaagtataaggcagaccctgctcggtgcaaagtctgagccaaagacacagtctccacattctcctaaggaggaatctgagcgcaaactcctcagcaaggacgacacaagccctcccaaggataaaggcacatggcgaaagggtattccttctataatgcgcaagactttcgaaaagaaaccgacagccactggaacatttggagtgcgcctggacgattgcccgcccgcacatacgaaccgatacatacctttaatcgtggacatctgctgcaagctggtcgaagagcgaggcctcgagtacactggaatataccgagtcccggggaataatgccgcgattagcagcatgcaggaggagctgaacaagggtatggctgacatagacattcaggatgacaaatggagagacctaaacgtgatctcctcactactaaaatcattctttagaaagttacccgagcctctgttcactaatgacaaatacgccgatttcatcgaggcaaataggaaagaagacccactggatagactcaagaccctgaaaagactgatccacgatctacccgagcatcactatgaaactttgaaatttctgagtgctcacctaaagactgtggctgagaacagcgaaaaaaacaaaatggagccacgtaatctagctatcgtgtttggaccaactctggtgcgaacatccgaagacaacatgactcacatggtcacacacatgcctgatcagtataagatagtggagacgcttattcagcatcacgactggtttttcactgaggaaggggcagaggaaccactcaccactgtgcaggaggagtccacagtggattcccagcctgtgcctaacatagatcacctactcaccaatatagggagaacgggcgtttcacccggcgatgtttctggcgaggtaggtggcgtttaccacacagtcatgagtctcgtcgattctgtgatgtccttaatggatagctggaattgtcgtaagaaagaggactgctgcccccactgtagttgtctcgtctgtcggaatcccagattcctgtag

SEQ ID NO: 203287 - DNA, 3498 bp, synthetic construct
  misc_feature 1..3498: note = Description of Artificial Sequence: Synthetic coding sequence
  source 1..3498: mol_type = other DNA
atgatggccacccggcggaccggcctgagcgagggcgacggcgacaaactgaaagcctgcgaggtgtccaagaacaaggatggaaaagagcagagtgagaccgtgagtctctctgaagacgagactttttcttggcctgggccaaagacagtgactctgaagcggacatcccagggctttggttttacactgaggcatttcattgtctacccccccgagagtgccatacagttttcctataaagacgaagagaacggaaacaggggcggcaaacagcgaaaccggttagaaccgatggacacaatattcgtcaaacaggtcaaagaggggggtcccgccttcgaggccggtctatgtacaggcgatagaatcatcaaagtgaacggagagtctgtaattgggaagacctactctcaggtgatcgcactcatacaaaattccgatacaactctggaattaagtgtcatgcctaaagatgaggacatcctgcaagtcgcttatagtcaggatgcctatctcaagggaaacgaagcatattcaggaaacgcgcggaacataccagagccgcctccaatctgctatccatggctcccgtctgccccatcggccatggcccagccagtcgagattagtcctcctgattcctccctcagcaagcagcaaacttcaacgcctgttctaactcagccggggcgggcctataggatggaaatccaggtgccaccgtctccgaccgacgtcgccaaaagcaatacagcagtctgtgtttgcaacgaatctgtgaggaccgtcattgtgcccagtgagaaagtggtcgacctactttctaaccggaataatcacactggccccagccaccggaccgaagaggttaggtacggcgtgagtgagcaaacttctcttaaaaccgtgtccaggacaacaagcccgcccctctcaatcccgactactcacctgattcaccagccagcaggatccaggtcccttgaacctagtggaattctgctgaaaagcgggaactatagtggacattctgacggtataagctcctcaaggtcccaggcggtggaggcaccaagtgtgtccgtgaaccattactcacctaacagccatcaacacatcgattggaagaattataagacctacaaggagtacatcgacaaccggagattgcatattgggtgccgcaccatacaggaacgactggattcgttgcgagcagcaagccaatccacaacagactataatcaggtcgtgcccaaccgcaccacacttcaagggcgtcggaggtccacatcacatgatcgtgttccgcaatccgtgcaaatcagacagagaagcgtgagccaggaaagactcgaggactcagttctgatgaagtactgcccacggtccgctagtcaaggcgctcttactagcccaagtgtctcgttctctaatcacaggacccggagctgggactacatcgaaggccaagacgagactcttgagaacgtgaattctggcactcccattcctgacagcaacggagaaaaaaagcagacatacaagtggagtggtttcaccgagcaggatgacagacgcggcatctgtgagcgccctcggcaacaggagatccataaaagttttcgcggatctaacttcaccgtggcgccgtctgtcgtgaactccgacaaccgacgcatgagcgggaggggtgttggatccgtgtcacagttcaagaaaataccacctgacttaaagacactccagtccaaccgaaacttccaaacaacatgcggcatgagtcttcctcgaggcattagccaggatcgttcaccactggtcaaggtgcggtcaaattccttgaaggcacccagcacccacgtgactaagccctctttttctcaaaagtcctttgtgtctatcaaggaccaacgtcctgttaatcatcttcatcaaaactcattgctaaatcagcaaacctgggtgaggacggactccgcgccagaccaacaggtggaaacaggtaagtccccatcactgtccggagcatctgccaagccagccccacagtcctccgaaaatgctggaacaagcgatttagaattacccgtgtcccaacggaaccaggacctatctctgcaggaggccgagactgagcagagcgatacactggataataaagaggccgtgattcttcgtgaaaaacctcctagcggaaggcaaacgccacagccccttcggcatcagagctatattctggctgtgaatgaccaggaaactgggtcagataccacatgctggctgcccaacgatgctcgacgggaggtgcacattaagcgcatggaggagcgcaaagccagcagtacctcaccgccaggcgacagtctggccagcatccctttcatcgatgaaccaacttcgccatcaatcgaccacgatatcgctcacatcccggccagcgccgtgatctcagcctctacaagccaggtcccgagcatcgcaaccgtcccaccttgcctaacaacgtctgcacccctgatccgcaggcagttaagtcatgatcacgaatctgtaggcccacccagcctggacgcgcagcctaatagcaagaccgagagatccaagagttatgacgaagggctggatgattatcgtgaagatgctaagctatctttcaagcacgtatccagcctcaagggtatcaagatcgcagattctcagaaatcctcagaagactctggatcaagaaaagactccagctccgaggttttctcagatgccgcaaaagaggggtggctgcatttcaggccactagtgaccgataagggaaagcgcgtcggtggctccattagaccttggaagcagatgtacgtagtcctgagaggacatagtctttacctttataaggacaagcgcgaacagaccactccgagcgaggaagagcagccaatctcagtgaatgcatgtctaatagatatttcttacagcgaaacgaagcgtaaaaatgtctttaggcttacaacttctgactgtgaatgcctgttccaggccgaggaccgggatgacatgctggcctggatcaagacaattcaagagtctagtaatcttaatgaggaggatactggagtaactaatcgggacctgatcagccgtagaatcaaggagtataacaatctgatgtccaaagctgagcaactccctaaaactcccagacaaagcctgagcatcagacaaaccctacttggcgctaaatctgaaccgaagacacaatctccgcatagtcctaaagaggagagcgaacggaagctactaagtaaagacgacacctcacctccaaaagataaaggcacatggaggaaagggatcccttccattatgaggaagacatttgaaaagaaacctaccgcaacgggtacctttggcgtgaggctcgacgactgtccccctgcccacaccaatagggtcggcgacactagcccacccgattttcttaaaagtctcattcagttctag

SEQ ID NO: 203288 - DNA, 5877 bp, synthetic construct
  misc_feature 1..5877: note = Description of Artificial Sequence: Synthetic coding sequence
  source 1..5877: mol_type = other DNA
atgatggccacccggcggaccggcctgagcgagggcgacggcgacaaattaaaggcttgcgaggtgtctaagaacaaagacggaaaagagcaatccgagaccgtttcattatcggaggatgaaacattctcctggcctggcccaaagacagttactctgaaacgcacatcccaaggcttcggttttacacttcggcactttatcgtgtaccctccagaaagtgccatccagttctcctacaaggatgaagagaatggaaacagaggtggaaaacagcggaacagactagagccaatggatacaatcttcgtaaagcaagtgaaagaaggcggacctgcctttgaggctggactgtgcactggtgatagaattattaaggtgaacggggagagcgtgatcggcaaaacatacagtcaggtgatcgcactgatccagaactccgacacaaccttggagctgtctgtcatgccgaaggatgaagacatcttacaggtgctccagtttacaaaggatgtaactgcactggcctactcacaggacgcttatctgaagggaaatgaggcatacagtggtaatgctagaaatattccggagccacctcctatctgctatccctggctgccttctgccccctctgcaatggcacaacccgtggaaatcagcccgccagattcaagtttgagcaagcagcagacttcaaccccagtgcttacacagccggggagggcctaccggatggagattcaggtgcccccttctcccacggatgtggcaaaatcaaatacggctgtctgcgtgtgtaatgagagcgtcagaacagtcatcgtgccatccgaaaaggtggtggatttgttaagcaatcgaaacaaccataccgggccgagtcacaggaccgaagaggtgagatacggtgtaagcgagcaaacctctttgaaaactgtgagccgcactacctctcctcccctgtccatccctactacgcacctcattcatcagccagcagggtcaaggtcccttgaaccgtcaggcatcctgttaaaatccgggaattatagcggacacagtgatggcatttcatctagcaggtcccaggccgtcgaggccccatcagtgagcgtgaatcactatagcccgaatagccatcagcatattgactggaaaaattataagacttacaaggagtacatcgataaccgccgactccacatcgggtgccgcactatccaagagagactggattctttgcgagcagcctcccagagcacaacagactacaaccaagtcgtgcccaacaggactacactacaggggagacgacgctcaacaagtcacgacagagttccgcagagcgtgcagatcagacagagaagtgtcagccaggaacggctggaggattcagttctgatgaagtactgtccccgatcggctagccagggcgcgctgacctccccgtcagtgtctttttcgaaccaccgtactcgttcttgggactacatcgaaggccaagacgagaccctggaaaatgttaacagcggcacccctatccccgatagcaacggcgagaagaagcaaacgtataaatggagcggcttcacagagcaggacgaccggagaggaatctgcgagcgaccgcggcagcaggagattcacaaaagctttagaggttctaactttactgtggccccaagcgtagtaaacagcgacaatcgtagaatgagcggcagaggtgtgggcagcgtctcacaattcaagaagatccctcccgatttgaagaccctacaatccaatcggaatttccagacaacctgcgggatgagcctccctcgcggcatcagtcaggatcgcagtcccctcgttaaagtgcgcagcaactccctgaaggccccatcgacacatgtcaccaaaccatcctttagccagaaatcatttgtcagcattaaggatcagaggcccgtgaatcaccttcaccagaactcattgctcaaccaacaaacatgggtccggacagacagcgcgcctgaccagcaggtcgagaccggcaaatcaccttcgctcagcggcgcttccgcgaagcccgccccacagtcatccgaaaatgcaggaacatcggacctggaactgcctgttagccaaagaaatcaggatctgagcctgcaggaagccgaaaccgagcagtcagacacccttgataataaagaagcggtgatcctgcgcgaaaaacctccttccggacgccagactcctcagccactgcgtcaccaatcctatattctggcagttaatgatcaggagacgggatctgatacaacctgttggctgcccaacgacgcaaggagggaagttcatattaaacggatggaggagcggaaggctagctccaccagtcccccgggcgattctcttgcgtccataccttttatcgacgagcccacttccccctccatcgatcatgacattgctcacattccggcctcggcagtgatctcagctagtacatcacaggttcccagtatagcgactgtgcctccttgcttgaccacttcagctcccttaattcggaggcagctgtcgcacgatcacgaaagcgtggggcccccaagtctcgatgcacagccgaatagtaagactgagagaagtaagtcttacgatgaaggcttagatgattatagggaagacgcaaagctctctttcaagcatgtgtcatctttgaagggcattaagattgcggatagccagaaatctagtgaggattcaggatcccgcaaagactcatcgagcgaagtattcagcgacgccgcgaaggagggatggctgcacttccgcccactcgttacggacaagggaaaacgggtggggggttctatccgaccctggaagcagatgtatgtcgtgttgcgaggacactctctgtacctgtataaggacaagcgggaacagaccaccccgtctgaagaggagcaacccatcagcgtgaatgcctgcttgatcgacatatcctatagcgaaacgaagaggaaaaatgtgtttcgcctgacgacttcagattgcgagtgcctgttccaagcagaggacagagatgatatgctcgcatggattaagaccatccaggagagtagcaatctgaacgaagaagacaccggcgtgaccaaccgggatctgatctctcgaagaattaaagaatacaataaccttatgtccaaggccgagcagctgcctaaaaccccccgacaatccttgtcaatccgacagaccctgcttggggcgaagtcagaaccaaagacacagtccccccacagccctaaagaagagagtgaaaggaaactgctctcaaaggatgacactagcccccccaaggacaaaggaacctggaggaaaggcatcccttcgattatgagaaaaacatttgaaaagaaaccaacagcaaccggcacgtttggcgtgaggctggacgactgtccccccgctcataccaaccgctatattccgcttattgtcgacatatgctgtaagttggttgaggagaggggactcgaatatacagggatctacagggtgcccgggaacaacgctgctatctcttctatgcaggaggagttgaacaaggggatggccgatatagacatccaagatgataaatggcgcgacctcaacgtgatttctagtctcttgaaatctttcttccggaagttacccgagcctctattcaccaatgacaagtacgccgatttcatcgaagcgaaccgcaaggaggatccactagaccgtctcaaaacgctcaagcgtctgattcatgacttacctgaacatcactacgagaccttaaaatttctaagcgcccatttaaagacggtggccgagaattccgagaaaaataagatggaacctcggaatctcgccatcgtgtttggcccgactttagtaagaacatccgaggataatatgacccacatggtaacgcatatgcccgaccagtataagatcgtggaaaccctaatccagcaccacgactggttttttactgaggagggggctgaggaacctctcacaacagtgcaggaggaatcaaccgtggatagtcagcccgtacccaacatagaccacctgctgactaatataggcaggaccggggtcagccctggggacgttagtgactccgccactagcgattcaacaaagtccaaagggtcttgggggtctggcaaagatcagtacagtagggagctcttggtgtcttcaatctttgcagccgctagccgaaaaagaaaaaagcccaaggagaaggcacaaccaagctcgtcagaagacgaactggacaacgtcttctttaagaaggaaaacgtagagcaatgccacaatgacacaaaggaagaatcgaagaaagagagtgaaactttgggacgcaaacagaagatcataattgctaaagagaactcaactaggaaagaccctagtaccaccaaagacgagaaaatttccctaggcaaagagagcactccatccgaggaaccctctccaccacacaattctaaacacaacaagtcaccaacacttagctgccgatttgccattctaaaagagagccctcggtcactcctcgcccagaagtcatcacaccttgaagaaacagggtcagactcaggaacgttgcttagtacctcgagtcaggcatccttggccaggtttagtatgaaaaaatcaactagcccggaaacaaaacactccgaattcctggcaaatgtctcgacaattaccagcgactattccaccacctccagcgccacttacctgacctcactcgacagcagcagactcagcccagaggtacagtcagtcgcagagtcaaagggagatgaggcagacgacgaacgcagcgagttgatatccgaggggaggcctgttgaaactgatagtgaaagtgagtttccagtgtttcccactgcattgacatcggaaaggctttttcgtggaaagctgcaggaggtcaccaagagcagcagacggaattccgagggctctgaactcagctgcactgaaggttctttgacttcaagcctggactccaggcgccagttattttcgagtcacaagctgattgaatgcgatacattatctagaaaaaagagtgccaggttcaagagcgactccggcagtctgggcgacgccaaaaacgaaaaagaagctccatctctgactaaggtgttcgatgtgatgaagaagggtaaaagtacaggctctctgttgacgcccactcgcggcgagagcgaaaagcaggaacctacatggaaaaccaagattgccgacagactgaagctgcgaccccgtgcaccggccgacgacatgtttggtgtcggcaatcacaaggtgaacgcagagacggctaagcgcaaaagtatcaggcgccgccatacattaggcgggcaccgcgatgccaccgaaatctcagtgctcaacttctggaaggtgcacgagcaatccggcgagcgtgagagcgagttaagtgcagtaaaccggttgaaacctaagtgcagtgctcaggatctctcaatcagcgactggcttgccagagagcggttgaggacttcgacgtctgatttgtcaagaggtgaaataggcgaccctcagaccgaaaatcctagtacacgagaaattgccacgacagacacaccactgagcctgcactgtaatactggctcttcttcttcaacgcttgcgtccactaatagacctcttctgtccatcccaccacagtccccggatcagattaatggcgagtctttccagaatgtcagcaaaaacgccagcagtgctgcaaatgctcagcctcataagttaagcgagactcctgggagcaaggcagaattccacccgtgtctgtag

SEQ ID NO: 203289 - DNA, 594 bp, synthetic construct
  misc_feature 1..594: note = Description of Artificial Sequence: Synthetic coding sequence
  source 1..594: mol_type = other DNA
tgaaacaacgccgccatcagcagcatgcaggaggagctgaacaagggaatggcagatattgatatacaggatgacaaatggagagacctgaatgtcatctctagcttgctaaagtccttcttcaggaaactcccggagcctctgtttacaaacgataaatatgctgatttcatagaggctaacaggaaggaagatccattggatcgcctgaaaactctgaagcgcctcatccacgacttgcctgagcaccactacgaaactctgaaattcctttccgctcacctgaagacagtcgctgaaaactctgaaaagaataagatggagccacgcaacctggctatcgtgttcgggcccactctggtacggacaagcgaggacaacatgacccacatggtgactcatatgccggatcagtacaaaatcgtagagactctcatacagcatcacgactggttctttacagaggaaggtgctgaagagccactgattcagcttttggttacgcagcaaaatctgagagtgctgggagaccttgagcgaatctcaatagccggaaactgcctgtgcccgccctcactccagctcctggtgtag

SEQ ID NO: 203290 - DNA, 342 bp, synthetic construct
  misc_feature 1..342: note = Description of Artificial Sequence: Synthetic coding sequence
  source 1..342: mol_type = other DNA
tacatccccctgatcgtggacatctgctgcaagctggtggaggagagaggcctggaatacaccggcatttaccgcgttcccggcaataatgcagcaatttcttctatgcaagaggaactgaacaagggcatggctgacattgatatccaagatgacaagtggagagacctcaatgtgatttcatctcttttaaagtccttcttccgcaagttgccagagccgctgttcaccaacgacaagtatgcagacttcatcgaagccaacaggaaagaggacccacttgatcgtttgaaaaccttgaagcggctgtttctctctgcccatctaaaaaccgtcgcatag

SEQ ID NO: 203291 - DNA, 2724 bp, synthetic construct
  misc_feature 1..2724: note = Description of Artificial Sequence: Synthetic coding sequence
  source 1..2724: mol_type = other DNA
atgcccaaggacgaggacatcctgcaggtggcctacagccaggacgcttacctgaaaggcaatgaggcgtattcgggcaatgcccggaatattcctgaaccccctcctatttgttacccatggctgccatctgccccatctgcaatggcccagcctgtggagatatcaccccctgattcatccttgtccaaacaacagactagtacgcccgttctaacacagcccgggagggcctacaggatggaaattcaggtgcctcctagtcccaccgacgtcgccaagagcaacactgcagtttgtgtttgcaatgagagcgtgcgaactgtgattgttccatctgaaaaggtcgtcgacctgctgagcaatcggaacaatcatacaggcccatcacatagaacagaagaggtgcggtacggggtgagtgaacaaaccagcctgaaaaccgtttctcgcactacatctccccccctgagtatacctaccacccacctcattcatcagcccgcgggctctaggagcctggagccgtctggtattttgctaaaaagcggtaattactcgggccactccgatggaatttcctcctcaaggagtcaagctgtcgaggctccaagtgtgtctgtcaaccactattcccctaatagccaccagcacattgattggaagaactacaaaacctacaaggaatatatcgataatcggagacttcacattggctgtaggacaatccaggagaggctggatagtctgcgggctgcatctcagtccacaactgattacaaccaggtagtgcctaataggacgactcttcagggacggcgccgatccacctcccacgatcgggtgccacaatcagtgcagattagacagcgcagtgttagtcaggaaaggctggaagactctgtcctgatgaaatactgccctcggtcggcgtcacagggcgcccttactagcccttctgtgtcattcagtaatcatcgaaccaggtcttgggactacatcgaaggccaggatgagacgctggagaacgtgaatagcgggactcctatccctgactcaaatggggaaaagaagcagacctacaagtggtctggttttaccgaacaggacgacaggcggggaatctgcgagcgtcctaggcaacaggaaatccataaaagctttcgtgggagcaatttcactgtcgccccatcagtcgtgaacagtgataacaggagaatgtccgggcggggagtcgggtcagtgagccaatttaaaaagatcccacctgatctgaagactctgcagagcaataggaattttcagactacttgcggtatgtctctaccacgggggatttctcaagatcggtcgcctctagtaaaagtcagaagtaattcccttaaggcacccagcacgcacgttacgaaaccaagcttctcccagaagagttttgtcagcatcaaagaccaaaggcccgtgaatcacctacaccaaaactcacttctaaaccagcagacctgggtcagaaccgacagtgcccccgaccagcaggtggaaaccggaaaaagcccctccctgagtggggcttcagcgaagccagcacctcagagctccgaaaatgctggtacctcagatctagagcttcctgtctcccagcgaaatcaggacctgtccctccaggaagctgagaccgaacagagcgacacactggacaacaaggaggctgtcattctgcgcgaaaaaccgccgtcagggcggcagacacctcagccacttcgccatcagtcgtacatcctggccgttaatgatcaggagactggtagtgacacaacctgctggctgcctaacgatgctagaagggaggtgcatattaaacgtatggaagaaagaaaagccagcagtaccagcccacctggagacagcctggcgagtattccgtttattgacgagcctacatcgccatctattgaccacgatatcgcacacatccccgccagtgccgtcatcagtgcatcaacgtctcaggtaccttcgattgccactgtccctccctgtctgacaactagtgcaccactgatccggcggcagctgtcccacgaccatgagtctgtgggcccgcccagcttggatgcccagccaaactctaagacagaaaggagcaaatcctacgacgaagggctggacgactaccgagaggacgcgaagctgagcttcaagcatgtgtcatcactcaaggggatcaaaatcgccgattctcagaaatcttcagaagatagtggtagtaggaaggactcctcctccgaggttttttccgatgcagctaaggaaggttggttgcatttccgaccattggttacagacaagggcaagagggtcggaggctccattcggccctggaaacaaatgtatgtagttctgcgcgggcactctctctatttatacaaagataaacgagagcagacgacacccagcgaggaggagcagcctatctccgttaacgcttgcttgatcgatatatcctactctgagacaaaaagaaagaacgtcttccgccttacaaccagtgattgtgaatgtttgtttcaggccgaagatcgtgatgacatgctcgcttggattaagaccattcaggaatcatcgaatctgaatgaggaggacacaggagtcaccaacagagacctgattagtaggaggatcaaagagtacaataacttaatgagcaaggccgagcagctgccctag

SEQ ID NO: 203292 - DNA, 3396 bp, synthetic construct
  misc_feature 1..3396: note = Description of Artificial Sequence: Synthetic coding sequence
  source 1..3396: mol_type = other DNA
atgatggccacccggcggaccggcctgagcgagggcgacggcgacaagctgaaggcttgtgaggtcagcaagaacaaggatgggaaggagcagtccgagactgtttccctgtcagaggatgaaacgttcagttggcccggcccaaagaccgtgactctgaagaggacctcccagggctttggattcaccctgcgccatttcatcgtataccccccagagtccgcaattcagtttagctacaaagacgaggaaaacggaaatcgtggtgggaagcagcgtaacaggctggagcccatggacaccatttttgttaagcaggtcaaggagggaggtccagcctttgaggcaggactctgtacgggggacagaattatcaaggtaaatggtgagagcgtgatcggcaagacttacagccaggttattgcactgattcagaacagtgacactacactcgaactatctgtgatgcccaaggatgaggatatactccaagtactgcagttcacaaaggatgttactgccctcgcttactctcaggatgcttacctgaaaggaaatgaggcctattccggtaacgcgcgtaatatacccgaaccccctccaatttgctacccttggttaccatctgcccccagcgccatggcccagccagtggagatcagtcctcctgattcttctctaagtaaacagcaaacaagcacacctgttcttacccagcccggccgggcataccgaatggaaattcaggtccctccttcacccacagatgtcgccaaatccaacacagccgtgtgcgtgtgcaatgaatcagtcaggacagtgatcgtaccttctgagaaggtcgtagatctcctttccaaccggaataaccacacaggacccagtcaccgcacagaagaagtcaggtatggcgtctctgaacagaccagcctgaaaaccgtgtcacgcactaccagcccaccattgtccatcccaactacccacctcatccaccaacccgccggaagccgtagtctggaaccatctgggatactgctcaaatctggtaactattctggtcattcagatgggatctcctcctcccggagccaggctgtcgaagccccatcagttagcgttaaccactactcccccaactcccaccagcacatcgactggaaaaactataaaacatacaaggagtatattgacaacaggcgcttacacatcggctgtaggacaatccaggaacgtctcgacagtctgcgagcagcaagccaaagtaccacggattataaccaggtcgtgccgaatcgcacgaccctgcagggcagaagacgctctacatcgcacgaccgggtgccacagagcgtgcagattcggcagaggtcagtgtctcaagagcgcctggaggactcggtgctgatgaaatattgccctcgtagcgcctctcagggcgcactcacctctccctctgttagcttctccaaccatcgcacccgctcctgggattatatagagggccaggatgaaactcttgagaacgtaaacagtggcaccccgatccccgactcaaatggtgagaagaaacaaacttataagtggtcagggttcaccgaacaggatgaccgtcgaggcatttgcgagaggcctcgacagcaggagatccataagtcttttcgggggtctaattttactgtggcgccttccgtggtgaatagtgacaatagaaggatgtctgggcgtggcgtaggtagcgtttcacagttcaaaaagatcccgcctgaccttaagactctacagagcaatcgaaattttcaaaccacctgtgggatgtcccttcctcgcgggatttctcaggatcgaagtcccttagtcaaggtgcgctctaattccctcaaggcacctagcacgcacgttacaaaacccagcttctcccagaaatccttcgtgtcgattaaggaccagcggcccgtgaaccatcttcatcagaatagcctgctgaatcagcagacctgggtacgcactgactctgcacccgaccagcaagttgaaaccggtaagtcaccgagccttagcggggctagcgcgaagcctgctcctcaatcttcagaaaatgctggaacctccgacctcgaattgccagtgtctcagaggaatcaagatctctccctccaggaggccgagactgaacagagtgataccctggataacaaggaggccgtgatcctcagagaaaagcctccatctggacggcagacaccacagcctctgaggcaccagtcatatattcttgcagtgaacgaccaggaaactggaagcgataccacctgctggctcccaaacgatgcgaggcgggaagtccacatcaagaggatggaagagcgaaaggcgtcctccacctcacctcccggagacagtttagcttcaattccattcatagacgagccaacttctccgtccatagatcatgatatcgcgcatatcccagcctctgcggtcatctctgcatccacgagtcaggtgccctcaatagccacagtcccaccttgtctgaccacctcggctcccctgataagaaggcagctatcgcatgatcacgaatctgtcggccctcctagcctcgacgcgcagccaaatagcaaaactgaacggtccaaaagttatgacgagggcttagacgactaccgcgaggatgccaagttgtctttcaagcatgtgtctagtcttaaaggtatcaagatagcagattcccaaaaatcgagcgaggatagcggatccaggaaagattcttcttccgaggttttctccgacgctgcaaaggagggctggttgcatttccgccctttggttaccgataaaggcaaacgtgtgggcggcagtattcgcccatggaaacagatgtacgtggttctgcggggccacagcctctatttgtataaggacaaaagagagcagaccactccaagtgaggaggagcagccaatatcagtcaatgcctgtctgatcgacatttcttattctgaaaccaagcgaaagaacgtgttcaggctgacgacaagcgattgcgagtgtctctttcaggccgaggatagagacgacatgttggcctggatcaaaaccatccaggaatcctcgaatttgaatgaggaggacactggagtgaccaaccgtgacttgattagccgccggatcaaagagtacaataatctaatgtcaaaagctgaacagctacccaaaacaccacgccagtctctaagcattcgccagaccctccttggagcgaagagtgagcccaagactcagtccccccacagtcccaaggaggagtctgagcgcaaactcctgtctaaagacgacacctctcctcccaaggacaagggaacttggaggaaaggaattccctccattatgtag

SEQ ID NO: 203293 - DNA, 4224 bp, synthetic construct
  misc_feature 1..4224: note = Description of Artificial Sequence: Synthetic coding sequence
  source 1..4224: mol_type = other DNA
atggccacccggcggaccggcctgagcgagggcgacggcgacaagctcaaagcctgcgaggtcagtaaaaataaggatggcaaagaacagtcagaaaccgtgtctctgagtgaggatgaaactttttcttggcccggaccgaaaacggtgacacttaagagaaccagccagggattcggttttactttgcggcacttcatagtgtatccaccagagtccgcaattcaattctcttataaagatgaggaaaatggtaatcgcggcggaaaacagagaaatcggcttgagcccatggatacaatcttcgtgaagcaggtgaaggaaggcggaccggcctttgaggctgggctatgcacaggcgatcggattattaaagtaaatggggagagtgtgatcggcaagacatattcccaggttatcgctctgatccagaacagcgatacaaccctcgaactctctgtcatgccaaaggacgaggacatattgcaggtggcatatagccaggacgcgtacctgaagggaaacgaagcttactccgggaacgcccgtaacatcccagagccccctcccatttgttatccgtggctgccttctgcccccagcgcgatggcccagcccgtggaaattagccctccagacagctccctcagcaaacagcagactagtacaccggttctcacccagccaggaagagcgtaccgcatggagatacaagttccccctagccctactgatgtcgctaaatctaatacagctgtgtgtgtctgtaacgagtctgtaaggactgtcatcgtcccaagcgagaaggtagtggacctgctgagcaatcgcaacaatcatacaggccctagccaccgaacagaggaagtgcgttatggtgtatcggagcaaacgtctctcaagaccgtgagcagaacaacctctccaccactttcaattcctactactcatttaattcaccaacctgccgggtcaagatcgttggagccctctggcattctcttgaagagcgggaattatagtggccactcagatggcataagtagtagccgttcccaggctgtcgaagctccttctgtgagcgtcaatcactactcacctaatagtcatcagcatatagactggaagaactacaagacatacaaggaatacattgacaatcgccgcctgcacattggatgcaggacaatccaggagcgtctggacagcttacgggccgcctcacagtctactaccgattataatcaggtcgtgcccaaccgtacaacactgcagggccggcggcgttcaactagtcatgacagagttcctcagtcagtccaaattagacaacgatctgtctcccaggagcgcctcgaggactctgtgctgatgaaatactgcccccgatccgcgtctcagggagctctcaccagtccatcagtgtctttctctaatcatagaacacggagttgggattacatcgaggggcaggacgagaccttggagaatgtcaattccggaactcccatccccgactccaacggcgagaagaagcagacgtataaatggtccgggttcacggaacaagacgaccgaagaggtatttgcgagaggccccgacaacaagagatacacaaatcttttagagggtccaacttcacagtagcaccctctgtggtgaactcagataataggcggatgtctggtcggggtgtgggtagtgtcagccattggagaaaggggattccctccattatgagaaaaaccttcgaaaaaaagcctacggcgaccgggactttcggcgtgcgtctggacgattgcccacccgcgcacactaatcgatacatacccctcatagtggatatttgctgcaagttagtggaagagaggggactagaatacaccggtatttatcgggttcctgggaataatgctgcaatctccagcatgcaggaggaactgaataaaggaatggcggacattgacatccaggacgataaatggagagacctcaacgtcatttcttcactcttgaaatccttttttcggaagctgcccgagccactgtttacaaatgacaaatatgccgattttattgaggccaaccggaaggaagatcctttggatcgcttgaaaaccctgaaaagactgatacatgaccttccggagcaccactacgaaacactgaaatttctttctgcccaccttaaaaccgtggcagagaactcagagaagaacaaaatggagccacgcaacctcgctatcgtctttggcccaacacttgtccgaaccagcgaggacaatatgactcacatggtgacgcacatgcccgatcagtacaaaattgtggagaccttgattcaacatcacgattggttttttaccgaggaaggagcagaagagccgctcacaacagttcaggaagagtctacagttgacagtcagcctgtgcccaacattgatcacctgttgacaaacatcggacgaacaggcgtgtccccaggagatgtgagcgactccgctacatcagacagtaccaaaagcaaaggctcatgggggagcgggaaggatcagtatagcagagagctgctggtcagtagtatctttgcagcagccagtagaaagcgcaaaaagcccaaagaaaaagcccaacctagcagcagtgaggatgaactcgataacgttttttttaaaaaagaaaatgtggagcaatgtcacaacgacacaaaggaggaatctaagaaggagtccgagacattgggacgtaagcaaaaaatcataatcgccaaggagaactccacccgcaaggatccaagtacaacaaaagatgagaagatttctctaggaaaagaaagtacaccaagtgaagagccatctccccctcacaattcaaaacataacaaatccccaaccctgtcctgtcgcttcgccatcctgaaggaaagtccacggagtctgctcgcacagaaaagctcgcatctggaggaaacgggctccgacagcggcaccttgctctctacctcttcacaggccagcctggcacggttttccatgaagaaaagtaccagtccggagaccaagcacagtgaatttctggccaacgtgagtacaatcacctctgactattccacgaccagctcagcaacgtacctcacatctttggattcctcacgactgtcgccggaagttcaatcagtggccgagagtaagggggacgaagctgacgacgaaaggagtgagctcatcagcgagggaagaccagtcgagaccgacagcgaatccgaatttcccgtgttcccaaccgcactcacctctgagaggctgttcagggggaagctgcaggaggtcacaaaaagcagcagacgaaatagcgaggggagcgaactatcttgtaccgaaggttcactgacgagcagcttggatagtaggcgccagctattttcgtcccataaactgatcgagtgtgacacactgtcacgcaagaaatctgcacgtttcaagagtgactcaggatcactcggggacgcaaagaatgagaaagaagcaccgtccctaaccaaagtctttgacgtcatgaaaaaaggaaaaagcacgggaagtcttttaactcccacccgaggtgaatctgaaaagcaggagcctacatggaaaacaaagattgccgatcggctgaagctccgcccgcgtgcccccgcagatgatatgttcggggtggggaatcataaggtgaatgccgagactgctaagcggaagagcattcgtagaaggcacacgctgggtggacatagggacgctactgaaatctctgtattgaatttctggaaggtacacgagcagtccggcgaacgtgaatccgagctgtcagccgtgaaccgcctgaagcctaaatgtagcgcccaggacctctcaatctcagactggttagcgcgcgagaggttacgtacttccacttccgatctgagcagaggggaaatcggggacccacagacggagaatccctctacacgcgagatcgcaaccacagacacaccactaagtctacactgcaacaccggatcaagttcaagcactctggcttcgacaaatcgcccactgctgtcgattccgcctcagagccctgatcagattaatggtgagtctttccaaaatgttagcaaaaatgcaagttccgccgcaaatgctcaaccccataagttgagcgaaacgccgggttccaaggctgaattccatccttgcctgtag

SEQ ID NO: 203294 - DNA, 279 bp, synthetic construct
  misc_feature 1..279: note = Description of Artificial Sequence: Synthetic coding sequence
  source 1..279: mol_type = other DNA
atggacaccatcttcgtgaagcaggtgaaggagggcggccccgcctttgaggccggcctctgtacaggcgatcgcatcatcaaagttaatggcgaatccgtcatcggaaaaacttattcccaagttattgcacttatccagaactccgacaccacacttgagctgtctgtcatgccaaaggatgaggacattctccaggtcaaccttgaatttagtaccttttacaaaaatacaatcgccaaattcctgcaattaagcgatatggaaatgctttgttag

SEQ ID NO: 203295 - DNA, 4476 bp, synthetic construct
  misc_feature 1..4476: note = Description of Artificial Sequence: Synthetic coding sequence
  source 1..4476: mol_type = other DNA
atgaacggcgtggccttctgcctggtgggcatccccccccggcccgagcccagaccgcctcagctgccccttggacctcgggatggttgttcaccccgaagaccttttccctggcagggccctaggacacttttgctgtacaaatcaccacaggatgggtttgggtttactctccggcacttcatcgtgtaccccccggagagcgcggtccactgctcattaaaggaagaagagaacggcggtaggggaggcgggcctagcccgaggtatcgcctggagccaatggacacgatctttgttaagaacgtgaaagaggatggtcccgcccatcgggcaggtctgagaaccggggatcgcctcgtcaaggttaacggagaatcagtgatcggaaagacgtatagtcaagttatcgccctcatccaaaactccgacgatacactcgaactgtcgatcatgcccaaagacgaggacatcctgcagctggcttattcccaagatgcatatctcaaagggaatgaaccttatagcggcgaggcccgatccataccggaaccgccaccgatctgttaccctcggaagacctatgcccctcccgcacgcgcttcaaccagagctacaatggtccccgaaccaacatcggcgctgcccagcgatcctcgcagtccagctgcctggagtgaccccggtcttcgcgtgccccccgccgctcgagcccatctggacaactcctccttaggaatgagccaaccacggccttccccaggtgctttcccacacctcagctctgagcctcggaccccaagggcctttcctgaacccgggtctagggttcctccatcgcgcttagagtgtcagcaggctttatctcattggttaagtaatcaggtgcccaggcgcgccggtgagcgcagatgcccagcaatggccccccgcgcaagaagcgcgtctcaggatcgtctcgaagaagtagcagccccacggccctggccttgctctacatctcaagatgccctgagtcaactcggccaagaagggtggcatcgcgcccgctcagatgactatttgagcagggctacgcggtcggccgaggcgctcgggccaggcgccctcgtaagcccccgttttgagcgctgcgggtgggcgtcccagagaagctcagcaagaacacccgcttgccctactcgagacctacctggcccccaggccccccctccctctggacttcagggactggacgacctgggatatatcggttataggagttattcccctagtttccagagaagaaccgggctgctgcacgctcttagctttagggatagtccctttggcgggctgcccacctttaacctggcccagtctcctgcaagtttcccacccgaggcgtccgagcccccccgagtggtgaggccagaaccttcaacgcgagctctcgagccgcctgctgaagatcggggcgacgaggtggttttgaggcagaagccaccaacaggcagaaaagtgcaactgacacctgcccggcagatgaacctcggtttcggcgacgaatcgcctgagccagaggcaagtggacgaggagagcgtctcgggaggaaggtggcaccactggcaactacagaggatagtctggcttccattccatttatagatgaacctacatctcctagtatcgatttgcaggccaaacacgtccctgcttccgctgtagtcagttccgccatgaacagtgcccctgtcctcggtactagtcccagcagtcctacatttacattcaccctcggccgccactattcacaggactgctctagtatcaaggctgggcggcggtcatcctacttgcttgcaataaccactgagcgcagtaaaagttgcgatgacggactcaataccttcagggatgaggggagggttctcagacgtctgcccaatcgaatcccatctctccggatgttgcggtcatttttcacggatgggtccttggatagctggggcacatcggaagatgcagatgcgccctccaaacgacatagcacctcagatctgagcgacgcaacattctccgatatccgcagggaaggctggttgtactataagcaaattctgacaaagaaaggaaagaaggctggatctggtctgaggcagtggaaaagggtgtacgctgctctcagggcccggtcactcagcctcagtaaggaacgtcgcgagcctggacccgctgcagccggtgcggcagctgctggggccggtgaggacgaggccgctccagtttgcattggaagctgtctggttgatatttcttattctgagacaaaacgacggcatgtgtttcggctgaccactgccgatttctgcgagtatctgttccaggccgaggatcgggacgatatgttgggttggattcgggcgatccgcgagaattcccgagctgagggcgaggaccctggctgtgctaaccaggccctgattagcaaaaaactgaatgattaccgtaaagtgtctcattctagtggacccaaggccgactcctccccaaagggctcaaggggtctcggcgggctgaagtctgagtttcttaaacagtccgcagctagaggactgcggacacaagacttaccagcaggctctaaggacgactcagcagccgctcccaaaacgccatggggaattaatattattaagaagaacaagaaggccgctccaagggccttcggcgtccgcttggaggaatgccagccagcgacagagaatcagcgcgtgccacttattgtggccgcctgctgcagaatagtggaagcaagaggactagagtcgactggaatctatcgggtccccggcaataatgccgttgtctcctctttacaggagcagcttaacagaggccctggtgacattaacttacaggacgagcgttggcaggatctaaacgtcatctcctctcttcttaagagtttctttcgtaagctacctgagccactttttacagatgacaagtacaatgattttatcgaggccaaccgaatagaggacgcgagggaacgaatgcgcactcttcgcaagctgatccgtgaccttccgggacattactacgaaacactgaagtttttggtgggacacctgaagacaatcgcagaccattccgagaagaacaagatggagcctaggaacctggccttggtgtttgggcctaccctggtgagaaccagcgaggacaatatgacagatatggtgacacacatgccagatcggtataagattgtggagaccctaatccaacacagcgattggtttttttcagatgaggaggacaaaggcgagcggaccccagtaggggataaagagccgcaggctgtcccgaacattgagtacctgctccctaacatcggaagaaccgtgccacccggggatccgggatctgacagcacaacatgcagtagtgccaagagtaagggaagctgggccccaaaaaaagagccttacgcacgggagatgctcgcgatttctttcataagtgctgttaatcgtaagcgaaagaagcgccgcgaggctcggggcctcggctcatctacggatgacgacagtgagcaggaggctcacaaacctggggccggtgccactgcccctggaactcaggaacgaccacaaggccctctgcctggagccgtggctccagaggctccaggccgtctttctcccccagcagctccagaagagcgaccggccgcagacacccggagcatagtgtccggctatagtactctgagcactatggataggtccgtgtgctctggcgccagtggacgtcgagctggtgccggtgacgaggccgacgacgaaagatccgagctcagtcacgtcgaaactgacactgaaggtgcagcgggggccgggcccggcggcaggttaacaagacgcccaagcttcagttcacatcatctcatgccatgcgacacccttgctaggcgacgtctggcacgcgggcgcccagacggagaaggggctggacgaggagggcctcgcgctcctgaacctcccggaagcgccagtagcagtagccaggagtctctcagaccgcctgctgcagctttggcctctcgcccatcgaggatggaggcactgcggctacggctgcgggggaccgctgacgatatgttggcggtgcgacttcgaagaccactttcccccgagactagacgccgacgttcttcatggagacgccataccgtcgtagttcagtcgcctcttaccgacctgaattttaacgagtggaaagagctcggcggcggtggacctcctgaacccgcgggcgctcgcgcccacagcgacaataaggactcaggcttgtcgtcattggagtccaccaaagcccgggctccaagctctgccgcctcccagcctcctgccccaggcgacaccgggtctctgcaaagtcagcctccaagacggtcagccgcttcgaggctccatcagtgcttatag

SEQ ID NO: 203296 - DNA, 3435 bp, synthetic construct
  misc_feature 1..3435: note = Description of Artificial Sequence: Synthetic coding sequence
  source 1..3435: mol_type = other DNA
atgaacggcgtggccttctgcctggtgggcatccccccccggcccgaacctcgccctccccagctgcccttagggcccagagacggctgctctcccaggaggccttttccctggcaggggcctcgtacactgttgctctataagtccccacaggatggatttggatttactctccgacacttcattgtttatccccctgagtctgccgtccactgctcacttaaggaggaagagaacggcggccgcggcgggggcccatcaccacggtatcgtctcgagcctatggacactattttcgttaagaatgtgaaggaggacggacccgcccatcgggcaggattgcgcacaggagataggctagtcaaagtcaacggggaaagtgtcataggaaaaacttattcccaggtcattgccttaatccagaacagtgacgacacactggagctgtccattatgcccaaggatgaagatattctccagctggcatactcccaagacgcttatcttaagggcaatgaaccttattccggcgaggctcggtccatccctgagcctccacctatttgttacccgcgcaaaacatacgcaccgcctgctcgtgcttctactcgagccaccatggtaccggagcccactagcgctttaccttccgacccccgcagccccgcggcctggtcagatcccggcctgcgagtcccccccgcagccagagcacacctggataactcaagcctgggtatgtctcagcctcggccttcccctggagcctttcctcacctgagtagtgaacccagaactccaagggcctttccagagcccggaagcagagtccctccatccaggctcgagtgtcagcaggccctgtctcactggttatctaatcaagtaccccggcgggctggtgagcggcgctgtcctgccatggcaccccgcgctagatccgcaagccaggaccggttggaggaagtcgctgcccctcgaccctggccctgttctacctcccaggacgcactgtcccagctgggccaggagggctggcaccgagcgagatccgacgactatctgtcccgcgcaaccagatcagcggaggccttaggccccggagccctggtctctccaaggtttgaaaggtgtggatgggcttctcagagatcttcggcccgtaccccagcatgccctacacgtgacctgcctggccctcaggctccaccgccttcaggccttcagggtctcgatgacttaggctatatcggttaccgatcctatagtccctctttccaacggaggaccggccttttgcacgccctttctttcagggattctccttttggaggacttcctacattcaacctggcacagtcccctgcatccttccctccagaagcctccgaaccacctagggtggttagacccgagccgagcactagagctctggagccaccagccgaggacagaggcgacgaagtggtcctacgccagaaacctccaacagggagaaaggtgcagctaactcccgccaggcagatgaatctcgggttcggcgacgagagccctgaacctgaggcgagtggccgaggtgaaagactaggaaggaaggttgcccccctggccacaacagaggattcactcgctagcattccgtttattgacgagcccacatcacccagcatcgacctgcaagccaaacacgttcctgcatcagctgttgtgtcctcagcaatgaattccgcacctgtgctgggaacaagcccgtccagccctaccttcacttttaccctcggcaggcattactctcaggactgctctagcatcaaggcgggccgcagaagttcctacttgctagccattaccacggagcggtctaagagctgtgatgatggcctgaacacatttcgggacgaaggccgcgtactgcgcaggcttccgaaccgcatccctagccttcgcatgttgcggagcttcttcacggacgggtcactggacagttggggaactagcgaagacgctgatgccccttctaaaaggcatagcacttcggatctgtcagatgccactttttctgacatcaggagagagggctggctgtactacaagcaaattctgacaaagaagggaaagaaggcgggcagtgggctccgacagtggaaacgggtctatgccgctttaagggctcggtcactgtctctgtcaaaggaacggagggagccaggccctgctgccgctggagcagcagctgcgggcgcaggggaggatgaagcagcccccgtctgcataggctcatgcttggtggacataagttactctgaaactaaaagacgccatgtctttcgcttgaccaccgctgacttctgtgagtacctttttcaggctgaagacagagatgacatgctggggtggatcagggcaatacgggagaacagcagggccgaaggcgaagatccagggtgcgcaaaccaagcactcattagcaagaaattgaacgactaccggaaggtgagtcattcctcagggccaaaggcagatagcagccccaaaggtagccgggggctggggggcctgaaaagcgaattcctgaagcagagtgccgcccggggactgcggacacaggatcttccagcaggctctaaggacgacagtgccgcggcacccaagacaccgtggggaatcaatatcattaaaaagaataagaaagctgcaccacgcgctttcggagtgcggctcgaggagtgtcagcctgcgactgagaatcagcgggttccactcatcgtggccgcttgttgtaggattgtcgaagccagagggctggagtctactggaatttacagagttcccggcaacaacgcagtggtgtcaagtctgcaggaacaacttaatagagggcctggcgatattaatctgcaggatgaacgctggcaagacctgaacgtaattagttcactgctgaagagtttcttccgtaagctgcccgagcccctgttcacagacgacaaatacaatgatttcatagaagccaaccggatcgaagacgccagagaacgaatgaggactctgaggaaattaatccgggacctgccaggccactactacgaaaccctcaagttcctcgtgggccatctcaaaactattgcagatcactccgagaagaataagatggagccgagaaatctggcgctggtctttggacctacattggtccggacatccgaagacaacatgactgatatggtaacccacatgccagacagatataaaatagttgagaccctcatccagcactccgattggttcttctccgacgaggaggacaaaggggagcgtacacctgtgggcgacaaggagccgcaggccgttcctaatattgaataccttttacctaatataggacgtacagtacctccgggggatccgggcagcgcagacttattggagatctag

SEQ ID NO: 203297 - DNA, 4194 bp, synthetic construct
  misc_feature 1..4194: note = Description of Artificial Sequence: Synthetic coding sequence
  source 1..4194: mol_type = other DNA
atggacaccatcttcgtgaagaacgtgaaggaggacggccccgcccaccgtgccggtctcaggacaggagatcgcctcgtgaaggtcaatggagagtcagtgattggcaaaacgtattctcaagtcatcgccttgattcaaaactcggatgacaccctggagcttagcatcatgcccaaagacgaggacatactacagctcgcatactcacaggatgcctacctgaaaggaaacgaaccctatagtggcgaggcccgctctatccctgaaccccctcctatttgctatcctcggaagacctatgcgccaccagcccgcgcttcaacccgggcgactatggtgccggagcccacttcggccttaccaagtgatccaaggagccctgccgcttggtctgaccctgggctacgggttcccccggctgcgcgagctcacttggataatagttcacttggcatgtcccagccccgaccctcacctggcgcatttcctcatttatcatcagaaccgcgcaccccgagagcttttcctgagccaggatccagggtgccacccagtagattggaatgtcagcaggctttgagccactggctgtcaaatcaggtccctcgacgcgcgggtgagcgacggtgccccgcaatggcgcccagagcccggtcagcgtcacaagacaggctggaagaggtggctgctccacggccatggccttgttcgaccagtcaagacgcactctcacagctcgggcaggagggctggcaccgcgctcggtccgacgattatcttagtcgtgccactcgaagcgccgaagcactgggacctggggccctcgtttccccacggttcgaacgttgtgggtgggcgagccaaagaagttccgcccgcaccccagcttgtccgaccagggacctgccagggccacaggctcccccaccatccgggctccagggtctagatgacctcggctatattggttacaggagttactccccaagttttcagcggagaaccgggctgcttcatgctctgtcctttcgtgatagccccttcggcggattacctacctttaacctggcacagagccccgcgagctttccgccggaagctagcgagcccccccgggtcgtgcgccccgagccttctacccgcgcactcgagccccctgcagaggaccgcggagatgaggtggtgttaagacagaagccaccaacagggcggaaagtgcagctgacacctgctaggcagatgaacctgggcttcggcgacgaatcccccgagcctgaggccagcgggaggggcgagcgcctcggaagaaaagtcgcacctttggcaactacggaagactctctcgcatccatcccattcattgacgagccgacttcaccctccatcgacctacaggccaagcatgtccctgcctctgctgtggtttctagcgccatgaactctgccccagttctcgggacttctcccagctcacccacattcacatttacactggggcgccactactcacaagattgttcctcgataaaggctggacggcgttcatcttacctgctcgcaattaccactgaacgatcgaaatcatgtgacgatgggctgaatacgttccgagacgaaggtagggtcctgagaaggcttccaaatcgcatccccagcctgcggatgcttcggagctttttcaccgacggctcattggactcttggggcacctccgaagacgctgatgcacctagtaaacgacactctacatctgacctgagcgacgccacgtttagcgacatcagacgggagggatggttgtactataagcagatcctcactaaaaagggaaagaaagcaggctccggactacggcaatggaaaagggtctacgccgccctgcgcgctcggtcgctgagtctttcaaaggaacggcgcgagcctggtccggccgcggctggggccgccgccgcaggcgccggcgaagatgaggctgcccccgtatgtatcgggtcctgtttggttgatatttcatactctgagacaaaaaggcggcacgtgttccgccttacaacagctgatttctgtgaatatctgttccaggctgaggatagagatgacatgctggggtggatcagagccataagggaaaactctcgggctgaaggggaagaccccggctgcgccaaccaagccctcatttccaaaaagctaaatgactatcgaaaggttagccattccagcggtccgaaggccgattcttcccctaagggttctcgcggtctcggcggtcttaagagcgaattcctgaagcaatcagcggcgaggggcctgcgcacgcaagatttaccagccggatccaaggatgatagtgcagctgctccaaagactccctggggaataaatattatcaagaaaaacaaaaaagctgccccaagggcctttggtgtgaggctggaagagtgtcagccagcgacagagaatcaacgagtgccactcattgtggcagcttgttgcagaatagtggaggctaggggccttgagtctaccggaatctacagagtgcctggcaataatgcagttgtctcatccttacaagaacagttaaaccgtggcccgggagacattaacctccaggacgaacggtggcaagaccttaacgtgattagcagcctactgaaatccttttttcgcaaactcccagaacctctctttacggatgataaatacaatgattttatagaagccaatcggattgaagatgcgagagaaagaatgcggactctccgcaagttgattcgagatcttccagggcattattacgagaccctaaagtttctggtagggcatctgaagacgattgccgaccattctgagaagaacaaaatggagccacgtaatttagctctggtattcgggccaacactcgtacggacctctgaagataacatgactgacatggtgacccatatgcctgatcggtataagatcgtggagaccctcatccagcattctgattggttcttctccgatgaggaggataagggcgagagaacaccggttggggacaaggagccgcaggcggtgcctaatatcgaatacctcttgccaaacattggccgcactgtgcctcccggcgaccccggaagtgacagcacgacctgttccagcgctaagagcaaggggagctgggctcctaaaaaagagccttatgccagggagatgctggcaatctccttcatttcggctgtgaaccgcaaaaggaagaaaaggcgggaagcacgagggctcggttccagtacagacgatgatagtgagcaggaagctcacaaacctggcgcaggcgccaccgcaccgggtacgcaggagaggcctcaagggcccttgcccggggccgtggcccccgaagccccaggccgattatctccacccgccgctcctgaagagaggcccgctgcggacacacgctctattgtgtccgggtattcgaccctgtccaccatggatcgttctgtgtgctctggcgcctccggcagacgggcgggcgcaggcgacgaagcagatgacgagcggagcgaactcagccacgtcgagaccgataccgaaggagcagcgggagcaggccctggtggacgtctaaccaggcggccaagttttagctctcaccacctgatgccctgcgatacccttgccagaagacgactggcccgcgggcggccagacggagagggcgcgggccggggcgggccacgtgccccagagccccccggttctgcaagcagcagctcccaggagtcgctgaggccacccgccgccgctcttgcctccaggccgagtcgcatggaggccttacgcctcaggctgcgtgggaccgcggacgacatgctagccgttcgattaagaagaccactatctccagagacacgaaggagaaggagctcttggcgcagacacaccgtcgtcgtccagtcaccactaacagatctcaactttaatgagtggaaagagttaggcggcggaggtccgcctgagcctgcgggagctcgggcacactccgataacaaagattctgggctctcttcccttgagagtaccaaggcgagagccccgtcgtctgccgctagccagccgccagcaccgggcgatactggatcattgcaaagtcagccgcctaggcggagcgctgcgagtaggctccaccaatgcctgtag

SEQ ID NO: 203298 - DNA, 1968 bp, synthetic construct
  misc_feature 1..1968: note = Description of Artificial Sequence: Synthetic coding sequence
  source 1..1968: mol_type = other DNA
atgcccgaggaccggaacagcggcggctgccccgccggcgccctggccagtacacccttcatcccgaaaactacatacaggaggattaaacggtgcttctccttccgaaaaggaattttcggtcagaagctggaggacactgtgagatacgagaaaagatacgggaataggctggccccaatgctcgtggagcagtgtgtggattttatccgccagcgaggactaaaagaggagggcctgtttcgcctgccagggcaagctaacctggtgaaagagttgcaagacgcttttgattgcggggagaagccatcttttgactccaatactgacgtgcacaccgttgcatccctcctgaaactgtatctgagagaactgcccgagcctgtgattccgtatgctaagtacgaggacttcttgagctgcgcaaaattactgtctaaggaagaagaggcgggggtcaaagaactcgctaagcaggtgaaatcgctaccagtggtgaactacaacctcttaaaatacatttgccggttcctggatgaggtgcagtcctacagtggagtgaacaagatgagtgttcagaacctggctactgtattcggccccaatatcctgcgccctaaagtcgaggacccgctaacgatcatggagggcacagttgtggtgcagcagctgatgagcgttatgatcagcaagcatgactgcttgtttcctaaggacgccgagttgcaatccaaaccgcaggacggagtcagtaacaacaatgagatacagaaaaaggccacgatgggccagttgcaaaataaggagaataacaacacgaaggattcacccagtcgtcagtgctcctgggacaaaagcgagtccccccagagaagcagcatgaacaacggctcaccaacagccctttccgggtctaagaccaactctccgaagaatagtgtacataagctagacgttagcaggtcccctcccctcatggttaaaaagaatcccgctttcaataaggggagcggaattgtcaccaacggaagcttttcatcttcaaatgccgagggcctagaaaagacccagactacaccaaacggatccctgcaggccaggcgctcttccagcctgaaagtcagtggtactaaaatggggactcacagcgttcagaatggaaccgtgcgcatgggaatcctgaacagcgatactcttgggaaccctactaacgtgcgaaacatgtcatggcttcctaatgggtacgttacgcttcgtgacaacaaacagaaggagcaggcaggcgaactgggccaacataaccgccttagtacatacgataacgtgcatcagcagttctccatgatgaatttggatgacaaacagtcaatagactctgccacatggtctactagcagctgcgagatcagcctcccagagaattcaaatagttgtcgaagcagcacaaccacctgccccgaacaggatttctttggaggtaacttcgaggaccctgttctggatgggcctccacaggatgatttatcccaccctcgagattacgaaagcaaatctgatcaccgctctgttggtggtagatcttcacgggccacctcatcatcagataattcagagactttcgtgggtaatagttcaagcaatcactccgctcttcattctctggtgagcagcttgaagcaggagatgacaaaacagaaaatagagtacgaaagtcgaattaagagcctcgaacaaagaaatttaaccctggaaactgagatgatgagtctccatgatgaactggatcaggagaggaaaaagttcaccatgattgagattaaaatgaggaatgctgaaagggcaaaagaggacgccgaaaagaggaacgacatgctgcagaaagagatggagcagtttttcagcactttcggggagctgactgtggaaccgcgtcgcacggagagaggcaataccatttggatccagtag

SEQ ID NO: 203299 - DNA, 1962 bp, synthetic construct
  misc_feature 1..1962: note = Description of Artificial Sequence: Synthetic coding sequence
  source 1..1962: mol_type = other DNA
atgaccgccaaccacgagagctacctgctgatggccagcacccagaatgacatggaggactgggtgaaaagtatccgtcgagtgatttggggaccctttgggggcggaatttttggccaaaagcttgaagataccgtacgatatgagaagcggtatgggaaccggctcgctccaatgctggtggagcagtgtgtcgatttcattcgacaaagagggctgaaggaggagggcctttttcggttgccaggtcaggcgaacctcgtcaaagagctgcaagatgccttcgactgcggtgagaaaccaagcttcgattcaaatacagacgtccacacagtcgcatccctccttaaattgtatcttcgggagctgccagaacccgtcatcccatatgctaagtatgaagatttcctgtcatgcgctaagctcctgagcaaagaggaggaggccggcgttaaggaattagcaaagcaggtgaagagcctacccgtagttaactataatcttctcaaatacatatgtcgcttcctggacgaagtgcagtcatatagcggggttaataagatgagtgtgcagaacctggccactgtttttggccctaacattttgcggcccaaagtcgaggacccgcttactataatggaaggcacagttgttgtgcagcagctgatgtcagtcatgatttccaaacacgattgcctttttcccaaagacgcagaactgcagtctaaacctcaggacggggtgtctaacaacaacgagatccaaaagaaggccaccatggggcagttgcagaataaagagaataacaatacgaaggatagcccctcacgccagtgttcgtgggataaatccgagtcaccccaaagaagttcaatgaataacggttctcctaccgcgttaagtgggagtaaaaccaattcgccaaagaattccgttcataaactggacgtgtcccggagccctcccctgatggtgaagaagaaccctgctttcaataagggctccggcattgttaccaatggcagcttcagctctagtaacgccgagggcctggaaaaaactcagacgaccccaaatgggagcctgcaggccagacgcagctcatccctgaaagtgagcggcacaaaaatgggcacacacagtgtccaaaatgggacagtgcgaatgggtatcctgaatagtgatactttaggcaatcctaccaatgtgagaaacatgtcatggctgccaaacggatatgtgaccctccgagataacaagcagaaagagcaggccggcgagctcgggcagcataacagactcagcacttacgataacgtccaccaacagtttagcatgatgaaccttgacgacaagcagtctatagattccgcaacctggtccacatcctcttgcgaaattagcttgcccgaaaactccaacagctgtagatccagtaccaccacgtgcccagagcaggacttctttggcggtaatttcgaagaccctgtcctagacgggccgcctcaggatgatctgagccatccgagagactacgaaagcaagtcagaccatagaagcgtggggggccggtcctcacgggctacttcctcctccgataactctgagactttcgtgggcaatagctcgtctaaccattccgcattacactccctggtcagctctcttaagcaagaaatgactaagcagaaaattgaatacgagtctagaattaagagccttgaacaaagaaacctgaccctggaaacggaaatgatgagcctccatgacgaactggatcaagaaaggaagaagtttactatgatagagattaaaatgcggaacgccgaaagggcgaaggaagacgcagagaaacgaaacgatatgctacagaaagagatggaacagttcttttccacctttggggagctgaccgtagagcccagacgcactgaacgaggcaacacgatatggatccaatag

SEQ ID NO: 203300 - DNA, 2247 bp, synthetic construct
  misc_feature 1..2247: note = Description of Artificial Sequence: Synthetic coding sequence
  source 1..2247: mol_type = other DNA
atggaggagaacaacgacagcaccgagaacccccagcagggccagggaaggcagaatgcaatcaagtgtggatggctgcggaagcaaggcggttttgtgaagacatggcatacgcgctggttcgtactgaagggggaccagttgtactacttcaaagacgaagacgaaacgaagcctctcggtactatcttcctgcctggcaataaagtctccgaacacccatgcaacgaggaaaatccgggcaagttcttattcgaagtcgtgccaggcggagatagggatcgaatgaccgcaaaccacgaatcttaccttctgatggcaagcactcagaatgatatggaagactgggtgaaaagcatccggcgggttatctggggacctttcggcgggggtattttcggccaaaaactggaggataccgtgcgatacgaaaaaagatacggcaacaggctggctcctatgctcgtggaacagtgtgtcgactttataagacagagaggattgaaggaggaaggcttatttaggctccctggtcaagctaacctggtgaaggaattgcaagatgcgtttgattgtggggaaaagccgagcttcgatagtaacactgatgtccatacagtggccagcctgctgaagttatatctccgggagctgcccgaaccagtcataccttacgcaaaatatgaggacttcctctcatgcgccaagctgttgtccaaggaggaggaggcaggagttaaagagctggccaaacaggtaaaaagcttgcccgttgtcaattataacctgctcaaatacatttgcagattcttagacgaggtgcagagttattctggcgtgaataagatgagcgtgcagaacctggctacagtcttcggacccaatattctgaggcccaaggtcgaggacccactgactattatggaaggcaccgtcgtggtccagcaactcatgtcagttatgatttctaaacatgactgcttgttcccaaaggacgcagagcttcagtcgaagccacaggacggtgtgagtaataataatgagattcagaaaaaagcgacaatgggacagctacagaacaaggagaacaataacaccaaagacagtccaagccgacagtgctcatgggacaagtccgagagcccccagagatcctccatgaataacggctcacctacagcactctcgggcagcaagaccaacagtcccaagaattctgtacataagctcgatgtgtctaggtcccccccattgatggtgaagaagaacccagcgttcaataaaggatcaggcatcgtaaccaacggatccttctcaagcagtaacgccgagggcctcgagaaaacacaaacgacgcctaatggctcactgcaggcccgcaggtccagtagcttgaaagtcagcggcacgaaaatgggcacacactccgtgcagaacggaactgtaagaatggggattcttaattcagacacactcggtaaccccaccaacgtgcgcaatatgtcttggctccccaacgggtatgtaacactacgtgacaacaaacagaaagaacaagccggtgagctgggtcaacataatagattgtccacatatgataatgtccaccagcagttttccatgatgaacctggacgacaagcagtccattgactctgccacatggtctacctctagctgtgaaatctccttgcccgagaattcgaattcctgtcgctctagcactaccacctgtccagaacaggacttctttggcggcaattttgaggatccagtgctggatggccccccccaagatgacttgtcacaccctagagattacgaaagtaagtctgatcaccgtagcgttggggggcggtctagtcgcgccacctcctctagcgataactccgagaccttcgttggcaactcctcttccaaccattccgcactgcacagtttggtctctagcctgaaacaagagatgactaagcagaagatcgagtatgaaagccggatcaagtccctggaacagaggaatctaacattagaaaccgaaatgatgtcactgcacgatgaactcgatcaggaaagaaaaaaattcaccatgatagagattaaaatgcggaacgcagaacgtgccaaagaggatgcagaaaagcggaacgacatgttgcaaaaggaaatggaacaatttttttccaccttcggagaactgactgttgaaccgcgccggacagaaagaggaaacaccatttggatacagtag

SEQ ID NO: 203301 - DNA, 741 bp, synthetic construct
  misc_feature 1..741: note = Description of Artificial Sequence: Synthetic coding sequence
  source 1..741: mol_type = other DNA
atggaggagaacaacgacagcaccgagaacccccagcagggccagggacgacagaatgccatcaaatgtggctggttgcggaaacagggcggctttgtgaagacatggcacactcgatggtttgtcttgaagggtgaccaactctactatttcaaggacgaagatgaaaccaagcccctgggaaccatctttttacctggtaacaaagtcagtgaacacccctgtaacgaagaaaaccccggcaagtttctgtttgaagttgtgcccggaggcgacagggatagaatgacagcaaatcacgaatcctacctgctcatggcatccacccagaacgacatggaagactgggtgaagtccatcaggcgggttatatggggacccttcgggggtggaatattcggtcagaagctggaagacactgtgcggtacgaaaaaaggtatggcaatcggttggcccccatgttggtagagcagtgcgtggactttatccgccagaggggactgaaggaagagggcctgttccgcctgcctggtcaggccaatctcgtgaaggaattacaggacgcctttgactgtggggaaaaacccagtttcgactcaaacactgatgtgcacacagtggcctctctcctgaagctctacttgagggagttgcctgagcccgtgatcccatacgctaaatacgaggatttcctcagctgtgctaagcttctgtctaaggaagaggaggcggtcagctag

SEQ ID NO: 203302 - DNA, 249 bp, synthetic construct
  misc_feature 1..249: note = Description of Artificial Sequence: Synthetic coding sequence
  source 1..249: mol_type = other DNA
atgaccgccaaccacgagagctacctgctgatggccagcacccagaatgatatggaggactgggtgaagagtatccgtagagtgatttgggggccatttggagggggcatttttggacaaaagctggaggatacagtacgatatgagaagaggtacggcaacagactggcaccgatgctggtggagcagtgtgtggacttcataagacagcgtggtcttaaagaagaaggccttttcagactgccttag

SEQ ID NO: 203303 - DNA, 1938 bp, synthetic construct
  misc_feature 1..1938: note = Description of Artificial Sequence: Synthetic coding sequence
  source 1..1938: mol_type = other DNA
atgagcctgaagctgccccggaactgggacttcaacctgaaggtggaagcagctaaaatcgcccgctcaagaagcgttatgacgggggagcagatggctgccttccatccatcctcgactccgaaccccctagagagaccaataaagatgggctggctaaaaaagcaacgtagtattgtcaaaaactggcaacagagatattttgtgctccgggcccagcagctgtactattataaagacgaggaggacaccaaaccccagggatgtatgtatctgcccggttgtactataaaggagattgcaacgaacccggaagaagccggcaagtttgtgttcgagatcatccccgcttcctgggatcagaatcgaatgggccaagattcttacgtcctgatggcaagtagccaggcagagatggaagaatgggttaagttcctccggagagtggccggcacgccatgcggagtctttgggcagcgtttggatgaaaccgtggcctatgaacaaaaatttggcccccacttagtccccatcctcgtagaaaaatgtgcggaattcatcctggagcatggaaggaacgaagaaggaatctttcgcttgcctggccaagataacctggtcaagcaactgcgcgacgccttcgacgccggggaacgcccgtccttcgaccgtgatacggacgtgcatacagttgcctctttactgaagttgtacctgcgggatctccccgagcccgtggtgccctggtctcaatacgaaggttttctgctttgcggccaactcacaaatgccgatgaggcgaaggctcagcaggaactcatgaagcagctttctatccttccaagagacaactacagcctgctgtcatacatatgcaggtttctgcacgagatccaactaaactgcgctgtgaacaagatgagtgtggacaatctcgcgactgttataggggtgaacctgatccggagcaaagtcgaggatcccgctgtgattatgaggggaacaccccagattcagagggtcatgactatgatgatcagagatcatgaggtgctcttccccaagtccaaggatattcccttatccccgcccgcccagaagaacgaccctaaaaaagcacctgtcgcgagaagcagtgtgggctgggatgcaaccgaggacctgcggatctcacgtaccgactctttcagtagcatgactagcgatagtgacacaacttctcccacaggccagcagccttctgacgcattccccgaggacagcagcaaagtcccacgggagaagcctggggactggaaaatgcagtccagaaaaaggacgcaaactttacctaaccgaaaatgctttctgacaagcgccttccagggtgcaaatagcagcaagatggaaatctttaaaaatgaattctggtccccctccagcgaggccaaggccggcgaggggcataggcgaaccatgtcacaggacctgaggcagttgtccgactcgcaacggaccagtacttacgataacgtcccatcattgcctggatccccgggtgaggaggcttccgcgctatcgtcccaagcctgcgattccaaaggggacaccctggcttccccaaacagtgagacagggccgggcaaaaaaaatagcggcgaggaagaaatagatagtctgcaacgtatggtccaggaactgcgaaaagaaatcgagacccaaaagcaaatgtacgaagagcaaataaaaaacctcgaaaaagagaattatgacgtatgggcgaaggttgtgagacttaatgaggagctcgagaaggagaagaaaaagtccgcggctctcgagatcagtctgcggaatatggaaaggtcacgcgaagatgttgaaaaaaggaacaaagctctggaggaagaggtaaaggaattcgtaaagtccatgaaggaaccgaaaacagaggcgtag

SEQ ID NO: 203304 - DNA, 1917 bp, synthetic construct
  misc_feature 1..1917: note = Description of Artificial Sequence: Synthetic coding sequence
  source 1..1917: mol_type = other DNA
atgagcctgggccagagcgcctgcctgttcctgagcatcgcccggtcccgctcagtgatgaccggagagcagatggctgcctttcaccccagttcgacaccaaatccactggaacgcccgataaagatggggtggttgaaaaaacagagatctatcgtgaagaactggcagcagcggtattttgttcttagggcacagcagctgtactactataaagacgaagaagacaccaagccgcaaggttgtatgtatctcccagggtgcactatcaaagaaattgcaacgaatcccgaagaagccggaaagttcgtattcgaaatcatcccagcatcatgggaccagaataggatgggtcaagacagttacgtgctcatggcttcttcacaggccgagatggaggaatgggtgaagttcttgcgccgagtcgctggaactccttgtggagtgttcggacaacggttggatgagacagtcgcatacgaacagaaattcggtcctcacctggtgcccatcctagttgagaagtgtgcagaattcatccttgaacacggtaggaacgaagagggtatcttccgtctacccgggcaggataatctcgtgaaacagcttagggatgcattcgatgcaggcgagcgtcccagctttgatcgtgacacagacgtacatacagtcgcctccctcctgaagctgtacttgcgcgatctgcccgaaccggtcgtgccatggtcacaatacgagggcttcctcctgtgcggacagctgaccaacgccgacgaggccaaggctcagcaggaactgatgaaacagcttagcatactcccacgtgataattactctttactgtcctatatatgccgtttcctccacgagattcagctgaactgcgctgtgaataagatgtccgtggacaaccttgccacagtaatcggtgtcaatctgatccggtcaaaggtggaggatcctgccgtgattatgagaggcacgccccaaatccagcgtgtgatgacgatgatgatccgcgaccacgaggtactgttccctaagagtaaggatattcctctgagcccacctgcccagaaaaatgatcctaagaaagcccccgtcgcgaggagttccgtgggctgggatgcaaccgaagatctgagaatctccaggacggatagtttttcttctatgacatctgatagtgatacaacgtcacccacaggtcagcagccttctgatgcttttcccgaggacagctctaaggtgccgagggaaaagccgggcgactggaagatgcagagcagaaaacgcacccaaactctcccgaataggaagtgcttcctcacctccgctttccagggagccaatagctccaaaatggaaatcttcaaaaatgagttttggtccccttctagcgaagcaaaggctggcgagggacacagacggacaatgagccaagatctgagacagttgtcagattcccaacgaacatcaacgtacgacaacgtgccctccctgcctgggtcgcccggagaagaggcaagtgcacttagctctcaggcttgcgatagcaagggagatacactggctagcccaaactctgaaacgggcccaggcaagaagaactctggtgaggaggaaatcgacagtctgcagcggatggttcaggagctgagaaaggagatcgagacacagaagcagatgtatgaagagcaaatcaaaaatctagagaaagagaattatgacgtttgggctaaagtagtgcggcttaatgaggagctggagaaggagaagaagaaatccgcagccttagaaatttcactaagaaacatggagagaagtagggaagacgtcgagaagcgcaacaaagcattagaggaggaagtcaaagaattcgtgaaatcaatgaaggagcctaaaacagaagcttag

SEQ ID NO: 203305 - DNA, 1941 bp, synthetic construct
  misc_feature 1..1941: note = Description of Artificial Sequence: Synthetic coding sequence
  source 1..1941: mol_type = other DNA
atgagcctgaagctgccccggaactgggacttcaacctgaaggtggaggccgccaaaattgccaggtcgagaagcgtcatgactggtgagcagatggcagcctttcaccccagctctacccccaatccgctggaaaggcccatcaaaatggggtggctgaagaaacaacgaagcatcgtcaagaactggcagcagaggtatttcgtgctccgggctcagcagctttactactataaagacgaagaagacactaaaccacaggggtgcatgtacctccccggatgtacaataaaagaaatcgctaccaaccccgaagaggcagggaaattcgtctttgagattattcctgctagttgggaccaaaatagaatgggacaggactcatacgtgctcatggcctccagtcaggcagagatggaggaatgggttaagtttctgaggcgcgtcgcagggacaccctgcggagccgtatttggacagcggcttgatgaaacagtggcgtacgaacagaagttcggtcctcatctagtgcccatccttgtggagaaatgtgcagagttcattctcgagcatgggcgcaatgaagaaggtatctttcggctgcctggccaggacaacctcgtgaagcagttgagagatgccttcgacgctggcgagcgaccaagcttcgatagggatactgacgtacacacagtggcgtccctgctgaagctttacttgcgcgacctccctgaaccagtggtgccatggtctcagtatgaaggattcctgctgtgtggccagctgaccaacgctgatgaagctaaagctcaacaggaactgatgaaacagttgagtattctgcctagggataactactcactcttgtcgtatatttgcagattcctccatgaaatccaattgaattgcgccgtgaacaaaatgtccgtggacaacctcgccaccgtcattggtgtgaatctcattcggtcaaaagtggaagaccctgcggtgatcatgcgtggcaccccacagatacaacgggttatgacaatgatgatcagagaccacgaagtgttgttccccaaatcaaaggacatcccactgagcccaccagctcagaagaacgaccctaagaaggctcccgttgccagaagctctgtaggctgggacgcaaccgaggatctgaggattagcagaacggacagcttttcttccatgacttcggactctgatacaacatctcccaccggtcagcagccaagcgacgcttttcccgaggacagcagcaaagtccccagagaaaagccaggggattggaagatgcagtccaggaaacgcacccaaaccctccccaatcggaagtgttttctgacttctgcttttcagggagccaacagtagcaagatggagatatttaaaaatgaattttggtctccttcctcagaggctaaggctggggaggggcatagacgtaccatgtctcaagatctgaggcaattgtcagactcccagcggactagcacctacgataacgtgcccagcctgcccggtagtcccggcgaggaggccagcgctctcagcagccaagcgtgtgactctaaaggcgatacactcgcctcccccaattcggagacgggacctggtaagaaaaacagcggggaggaggagatcgattcccttcagaggatggttcaagagctgcgcaaggagattgaaacacaaaagcagatgtatgaggaacagatcaaaaatctcgaaaaggaaaattatgacgtctgggccaaggtagtgcgcctcaacgaggagctggaaaaggagaaaaagaaaagcgccgcgctggagatctcccttcgaaacatggagcggtcaagagaggatgtggagaagcgaaataaagcattagaagaggaagtgaaagagttcgtcaagagtatgaaagagcccaagacagaggcttag

SEQ ID NO: 203306 - DNA, 1920 bp, synthetic construct
  misc_feature 1..1920: note = Description of Artificial Sequence: Synthetic coding sequence
  source 1..1920: mol_type = other DNA
atgagcctgggccagagcgcctgcctgttcctgagcatcgcccggtctagaagcgtaatgaccggcgagcagatggctgccttccatccctcgagtacacctaatccacttgaacgaccgatcaagatgggctggctgaagaaacagagatccatagtcaaaaactggcagcagcgatactttgtcctgagggcgcagcagttgtattactacaaggacgaagaggacacaaaaccacagggctgcatgtatttgcccgggtgtacaattaaggagatcgccaccaatcccgaggaggctgggaaattcgtgttcgagattataccggcatcctgggatcagaaccgtatgggacaagatagctatgtgttaatggccagctcccaggccgagatggaagaatgggtgaaatttctgcgcagagtcgccggcacaccatgtggggccgtgtttggccagcgcttggacgaaaccgttgcgtatgaacagaaattcggtccacatttagtcccaatcctggtggagaagtgtgctgaatttattctggagcacgggcggaacgaagaaggcatcttccgcctccccggacaggacaatttagtaaaacaactgagggatgcgttcgacgccggcgaacgaccttcttttgatcgcgatactgatgtccataccgtcgcaagcctgctgaaactgtatctgcgcgatctgccagagccagttgtcccttggagtcaatacgagggttttctgttatgcggtcagctcaccaacgctgatgaggccaaggctcagcaggagctcatgaagcagctgtctattctgccaagagataactactccctcctatcctacatctgtaggttccttcacgagatccagctaaactgcgccgtcaataaaatgagtgtggacaacctggccacagtgattggcgttaacctgattcgttccaaggtagaggaccctgcagtgatcatgagaggcaccccacaaattcagcgggtcatgactatgatgattcgagaccacgaagtcctcttccccaaaagcaaggacatcccactgtctcctccagcccaaaagaacgaccccaaaaaggcacccgtggctagatcttccgtaggttgggatgctactgaagaccttcggatttccagaacagattcattctcatccatgacatccgactcagacaccacatctcctaccggacaacaacctagcgacgcctttcctgaagacagcagcaaggtccccagggagaagcccggagattggaagatgcagtccagaaagcggacccagaccctgcccaaccgaaaatgcttcctcacatcagccttccaaggggctaatagttctaagatggaaatttttaagaacgagttttggagcccgagcagtgaagccaaagcgggggaaggccatagaaggaccatgagccaagaccttaggcagttgtccgactcccaaaggaccagcacatacgacaatgtacccagcctgcccgggtccccaggtgaggaagcctccgcgctgtcttcccaggcctgtgattcaaagggtgatactctggcctctcccaactccgaaaccggcccaggaaagaaaaattcgggggaggaggagattgacagcctgcagcgcatggtgcaggagttgcgcaaagagatcgagacccagaaacaaatgtacgaagagcagattaagaatctggaaaaggaaaactacgatgtatgggccaaggttgttcgcctgaacgaagaattggagaaggaaaagaagaaaagtgccgcgctggagatatctttaagaaatatggaacgctccagagaggatgtggagaaaaggaataaggccttggaagaggaggttaaagaattcgtgaagagtatgaaagaaccaaagactgaggcatag

SEQ ID NO: 203307 - DNA, 852 bp, synthetic construct
  misc_feature 1..852: note = Description of Artificial Sequence: Synthetic coding sequence
  source 1..852: mol_type = other DNA
atgaccggcgagcagatggccgccttccaccccagcagcacccccaacccattagagcggccgattaagatgggctggctgaagaagcaaaggagtatcgtgaaaaactggcaacagaggtacttcgttctgcgagcccagcagctctactattataaggatgaagaggatacaaagccacagggatgtatgtatctgccggggtgtaccatcaaggagatcgccaccaatcccgaggaggctgggaaattcgtcttcgaaatcattcccgccagttgggaccaaaataggatgggtcaggatagttatgtcctgatggcatcatctcaggccgaaatggaggagtgggtgaagttcctgcggagggtggctggcactccatgcggagcagttttcgggcaacggcttgatgaaaccgtagcctatgaacagaagttcggccctcacctggtgccaatcctggtcgagaagtgcgcagaattcatcttagagcatgggagaaacgaggagggaatatttagactgccaggccaggataatctggtgaagcagctgcgggacgcgtttgatgctggcgagcgcccatctttcgacagggatactgatgttcatactgtggccagtctcctcaagctatatttacgggacctgcccgaacccgtagtgccatggtctcaatacgaaggctttctgctctgtggacaactcactaacgcagatgaagcaaagaactaccgcaatcgaaacgactgtcagtcagtggtgtcggcccagattcaccagttctgcccgagggtgtccctgttagcacatggacaggcccatctgctcgtgaatgacttactggtgtag

SEQ ID NO: 203308 - DNA, 1776 bp, synthetic construct
  misc_feature 1..1776: note = Description of Artificial Sequence: Synthetic coding sequence
  source 1..1776: mol_type = other DNA
atgagcctgggccagagcgcctgcctgttcctgagcatcgcccggagccggtctgtgatgactggagaacagatggctgcctttcacccatcttcaactccaaatcccctggaaagacccattaaaatgggttggcttaagaaacagagaagtattgtgaagaattggcagcagcgatacttcgtccttagggcgcaacagctgtattattacaaagatgaggaagatacaaagccacagggctgcatgtacctgcccggctgcacaatcaaagaaattgccactaatcccgaagaggctggaaaatttgtgtttgagataatccccgccagctgggaccaaaaccggatgggccaggattcgtatgtcctgatggcctcttcacaggcagagatggaggaatgggtgaaatttctgcgaagagttgccggcacaccctgtggcgccgtctttggacagaggcttgatgagacggtggcatacgagcagaagttcgggccccacttggtaccgattctggtagaaaagtgcgcagagtttatattggagcatggtagaaacgaggaaggaattttcagactccccggacaggataacctagttaaacagctgcgggacgccttcgatgcgggtgaacgaccctcattcgaccgggatacagatgttcacaccgttgcatctctgttgaagttgtacttacgagacctgcctgagccagtggttccctggagccagtacgagggcttcctgttgtgtgggcagctgaccaacgcggatgaggcgaaggcccaacaggaactcatgaagcaattgtccatccttccacgcgataactactctctgctgtcctacatatgccggtttctgcatgagatccaactgaattgcgccgttaacaaaatgtcagtggataatctcgccacggtgatcggagtgaaccttatccgttctaaggtagaagatccggctgtaatcatgcggggtaccccccaaattcagagagtgatgaccatgatgatcagagaccacgaggtccttttccctaaaagcaaagacatcccactgtcaccccccgctcagaaaaacgacccaaaaaaagcccccgtcgctagaagttcggtcgggtgggatgccacagaggatttgcgtatatccaggacggatagcttttcctctatgacttccgattcggatacgactagtcctaccggccaacagccctctgacgcttttcccgaagactcttctaaagtgcctcgggagaaacctggggactggaagatgcaatcaaggaagagaacgcagaccctgccaaacaggaagtgctttttgacctccgccttccagggagccaattcctcaaagatggagatttttaagaatgagttctggagtccatccagtgaggccaaggcaggggagggccaccggcggaccatgagccaggatctgcgtcagctgtccgatagtcagcggacctctacgtacgataacgtacccagtctgccagggtcgccgggcgaggaggcaagcgcactatcctcacaggcttgcgatagcaagggtgacactctagcctcaccaaactctgagacagggcccggcaaaaaaaactctggcgaggaggaaatcgactccttacagcggatggtgcaggagttgcggaaggagatcgagacgcagaagcagatgtacgaggagcagattaagaacctggagaaagagaattacgacgtctgggccaaagtagtccggccattccttagcgcaatctag

SEQ ID NO: 203309 - DNA, 1377 bp, synthetic construct
  misc_feature 1..1377: note = Description of Artificial Sequence: Synthetic coding sequence
  source 1..1377: mol_type = other DNA
atgagcctgggccagagcgcctgcctgttcctgagcatcgcccggtcacgctccgtgatgaccggcgagcagatggctgctttccatccttcaagtacccccaacccacttgaacgcccaatcaagatgggctggttgaagaaacagcgcagcatagtgaaaaactggcaacaacgctatttcgtgctccgcgctcagcagttgtattactataaggatgaggaggacacgaaacctcagggatgtatgtacttaccagggtgcacaattaaggagattgctaccaacccggaggaagcgggtaaatttgtctttgagatcatacccgccagctgggaccagaacagaatggggcaggatagttacgtgcttatggctagcagccaagcggagatggaagagtgggtaaagttcttgcggagagtggccggcactccatgcggtgccgtcttcgggcaacgactggatgaaacagtcgcttacgaacagaagttcggcccccacctggtgcctattctagttgaaaaatgtgctgaattcatcctggagcacggacgtaacgaggaaggcatttttcggctgcctggtcaagacaatctggtcaagcaattgcgggatgctttcgatgctggggagcggccttccttcgaccgcgatacagacgttcataccgttgccagccttcttaagttgtacctgcgggacctgccggagccagtcgtgccctggtcacagtacgagggatttctgctgtgtggccagctgaccaacgcagacgaagcgaaggcccaacaagagctaatgaaacagttaagcatactgcctagagacaactattccctgctctcctatatctgtagattcttgcacgagatccagttgaactgtgccgtcaacaaaatgtccgtggacaacctggcgacagttattggcgtgaacttaatcagatctaaggtggaagatccagcagtcattatgcgaggcacccctcagatccaacgagttatgacaatgatgatcagagatcacgaagtgctgtttcctaagtctaaggatatacctctctccccaccggctcagaaaaatgaccccaagaaagcccctgtcgcaagaagttccgttggctgggatgcgactgaagacctgcgcatcagtagaaccgacagctttagttcgatggttagatgcagagaaccaagctgttttcactgggtgctgcccctcgtgcaggcaatcccgtgcaaggcatgtagtcgcgtggccatttggggcgttcttggggatgctgttgccgtaggtgccgctgctacagatagttcagagcacactctcaaggcatggccactgagtaaaagttctttctactggcacctgtag

SEQ ID NO: 203310 - DNA, 1893 bp, synthetic construct
  misc_feature 1..1893: note = Description of Artificial Sequence: Synthetic coding sequence
  source 1..1893: mol_type = other DNA
atgagcctgggccagagcgcctgcctgttcctgagcatcgcccggtctcggagtgtgatgaccggggagcaaatggcagctttccatccttccagtacccctaaccccttagagcggcctatcaaaatggggtggctcaaaaagcaacgcagcatcgtcaagaattggcagcagagttattattacaaagacgaggaggataccaagccacagggttgtatgtacttgcctggatgtacaattaaggagatcgccacgaatcctgaggaggcaggaaaatttgtttttgagataatccccgcctcttgggaccagaatagaatgggccaagacagttacgtgctgatggcatcctcacaggcggaaatggaagaatgggtaaagtttttgcggagggtggctggaactccttgcggcgccgtgtttggtcaacgtctggatgaaaccgtagcctacgagcagaagttcggaccccatcttgtgccaattctggtggagaaatgcgcggagtttatccttgagcacggccggaatgaagagggaattttcaggctgccaggacaggacaacttagtgaagcagttacgcgacgcattcgatgccggggagcgcccctcgtttgaccgtgataccgacgtccacacggttgcatccctcctcaagctgtatctgcgggacctgcctgagccagtcgtgccttggagtcaatacgagggcttcctcctgtgcgggcagttaactaacgccgatgaggccaaggcccaacaggaattgatgaaacagctttccatcctcccgcgggacaattacagcttactcagttatatttgtcggttcctgcatgagattcaactgaactgcgcggtcaacaagatgagcgtcgacaacctggcaactgtgatcggcgtgaacctgatccgaagtaaggtcgaggaccccgccgtgataatgaggggtactccccaaattcaaagagtaatgacaatgatgatcagggaccatgaagtcctgttccctaagtctaaagacattcctctctccccgcccgcccagaagaacgaccccaagaaggctccggtggcccggagtagtgtgggatgggatgctaccgaagacctacggatttcaagaaccgactccttcagttctatgaccagcgattcagacaccacaagtcccaccgggcagcagccgtcggacgccttccctgaagacagctccaaagtgccaagagaaaaaccaggcgattggaaaatgcagagtcggaagagaacccaaacgctgcctaatcgcaagtgctttctgaccagtgccttccagggtgctaattcaagcaagatggaaatttttaaaaatgagttttggtccccttcgtccgaagctaaagcgggggaaggccaccgcagaaccatgtctcaggaccttaggcagttgtcagacagccaacggaccagcacttatgataacgtgcccagcctgcccggatcccctggagaggaagcgtcggcgctctcctcgcaggcatgtgatagcaaaggcgatacgttggcttctcccaactctgaaactggaccagggaaaaaaaactccggggaggaggagatagattctctccaaaggatggttcaggagctaaggaaggagatcgagacccagaaacagatgtatgaggagcagatcaagaacctcgagaaggagaactatgatgtctgggccaaggtagtcaggctcaacgaggagctggaaaaagaaaagaagaaatccgctgctttagagatttcgctgagaaacatggaacgttcccgcgaggacgttgaaaagcgcaataaggccctggaggaggaagttaaggagtttgtgaagtcaatgaaagaacccaaaactgaagcttag

SEQ ID NO: 203311 - DNA, 852 bp, synthetic construct
  misc_feature 1..852: note = Description of Artificial Sequence: Synthetic coding sequence
  source 1..852: mol_type = other DNA
atgaccggcgagcagatggccgccttccaccccagcagcacccccaatcccctcgagcgcccgatcaagatgggatggttgaagaagcagcgttccatagtgaagaactggcagcagcggtactttgtgctgcgggcacagcagctatactactacaaagacgaggaagacaccaaaccacagggctgtatgtacctgccgggctgcacaatcaaagagattgcgacaaatccagaggaggcaggaaaatttgtgtttgaaattatccccgcatcatgggaccagaataggatgggccaggactcgtatgtacttatggcaagctcacaggcggagatggaggaatgggtaaaatttctcaggcgggtggccgggaccccctgtggggccgtgttcggtcagcgcttggatgagacagtagcatatgagcagaagttcggaccccacctggtgcccattctggtcgagaaatgcgccgagtttatcctcgaacacggacgtaacgaagagggcatattcaggctgcccggccaggataatttggtaaagcaactcagggacgccttcgacgcgggcgagaggccaagcttcgaccgtgacaccgacgtccatactgtggcaagcttgctgaaattgtatctcagggatctgccggagcctgtcgtaccctggtcccagtatgaggggtttcttctctgtggacagttgactaacgctgacgaggcgaagaattatcgcaacagaaacgattgtcagtccgtggtttcagctcagatccatcagttttgccctcgtgtcagccttttagctcacggacaggctcatttgctggtgaacgatctgctagtgtag

SEQ ID NO: 203312 - DNA, 1821 bp, synthetic construct
  misc_feature 1..1821: note = Description of Artificial Sequence: Synthetic coding sequence
  source 1..1821: mol_type = other DNA
atgagcctgaagctgccccggaactgggacttcaacctgaaggtggaagccgccaaaatcgctcggagtcgtagcgtgatgacaggagagcaaatggccgcttttcatccaagctcaactccaaatcccctggagaggccgatcaagatgggctggctaaagaagcagagatcaatagtaaaaaactggcaacagagatacttcgtgctgagggctcaacagttgtactattacaaagatgaggaagataccaaaccacagggatgtatgtatttgccaggttgcaccatcaaggagattgcaaccaatccagaagaggcgggaaagttcgtttttgaaataattcctgtgtttggacagcgactggacgaaactgtagcgtatgaacagaaattcggtcctcaccttgttccgatactggtggagaagtgtgctgagtttatcctggaacatggtcgcaatgaagaaggcatcttccgtttgccaggccaagataatctcgtgaagcagctccgcgacgcattcgatgccggcgaacggccttcctttgatagggacaccgatgtccacactgttgcctcactgctgaagctgtaccttcgggatctgccggagcctgtggtaccctggtcgcagtacgaaggctttcttttatgcggccaactgacgaacgccgacgaagcaaaggcccagcaagagctgatgaagcagctctctattctgccccgggacaactatagcctgcttagttacatttgtcgatttctgcatgaaattcagctgaactgcgctgtgaacaagatgtccgttgacaatctggctactgttattggggtgaatctgattcggtccaaggtcgaggacccagcagtgatcatgagggggacacctcagattcagagggtgatgactatgatgatcagagaccacgaggtgctcttccccaagtcaaaagacatacctctcagtccacctgcccagaaaaatgaccccaaaaaggcccccgttgcacgctcttcggttggatgggacgctactgaagacctacggatttccagaaccgattcgttttcctccatgacgtcggactccgacactacatcccctacggggcaacaaccaagcgacgcattccccgaggattcgtccaaggtgccccgtgaaaagcctggcgattggaagatgcagtctcgcaaacggactcagacactcccaaacagaaagtgctttctgacttcggcattccagggcgccaatagtagcaaaatggagatttttaaaaatgagttttggtcgccttccagcgaagctaaggctggggaagggcaccgtcggactatgtctcaggacctgcgtcagctgtccgactcccaacgaacctcgacatacgacaacgtgcctagtcttccaggcagtccaggtgaggaggcctccgccctctcatcacaagcatgtgattccaagggtgatacactggcatctcccaacagcgaaacaggacctggcaagaaaaatagtggtgaagaagagatcgactccctccagcggatggttcaggagctgaggaaggagatcgaaacacagaaacagatgtatgaggaacaaatcaagaatcttgagaaggagaactacgatgtttgggctaaagttgttaggctcaacgaggagcttgagaaagaaaagaaaaaaagcgccgcattggaaatttcgcttagaaacatggagcgttcgcgggaggatgtcgaaaagagaaataaagcactggaagaagaggtcaaggagttcgtgaagtcaatgaaggagccaaagacagaagcctag

SEQ ID NO: 203313 - DNA, 2445 bp, synthetic construct
  misc_feature 1..2445: note = Description of Artificial Sequence: Synthetic coding sequence
  source 1..2445: mol_type = other DNA
atgggcctgcccgccctggagttcagcgactgctgcctggacagcccccacttccgagagacattgaaatcccacgaggccgaattagataagacgaataaatttattaaggaactgatcaaagacggcaagagtctgataagtgccctgaagaacctgagctctgctaagagaaagttcgctgatagtttgaacgagttcaagttccaatgcatcggagatgccgaaacagatgacgaaatgtgcatcgccagaagcctgcaggagtttgctaccgttctccgaaaccttgaggacgagcggatccgaatgattgagaacgcgtcagaggtccttattacacctttagagaaatttaggaaagaacagataggtgccgctaaggaggccaagaagaaatatgacaaagagaccgagaaatactgcggaatacttgagaaacacctgaatttaagcagcaagaagaaggaatctcagctgcaagaggcagatagccaggtggacctcgttcgacagcacttctatgaggtatccctagagtacgtcttcaaggtccaggaagtccaggagcggaagatgttcgagttcgtcgagccattactggcttttctgcagggcctgtttacattttatcatcacgggtacgagctcgcaaaagatttcggggatttcaagactcagctgaccattagtattcagaacacccggaacaggttcgagggcacacgatccgaggtcgagtcgctgatgaaaaagatgaaggagaatccccttgagcataagacaatttccccatatacgatggagggttacctatacgttcaagagaagcggcatttcggaacttcttgggtaaagcactactgcacctatcagcgtgatagtaagcagatcaccatggtgccattcgatcagaagtcaggaggcaaaggcggggaggacgaatccgtcatccttaaatcttgtactcggagaaagacggactccatcgagaaaaggttctgcttcgatgtggaggcggtggatcgaccaggggttatcaccatgcaagctctgtcagaggaggataggagactgtggatggaggcaatggatggaagagagcccgtttacaattctaacaaggatagccaatcggagggcaccgcacagctcgatagcattgggttttcaattatcagaaaatgtattcacgctgttgagacacggggtataaacgaacaaggattgtacagaatagtcggtgtgaatagcagggtgcaaaaactgctgtccgtcctgatggacccaaagactgcctccgagaccgaaaccgacatttgtgctgagtgggagattaaaacaatcacctctgcattaaaaacatatctgagaatgctgcctgggccgcttatgatgtaccaatttcagagatctttcatcaaggcggctaagctcgagaatcaagagtcccgggtaagcgagattcactctttggtgcatcgcctcccagagaaaaataggcagatgcttcagctgctgatgaaccacctggccaatgtagccaataatcacaaacagaacttaatgacagtcgcaaacttgggcgtcgtcttcggtcctactctgttgcgccctcaagaagagacagtcgccgctattatggacattaagtttcaaaacattgtgatagagattcttatcgaaaaccatgagaagatctttaacacagttccggacatgcccttgacgaacgcccagctgcacctcagccgtaagaagagtagtgattcaaagcccccatcctgttcagagcgacctttgaccttatttcataccgtgcagtccacagagaaacaggaacagaggaactctatcattaactctagccttgaaagcgtgtcttcaaaccctaacagcatcctgaatagtagtagcagcctgcaaccgaatatgaactcaagcgacccagatctggcagtggtaaagcctaccagacctaactctcttcctccaaacccctcaccaacaagcccactcagcccaagttggcccatgttctcagccccgagttctccgatgcccactagcagtacgtctagcgatagctccccagtcaggtctgttgccggctttgtttggtttagcgttgccgcagtggtcttaagcttagcccgctccagtctacacgctgtcttcagcctactggtcaacttcgttccatgccacccaaaccttcacctgctgttcgatagacctgaagaggctgtccatgaagacagctcaactccgtttcggaaagctaaggcgctgtatgcttgtaaagccgagcatgattctgaactcagcttcaccgcaggaaccgtgttcgacaacgtccatcccagccaggagcccggatggctggaaggaaccctgaacggaaaaaccgggctaattcccgagaactatgtggagtttctgtag

SEQ ID NO: 203314 - DNA, 2280 bp, synthetic construct
  misc_feature 1..2280: note = Description of Artificial Sequence: Synthetic coding sequence
  source 1..2280: mol_type = other DNA
atgggcctgcccgccctggagttcagcgactgctgcctggacagcccccacttcagagaaaccctgaagtcacacgaggccgagctagataagactaataaatttatcaaggagctgatcaaggatgggaaaagcttgatttccgccctgaagaatctcagctccgcaaaacggaagttcgccgactccctgaatgagttcaaatttcagtgcatcggggacgctgagaccgacgacgagatgtgtattgctaggtcactgcaggaatttgccacagttctacgaaacctggaagatgagcgaattcggatgatcgagaatgcttctgaggttctgatcacacccctcgaaaaattcaggaaggaacagattggtgctgcaaaggaagctaagaaaaagtacgataaggaaactgagaagtactgcgggattttggagaaacatctaaacctctcttcaaaaaagaaagagagccagcttcaggaagctgattcacaggttgatctggtaaggcagcacttttacgaggtgtccctcgagtatgtgttcaaggtccaggaggtgcaagagcgaaagatgtttgagttcgttgagccgctgttggctttcttacagggcttatttacattctatcaccacgggtacgagctggcaaaagacttcggggatttcaaaacccagttaacgatttcaatccagaatacaagaaatagattcgagggcacacgaagtgaggtggagtccctgatgaagaaaatgaaggaaaaccctctggagcacaagactattagtccatacaccatggaaggctacctctacgtgcaagagaagaggcatttcggaacatcctgggtcaagcattactgcacctatcagcgggattcaaagcagattaccatggtgccattcgaccaaaagtccgggggcaagggcggcgaggatgaatcagttatcttgaagagctgcacgcggcgtaaaacagactcaatagaaaagagattctgttttgacgtggaagctgtggatcggcccggggtcataacaatgcaggccctgagtgaggaggaccgcaggctttggatggaggcgatggatggccgggagcccgtgtataatagcaacaaagacagccagtcagagggaacagctcaactggacagtatcggttttagcatcattagaaagtgcattcatgccgtggagaccaggggaattaatgagcaagggctgtataggattgtcggagtcaacagccgggtacagaaacttctgtcagtcttgatggaccccaagactgctagcgaaaccgagacggatatatgtgcagaatgggagatcaagaccattacctctgcactcaaaacgtacctgcgcatgctgcccggccccttaatgatgtatcaattccagcgcagcttcatcaaggctgccaagctcgagaaccaggagtcccgagtgtccgagattcacagccttgtccatcgattgcccgagaaaaatcggcagatgctccaacttctgatgaatcatctggccaatgtggctaataaccacaagcagaatctcatgacagtcgcgaatctcggcgtggtctttggcccaacccttctcaggccccaagaggaaacagtcgcggcaatcatggatattaaattccagaacattgtgattgaaattctaattgaaaatcacgagaagatcttcaacaccgtgccagacatgccactgacaaatgcacagctgcacctgagtcgcaaaaagtcaagtgactccaaacctccatcatgttcagagcgcccattaacactgttccacaccgttcagagtacagaaaagcaggagcagcgcaattcaatcattaatagtagtctggagagcgtgagctccaacccaaattcaatcctgaattccagttcctccctgcagcctaacatgaacagctcggatccagacttggctgtggtgaagcctacgcgcccaaattccttgccccccaatccaagcccaacgtcccctctttctccttcatggcccatgttttccgccccaagctctccaatgccaacctcttcaactagctctgatagctctcctgtgagcaccccgtttcgaaaggctaaggctctttacgcatgtaaggctgagcacgactcagagctcagctttactgccgggacagtgtttgataacgttcatccaagccaggagcccggatggctggagggaaccctgaatggaaagaccggtcttattccggaaaattacgtagagttcctgtag

SEQ ID NO: 203315 - DNA, 885 bp, synthetic construct
  misc_feature 1..885: note = Description of Artificial Sequence: Synthetic coding sequence
  source 1..885: mol_type = other DNA
tgacccaagaccgccagcgagaccgagaccgacatctgcgccgagtgggagataaagacaataactagcgcattaaaaacctatctacggatgctacccgggcctctgatgatgtaccagtttcagcggtcttttatcaaggccgcaaagttagagaatcaagagagcagggtgagcgagatccattccctagtacaccgccttcctgagaagaacagacaaatgctgcaattactcatgaaccacctggctaatgtagcaaacaatcacaaacagaatctcatgactgtggccaatctgggagtggtattcggacctactttgctgaggccccaggaggagacggtggctgctatcatggacattaaatttcagaacattgtgatcgaaattctgatcgagaaccatgagaagattttcaacacagtgcccgacatgcctcttactaatgctcagctccacctgtctagaaagaaatccagtgacagcaagccaccatcctgttctgaaaggccactcacactgttccataccgtacaatctacagagaaacaggaacaacgtaattcgatcatcaactccagcctggaatccgtcagttctaatcctaactctatcctcaacagtagcagtagcctccagcctaatatgaactctagcgaccccgatcttgccgtggtcaagccgactcggccaaactctctgacgcctttccggaaggctaaagcactgtatgcgtgcaaggcggagcacgattctgaactctcgttcacggctggtacggtatttgataatgtgcatccctctcaggaaccagggtggctggaaggaacacttaatggaaaaacgggcttgattccggagaactatgtagaatttttgtag

SEQ ID NO: 203316 - DNA, 861 bp, synthetic construct
  misc_feature 1..861: note = Description of Artificial Sequence: Synthetic coding sequence
  source 1..861: mol_type = other DNA
atggaccccaagaccgccagcgagaccgagaccgacatctgcgccgaatgggagatcaagacaatcacttctgccctgaagacttatctgcgtatgctccctggacctttaatgatgtatcagtttcaacggtcttttatcaaagccgccaaactggaaaaccaggagagtagagtgagcgaaatccattcactggttcatagactgcctgagaagaatcggcaaatgcttcagcttcttatgaaccacctggccaatgtagcaaataaccacaaacaaaatttaatgactgtggctaacctcggggtggtctttggcccaaccctgctgcgaccgcaagaggagactgtggccgctattatggatattaaatttcagaatattgttatcgagattctcattgaaaatcatgagaagatcttcaacacggtgccagacatgccgctcacaaatgcccaactgcacctctctcgtaagaagagctctgactctaagcccccctcctgtagcgagagacccctgactttgttccacaccgtgcaatcgaccgagaagcaggaacaaaggaattccattattaacagttctctggagagcgtgagttcgaatcccaattccattctgaacagcagtagctctctccagcccaacatgaacagcagcgatcctgatctcgcagtagtcaagcccaccaggcctaactccctaccacccaatccttcacccacatctcctttgtcaccatcctggcctatgttttctgctccgagctcccctatgcccacctcctctacgtcttctgacagctcacccagaatcacctggtcgtctagcaacaggggtccccagcagaattgctag

SEQ ID NO: 203317 - DNA, 1167 bp, synthetic construct
  misc_feature 1..1167: note = Description of Artificial Sequence: Synthetic coding sequence
  source 1..1167: mol_type = other DNA
tgagcccagctggacagcatcggcttcagcatcatccggaagtgcatccatgccgttgagaccagaggcataaatgaacaaggactgtaccgcattgtcggggtcaattcacgggtgcaaaagctactgtccgtccttatggacccgaagactgcctcagagaccgaaaccgacatttgcgcagaatgggagattaaaactattacttccgccttgaagacatatttgcggatgctgccaggcccattgatgatgtaccaatttcagagaagtttcattaaggccgccaagctcgagaatcaagaatcacgggttagtgagatccactctctggtccatagactcccagagaaaaacagacagatgctgcagctgcttatgaaccacctggccaatgtggccaataaccacaaacaaaatcttatgaccgtcgccaatctcggcgtggtgtttggtccaaccctgctgagaccccaggaggaaaccgtagctgccattatggacatcaagtttcagaacatcgtgatcgaaatactcattgaaaatcatgagaaaatctttaacaccgtgcctgatatgccacttacaaatgcccaactgcacttaagtaggaagaaatccagtgattccaagcccccatcctgttccgaacggccactcacgctcttccacacagtgcaatctacagagaaacaggaacagcgcaatagtattattaactcaagccttgaaagcgtgtcgagcaaccctaatagtatcttgaacagctcctccagtctccagcccaatatgaattcttcagatcccgacctggccgtggtgaagcctacgcggcccaattcacttccaccaaatccttcccccacctctcctctgtctcctagctggcctatgttctctgctccttcctccccaatgcccacctccagcacatcaagcgattcgtcacctgttcgcccagaggaagccgtgcacgaagacagttccactcccttcagaaaagcaaaggcgctatacgcttgcaaagctgaacatgactcagagttgtcctttaccgcgggcacagtctttgataacgtgcatccgtctcaggagccgggttggctcgagggaacccttaatgggaaaacaggcctgattcccgaaaattatgttgaattcctgtag

SEQ ID NO: 203318 - DNA, 792 bp, synthetic construct
  misc_feature 1..792: note = Description of Artificial Sequence: Synthetic coding sequence
  source 1..792: mol_type = other DNA
atggccgccgacgtggtgggcgacgtgtacgtgctggtggagcacccctttgaatatacaggtaaggatggtagacgtgttgctatcagaccaaacgagagataccgtctgttgcgacgctccactgaacattggtggcatgttcgacgtgaaccagggggtcggcccttctaccttcccgcccagtacgtccgcgagctcccggcactaggaaatcctgccgcggccgcaccccccgggccacatccttcgcccgcggcccctgagcctctggcatatgactaccggtttgttagtgcggccgctactgccgggccagatggggcgcctgaggagtcaggcggcagagcctcatccctgtgtggccccgcacagcgcggggctgctacccagagatccagcctggctcccggcctgcctgcatgcctttatttgagaccagccgcccccgtgcgaccagcccagagcctcaacgacctggcatgcgctgcagtatctccgcccgctggactcttaggatccagcggcagtttcaaggcctgcagcgtcgccggctcatgggtgtgccctagaccactggccaggagcgactcggagaatgtatacgaggtgatccaggacctgcatgtacccccacctgaggagtctgccgaacaggtgcccccccgcgcactgggacgcggtggaggatggcgagcccgcgatcgggcccgcacagagcccggtcggaaagagactcgatctgcgcagcggcgcgcccgccgaccacctttgtctgaggatttcggctag

SEQ ID NO: 203319 - DNA, 1647 bp, synthetic construct
  misc_feature 1..1647: note = Description of Artificial Sequence: Synthetic coding sequence
  source 1..1647: mol_type = other DNA
atgcagcccggcctgagccccggcagccccggcgacccccggccccccacaccagagaccgactatccagaatctctgacctcttacccagaagaagattactcccccgtgggatcttttggagagccaggtccgacaagccctttgaccacgcctcccggctggtcatgtcacgtcagtcaggataaacaaatgttgtatacaaatcatttcacccaggagcagtgggtacgcctggaggaccctcacggaaaaccatatttctacaacccagaggactccagtgtgcggtgggagctgcctcaggttcccgtccctgcgccaagatcaatccacaaatctagtcaagatggagacacgccagcacaggccagccctcccgaggagaaggtgcccgcagagttagacgaggtgggttcttgggaggaagtgtcgccagccacggcggcagttaggaccaaaacattggacaaggcaggggtgctgcaccggactaagacagcggacaagggcaagcggctgagaaagaaacattggtccgcctcctggacggtgctggaaggaggtgtgttgacattttttaaagactctaaaacttctgcagccggaggactgcgccaaccttccaaatttagcactccagaatacactgtcgaactgaggggtgcaacactatcatgggcacccaaagacaaatcctcccgcaaaaacgttttggaacttaggtctcgggatgggtccgagtacctcattcagcacgacagcgaggcaatcatctctacatggcataaggctatcgcccagggtattcaggagctgtcagctgagttgcctccggaggaatctgaaagctcccgcgtagacttcggtagctctgaacgattaggctcttggcaggaaaaggaagaggacgctagacccaacgctgccgctcccgccctggggcccgttgggttagagtctgacctgagtaaggttagacacaagcttagaaaatttcttcaacggcgacctactttgcaatccctccgtgaaaaaggctatatcaaggaccaagtgttcggatgtgccctggccgccttgtgcgagagagaaagatcccgagtgcctaggtttgttcagcaatgtatccgtgccgttgaagcaagaggactggacattgacggactctacagaatttctggaaatcttgcaacaattcagaagctccgctataaagtggaccatgatgaacggcttgacctggatgatggacgatgggaggacgtacacgtaatcactggtgccctgaaactattcttcagggaactcccagaacctctgtttccattctcacattttcggcagttcatcgcagccataaagctccaggaccaggcacggagaagcagatgtgttagagacctggttcgttcacttcctgcccccaaccatgatacactccgcatgctgttccagcacttatgccgggtcatagaacatggagagcagaacagaatgtccgtgcagagtgttgctatagtcttcgggcctactcttctgagaccagaggtggaagaaacctcgatgcctatgacgatggtctttcagaaccaggtagtggaactgattcttcagcagtgcgcggacatctttcccccccattag

SEQ ID NO: 203320 - DNA, 2670 bp, synthetic construct
  misc_feature 1..2670: note = Description of Artificial Sequence: Synthetic coding sequence
  source 1..2670: mol_type = other DNA
atggccgccgacgtggtgggcgacgtgtacgtgctggtggagcacccatttgaatacacaggcaaggacgggcgcagggtagcaataagacctaacgagaggtatagactgctcagaaggagtacggagcactggtggcacgtccgccgcgagccaggcggtcgacctttctatttgcccgctcagtatgtcagggaacttcctgcactcggcaacccagctgccgcagccccacctggcccgcaccccagcccagcagcccccgagcctctggcttacgactacaggttcgtttctgctgctgccacagcaggccctgacggcgcacctgaggagtccggcgggcgggcgtcttctttatgcggtcctgcccagcggggagcagccactcagcggagttcacttgctcccggcttaccggcttgcctgtatttacggcctgccgccccagtccgacccgctcaatcactcaacgatctggcctgcgcggccgtatccccacccgcaggactgctggggagtagcggcagttttaaggcttgttccgtcgcgggctcatgggtctgtccgaggcctctggcccggtcggactccgaaaacgtctatgaggtgatccaggacttgcacgtcccaccaccagaagaatccgctgagcaggtggacgaccccccggagcctgtctacgccaatattgagcggcagccacgcgccacatctccaggggccgcagcggccccacttcccagcccagtgtgggagacccataccgacgctggcacaggaaggccttactattacaacccagatactggcgtaacaacgtgggagagcccctttgaggccgccgagggcgctgcatcacctgcaacatctcccgcctccgttgatagccacgtgtccctggagacagagtggggccagtactgggacgaggagagccggagagtgttcttctataaccctttgacaggggaaacagcttgggaagatgaggccgagaatgagcctgaagaagagctcgagatgcagccaggactgtcccccggatcgcccggggaccctcgaccgccaacgccagaaacagactacccagagagcctgacctcttaccccgaggaggactatagtccagtgggaagctttggcgagcccggtcctacgtcaccactcaccaccccgcccggctggtcctgccatgtgtcacaggacaaacagatgctttataccaaccacttcacccaggaacaatgggttagactggaggacccccacggtaagccatacttctataaccctgaggattctagcgtccgatgggagctcccccaggtcccagtacccgccccccgctccatacataagagttctcaggacggcgatactcccgcgcaggcaagccctcctgaggagaaggtccccgcagagttggatgaggtggggtcatgggaggaggtgtcccccgccaccgccgccgtgagaactaaaaccttagataaagctggtgtcctgcatcgtaccaaaaccgctgataaggggaagcgcttgcggaaaaaacattggagcgctagctggacagttctggaaggaggagtcttaacctttttcaaggactccaaaacatccgccgctggaggcctgagacagcccagcaagttcagtacacccgaatacacggtagagctcagaggggcaacgctgtcttgggctcctaaggataaatcttctaggaaaaacgtgttagagctgcgttcgcgggacgggagtgagtatctcatccagcacgattccgaagctatcatctcaacctggcataaagcgattgcccaggggattcaagagttgtccgccgaattaccacctgaggaatcggagtcgtcccgagtggacttcggatcatccgagagactcggctcttggcaagaaaaagaagaagacgctaggcctaacgcggccgcacccgcactgggcccagttgggctcgagagcgatctgtctaaggtacgacacaagctgcggaaattcctgcagagacgaccaacgttacagagcctccgggaaaaggggtacatcaaggatcaagtatttgggtgcgccctggccgccctctgtgagagagagcggagtcgagttcctcgcttcgtccagcagtgcattagggcagtcgaggccaggggactggacatcgatggactatacagaatcagtggtaacctggcgacgatccagaaactgaggtataaagttgatcatgacgagcgacttgacctggacgacggccggtgggaagacgttcatgtgatcactggcgcactcaagctgttcttccgcgaactccccgaaccgctgttccccttcagccacttcagacagttcattgccgccatcaagctacaggatcaagccagacggtcaagatgcgtccgggacctagtccgctccttacctgcccccaaccatgacacgctgaggatgctcttccagcacctctgtcgcgtcatcgaacatggggagcagaatagaatgtctgttcagtctgtagccatagtattcggccctacactgctgcgccctgaggtagaagagacatccatgcctatgactatggtatttcagaaccaggtggtcgaactgatcctacagcagtgcgccgacatctttcctccgcactag

SEQ ID NO: 203321 - DNA, 2589 bp, synthetic construct
  misc_feature 1..2589: note = Description of Artificial Sequence: Synthetic coding sequence
  source 1..2589: mol_type = other DNA
atggccgccgacgtggtgggcgacgtgtacgtgctggtggagcaccccttcgagtataccggcaaagatggtcgtcgcgtggccatcaggccgaatgaacggtaccggctactccgcaggagtaccgaacactggtggcacgtgcgccgagaacccggcggacgccccttttacctgccagctcagtatgttagggagctgccggcgctgggtaaccccgccgcagccgcccctccaggtccccacccatctcccgcagctcctgagccactggcttacgactatagatttgtttcggcggcggctacagcaggacccgacggcgcccctgaggaatcaggaggccgggcatcatctctgtgtggtccagcccagagaggagccgcaacccagagatcgtccttggctccaggcttgcctgcttgtctttatctaagacccgccgccccagtacggccagcacagagtttgaacgacctagcatgtgccgccgtcagtcctcctgcaggtttgctgggttcctcaggcagctttaaagcatgttcagttgccggatcatgggtgtgtccccgcccactggcccggagtgactccgaaaacgtttatgaagttatacaggatttgcacgtgcctccaccggaagaaagtgcggagcaggtggacgaccccccagaaccagtctacgcgaacattgaacgccagcctcgggctacatcacccggtgctgctgccgcacctctcccctcccctgtgtgggagacacacacagatgctgggacaggtaggccttattattacaatccggataccggggtcacaacatgggaaagccccttcgaggctgcagaaggagccgcgtctcccgctacgtcacccgcgtcagttgacagccacgtttcgctcgagacagagtggggacagtattgggatgaggaaagcaggcgcgttttcttctacaatcccttaaccggagaaaccgcttgggaagacgaagctgaaaatgaacctgaagaggagctcgagatgcagccggggctttctccaggcagcccgggcgatccacggccacctacccctgagacagattatcccgaatcgctcacatcataccccgaggaggactattctcccgtgggctccttcggcgaaccagggcctacaagcccattgactaccccgcctggttggtcctgccatgtgtcacaagacaaacaaatgctctacacgaatcacttcacacaggagcaggtgccggttcctgcaccccggagcatccacaagtcatcacaggacggcgacacccccgcacaggcttctccgccagaggagaaagtgccagccgagcttgatgaggtgggctcctgggaggaagtgagtccggccaccgccgctgtgcgtactaagaccctagacaaggctggcgtgttgcatcgcaccaaaaccgccgataaggggaaacgtttgcgcaagaaacactggtccgcctcctggacagtgttggaaggaggagtgcttacattttttaaggacagcaaaacttctgcagcaggcggcctgcgtcaacctagcaagtttagcactcctgagtacacagtggaactgcgcggcgcgacgctttcttgggcaccaaaagacaaaagcagtcgcaagaacgtgctggagctgaggtcacgggacgggagtgaatatctgatacagcatgatagtgaggccatcatcagtacctggcataaagccatagcccagggaatccaggagctgtcagcagagctgcccccagaagagtcagaaagttcccgagtcgatttcggttccagtgaaaggttggggagctggcaggaaaaggaagaagatgcgagaccaaacgccgccgctcctgccttggggccagttgggctggaaagcgatctttctaaagtgcgacacaaactgcgcaaatttctgcaaagaagacccaccctgcagtctctgcgggagaagggttacatcaaggatcaagtgttcggttgcgctctggccgcactctgtgagagagagaggtctcgagtgcctcgcttcgtccagcaatgcatccgcgctgtggaggcaagggggctggacattgatgggctgtaccgcatctcaggaaatctggcaactatccagaaactacgttacaaagtcgaccacgatgaaagattggatctggacgacggaaggtgggaggacgttcatgttatcaccggtgctctaaaactcttcttccgggaacttcccgaacccctttttcccttttcccatttccgccaattcatagctgccatcaaactccaggaccaggctcgacggtccagatgtgtccgtgatctggtccggtctctccctgctcccaaccatgacacattgcgcatgctttttcagcatctgtgcagagtcattgaacatggggaacagaaccggatgtcagtgcagtcggtggccatcgtctttgggcccacgctcctgcgccccgaggtcgaggagacctcaatgcccatgacgatggtttttcagaatcaggttgtggagctgatcctgcagcaatgcgccgacattttccccccgcattag

SEQ ID NO: 203322 - DNA, 1647 bp, synthetic construct
  misc_feature 1..1647: note = Description of Artificial Sequence: Synthetic coding sequence
  source 1..1647: mol_type = other DNA
atgcagcccggcctgagccccggcagccccggcgacccccggccccctacccccgagacagactacccagagtctctcacatcctatccagaggaggattactcgcccgtcggctcgttcggcgaacccggccctacgtccccactgaccactcctcccggatggtcttgccacgtcagtcaggacaagcagatgttgtataccaaccatttcacacaggaacagtgggtacgccttgaagacccgcatggaaagccttacttctataaccccgaagattctagtgttcgttgggaactgccacaggtaccagtacctgcccccagatccatccacaaatccagccaggacggcgatacaccagcacaggcaagtccacctgaagaaaaagtccccgccgaacttgacgaggtgggaagctgggaggaagtgagtcctgcgactgctgccgtgcgtaccaagactcttgataaggccggcgtgctccatcgcaccaagactgccgataagggtaaacgactacgaaagaaacattggtcagcttcttggaccgtgctagagggcggcgtcctgactttttttaaagactcaaagaccagcgccgcggggggcctgcgccaaccttcgaagttttctaccccagagtataccgtcgagcttaggggggctacactgagttgggctccgaaggataagtcatctcgcaaaaatgtattagagctcaggtcccgcgacggtagtgagtatctcatccagcacgattcagaggccatcattagcacttggcataaggccattgcccaggggattcaggagctgtcagccgagcttccgccggaggaaagtgaaagcagccgcgtcgattttgggtctagtgagagactggggagctggcaggaaaaggaagaagacgcaaggcctaacgccgctgcccctgctttgggccccgtaggcctggaaagtgacctcagtaaagtccgtcacaaactgcgcaaatttttgcagagacgaccaaccctgcagagtctgcgcgagaaagggtacattaaggatcaagtgttcggttgcgcgctggctgccttatgtgagcgggagcggtcacgcgtgcctagatttgtccagcaatgcattcgagctgtagaggcccgaggcctcgacatcgacggattgtaccgaataagcgggaacttggccactatccagaagctgaggtacaaggtggaccacgacgaaagactggacttggacgacggacgttgggaggatgtccacgtgatcacaggagcattgaaactgttcttccgcgagttgcctgagccactttttcctttctctcacttcagacagttcatcgcagccatcaagctgcaggaccaagctcggcggtctcgctgtgtgagagacctggtccggtccctgccggccccgaatcatgataccctgcgcatgttgtttcaacatctgtgtagagtcattgagcatggggagcagaataggatgtctgtgcagtcagtggccattgtgttcggaccaactctgctgcggccagaagtcgaggaaaccagcatgccaatgactatggttttccagaaccaagtcgtcgagctgatcctgcagcagtgcgcagatatcttccctccacattag

SEQ ID NO: 203323 - DNA, 792 bp, synthetic construct
  misc_feature 1..792: note = Description of Artificial Sequence: Synthetic coding sequence
  source 1..792: mol_type = other DNA
atggccgccgacgtggtgggcgacgtgtacgtgctggtggagcacccgtttgaatatacaggcaaggatgggcgccgggttgcaatccgtcctaacgagagataccgccttctgcgccgttccacggagcattggtggcatgtgaggcgagagccaggcggccgccctttctaccttcccgcccagtacgtaagagaactgcctgctctggggaatccagctgcggctgcaccacctggcccccaccctagtcccgcagcccctgagccccttgcctacgattacagattcgtgtcagccgccgcgacagccggaccggacggagcaccagaggagtctggaggaagagcaagtagtctttgtggccccgctcagagaggcgccgctacgcagagaagttctttggccccggggctcccggcttgcctctatctgcggccagctgctcctgtgagaccagctcagtccctgaatgatctcgcttgcgctgccgtcagcccccctgccggtctattgggttcttcaggatctttcaaagcttgcagcgttgcaggcagctgggtgtgccctagacctctcgcgaggagtgacagcgagaatgtatacgaagtgatacaagacctgcacgtacctcccccagaggaatctgccgagcaggtgcccccccgggcactggggcgaggtggtggttggagagcgcgagatcgagccagaacagagcctggaaggaaagagacacgtagtgctcagagacgggctcggagaccgcctttgagcgaagattttggctag

SEQ ID NO: 203324 - DNA, 1566 bp, synthetic construct
  misc_feature 1..1566: note = Description of Artificial Sequence: Synthetic coding sequence
  source 1..1566: mol_type = other DNA
atgcagcccggcctgagccccggcagccccggcgacccccggccccccacacccgagactgactaccctgaatcactgacttcatacccagaagaagattattctcccgtcgggagtttcggcgagccagggccaacgagcccacttactacccccccaggctggagttgtcatgtctcccaggataaacagatgctatatactaatcactttacccaggaacaggtgcccgtccctgcaccccgatctattcataagtccagccaggatggcgatacacctgctcaggcttctcctcccgaggagaaagtcccagccgagctggacgaggtcgggtcttgggaggaggtgtcaccagctacagctgctgtccggacaaaaactctcgataaggctggcgtgctgcaccgaaccaaaactgctgacaagggaaagcgactgcgcaagaagcactggtccgcaagctggactgtactggaggggggtgtgctgaccttcttcaaagactctaaaactagtgctgcaggcggactgcgccaaccaagcaagtttagtactcctgagtacactgtggaattgaggggcgctaccctgtcatgggctccaaaggacaaaagtagccgaaagaacgtactcgaactccgcagccgtgacggttccgaatatctgattcaacatgacagtgaggctatcatctctacttggcataaggccattgcccagggtatacaggagctctccgcagagctgccacctgaagaatccgaaagttctagggtcgatttcggcagctccgagaggttgggcagttggcaggaaaaagaggaagacgctcgaccgaatgccgccgcaccggcacttggtcccgtgggccttgagagtgatctgagcaaggttcggcataagcttagaaaatttcttcagcgccggccaacacttcagtccctccgcgaaaagggctatatcaaggatcaggtcttcggctgcgctttagccgcgctgtgtgaaagggagcggtccagggttcctcgtttcgttcaacagtgtattcgagcagtggaggccaggggactcgatatagatggactctaccgcattagcggaaatctcgcaactatacagaaactgaggtataaagtggatcatgacgagaggctggatcttgacgacggccgctgggaagatgtgcacgtcatcacaggcgctctaaaactcttttttagagaattaccagagcccctttttccctttagccatttcagacagtttatcgctgccattaaattacaggaccaggcgcgtagatcaagatgtgtcagggatctcgtcaggagcctaccagcccctaatcacgataccttaaggatgcttttccagcacctctgccgggtcattgaacatggggaacagaatagaatgagtgttcagtctgtggctatcgtcttcggccccaccctgttaagacccgaagtcgaagagactagtatgccgatgactatggtgtttcagaatcaggtggtggaactaatactacaacaatgcgccgatatatttccaccgcattag

SEQ ID NO: 203325 - DNA, 2013 bp, synthetic construct
  misc_feature 1..2013: note = Description of Artificial Sequence: Synthetic coding sequence
  source 1..2013: mol_type = other DNA
atgctgagcaacgagagcctgcacccccccgccttcagccggagcaatagcgaggcttccgtggatagtgcatctatggaggatttctggagggaaattgaatctatcaaggactccagcatgggtggccaggaggagccaccccctgctgaggtgaccccagtcgatgaaggggagctggaggccgaatggctgcaagatgtgggcctctccactctcatctcgggtgatgaagaggaagacggaaaagcgctcttgtccacgctgacacggactcaggcagcggctgtacagaaaagatatcatacctacactcaaaccatgaggaagaaagataagcagtccatcagagacgtgcgagacatcttcggagtatctgaaagccctccacgagacacttgcggaaatcatactaatcagttagatggcaccaaggaagagcgggagttgcctcgtgtgatcaaaactagcggtagtatgccggacgatgcctcattgaactctactaccctgagtgatgccagccaggacaaggagggatcttttgccgtccctcgttctgattccgttgccattctagagacgatacctgtccttcctgtgcactcaaacgggagccccgagccaggacaaccggtgcagaacgccattagcgacgatgacttcctggaaaaaaacataccacctgaggccgaggaactctcctttgaggtcagttatagcgaaatggtcacagaagccctgaagcgcaataagttaaaaaaatctgagatcaaaaaggaggattatgtgctcaccaagtttaacgtgcaaaagacccgctttgggcttactgaggcaggagatctgtccgccgaggacatgaagaaaattcggcatctgtccctgatcgaactgactgcattttttgatgcttttggtattcagctcaagaggaacaaaacggaaaaagtcaagggaagagacaatgggattttcggggtaccacttaccgtcctgttagacggcgacaggaaaaaggaccccggcgttaaagtgcctttagtgctacagaaattctttgagaaggtcgaggaaagcgggctagagagcgaagggatcttcaggctgagcggatgcactgcaaaggttaagcagtatagggaagaactggatgctaaattcaatgcggacaagttcaaatgggacaaaatgtgtcatagagaggccgcagtcatgctcaaagcgttcttccgcgagctccccacatccttatttccagttgagtatatccctgcattcatcagtctgatggagagaggtccccacgtgaaagtccagtttcaggcccttcacctaatggtgatggccctgcccgacgcaaaccgcgacgccgctcaggccctcatgacattctttaataaagtgatcgcgaacgagagtaaaaaccgcatgtctttgtggaacatctcaacggttatggcaccgaatctcttctttagcaggtcaaaacattcggattatgaggagctgttactggccaacaccgcggcccatatcatccgcttgatgctcaagtaccagaagatcctgtggaaagtgccaagcttcctgatcacacaggtgaggcggatgaacgaggcaacaatgttgttgaagaagcaactgccaagcgtcagaaaactgctcagacgaaaaaccctggaacgagaaacagcctcgcctaaaaccagcaaggtccttcagaagtcccctagtgcccggcggatgagcgacgtgccggagggcgtgattagagtgcatgccccactgctatccaaagtttctatggccatccagctgaataatcagacgaaagccaaagacattctggccaagttccaatacgaaaatagaatccttcattggcaacgcgccgccctttcattcttgaacgggaagtgggtgaaaaaggagcgagaggaatctaccgagaccaaccggagcccgaagcacgtgttcctgttcaccattggtctggatatttcaacctag

SEQ ID NO: 203326 - DNA, 1713 bp, synthetic construct
  misc_feature 1..1713: note = Description of Artificial Sequence: Synthetic coding sequence
  source 1..1713: mol_type = other DNA
atgcggaagaaggacaagcagagcatccgggacgtgcgggacatcttcggtgtcagtgagagcccccctcgtgacacatgcggaaaccacaccaaccagctggacggtacaaaggaggaaagagaattgccccgggtcatcaagacctccggatccatgcctgatgacgcatccctaaactctacgactttgagcgatgcctcacaggacaaagaggggagctttgcagttccacgctctgactccgtggccattctggagactattcctgtgttgcccgtgcattctaacggaagccccgaacccggccagcccgtgcagaacgctatctccgacgatgatttcctggagaagaatataccaccagaggctgaggagctcagttttgaggtgtcttactctgaaatggtgaccgaggcgctcaaaagaaacaaacttaagaagtccgagattaaaaaggaagattatgtgctcaccaaatttaacgtccagaagacgaggtttggcctcaccgaagcgggggacctcagcgcagaggatatgaagaagatacggcacctttccttaattgagctgactgcctttttcgatgcatttggtatacagctgaaacgtaataaaactgagaaggtgaagggccgggataacgggatctttggcgtgcctctcaccgtgctgctggacggggatcgaaaaaaggatccaggggttaaagtgcccctcgtgctccagaagtttttcgagaaggtcgaagagagcgggctcgagtcagagggcatcttcaggctgtctgggtgtaccgccaaggtgaagcagtacagagaagaactggatgctaaattcaacgctgataagtttaaatgggacaagatgtgccatcgagaggctgccgtaatgcttaaggccttcttccgggaactgcctactagtctgttccctgtggagtacattcctgccttcatctccctgatggaacgggggcctcatgtgaaagtacagtttcaggcactgcatcttatggttatggcactgcccgatgccaaccgcgacgcagcacaggctctgatgacgttttttaacaaggttatcgctaatgaatccaaaaaccgcatgtctctgtggaacattagtacggtgatggctcctaatctcttcttttcgcggtctaaacatagcgactacgaagagctgttactggctaatactgccgcacacattattagactgatgctgaaatatcagaaaattctgtggaaggtccctagttttctcataacccaagttaggagaatgaacgaagcaacaatgttactcaaaaagcagcttccaagcgtgcgcaagttattgaggcgcaagaccctcgagagggaaacagccagccctaagaccagtaaagtgctgcagaagtctccctccgcccggcggatgtccgacgtgcccgaaggggtaatccgagtccacgcaccactcttgagtaaagtgagtatggctatacagctgaacaaccaaaccaaagcaaaggatatactggcgaagtttcaatacgaaaatagccacggctccagcgagtgtataaagatccaaaaccaacgactgtacgaaattggcgggaacatcggggagcactgcctagaccctgatgcgtatattctagacgtttataggattaatcctcaagccgagtgggtaattaaaccccaacagtcctcatag

SEQ ID NO: 203327 - DNA, 1638 bp, synthetic construct
  misc_feature 1..1638: note = Description of Artificial Sequence: Synthetic coding sequence
  source 1..1638: mol_type = other DNA
atgaacgagctgccccgggacacctgcggcaaccacaccaaccagttggatggtactaaggaggagcgcgaactgccgcgtgtcattaagactagcggaagtatgcctgacgacgcctcgcttaactcaacgactctgtcggacgcatcgcaggataaagagggtagttttgccgtaccgcgatcagattccgttgcaattctggaaaccattccagtgctccccgtacattcaaacggtagtccggagccgggccagcccgtgcaaaatgcaatcagtgatgatgacttcctcgagaagaacataccccctgaggcagaggaactctcctttgaggtgtcctactccgaaatggtaactgaagccctgaagcggaacaagttgaagaaatcggagattaaaaaggaagattatgtcctcaccaagtttaacgtgcagaaaaccagatttggactcactgaggctggggatctttcggccgaagatatgaagaaaattcggcatctaagtcttattgaattaacagcgttttttgacgcttttgggattcagctcaagcgcaacaagaccgagaaagtcaaaggtagggacaatgggatttttggcgtgcccctaactgtacttctggacggcgatcgcaaaaaggacccaggggtgaaagtgcccctggtgctgcagaaattctttgagaaggtggaggaaagcggcctggaatcggagggcatttttagactgtccggatgcacggctaaagtgaagcaatatcgcgaggagctggatgccaaatttaacgcagataagttcaagtgggacaaaatgtgccatcgcgaggccgccgtaatgctcaaggccttcttcagagagctccccacgagtctctttcctgtggagtacatccccgccttcatcagcctgatggagagaggacctcatgtgaaagtacaattccaagccctgcacctcatggtcatggctctgcctgacgcaaatagggatgctgcccaagcgttgatgacgttcttcaacaaagtcatcgctaacgaatccaagaaccggatgtctctctggaatataagcacagtaatggccccaaatttgtttttcagtaggtctaaacatagcgactatgaggaactgctcctagcgaataccgccgcccatataattcgccttatgcttaagtaccagaaaatcttgtggaaagtgccttccttccttattactcaagtgcgcagaatgaacgaagcaaccatgctgttaaagaagcagttgccaagcgttaggaagctgctccgacggaaaacactcgagagagaaacggcctcacccaagacttccaaagtcctgcaaaaaagccccagcgcacgacgaatgtcagacgttcctgagggcgttattcgcgtgcatgctccacttctgtcaaaagttagcatggccattcagctgaataatcagactaaggcaaaggatatcctagctaagtttcaatacgaaaatcgaatccttcattggcagagggcggctctgtccttcttgaacggtaagtgggtaaagaaggagagagaggagagcacagaaacaaatcggagtcctaagcacgtgtttttgtttactattggcctagacatctctacttag

SEQ ID NO: 203328 - DNA, 2169 bp, synthetic construct
  misc_feature 1..2169: note = Description of Artificial Sequence: Synthetic coding sequence
  source 1..2169: mol_type = other DNA
atggaggtggaggacagcggcggcgtggtgctgaccgcctaccacagttatgcccgcgcgcaaccccctaacgcggagtctcgttgtgcacccagagcagcggcgtcccacccactcagccggaaatctattcctagatgcaggagaatcaatcggatgttaagcaatgagtctctccatcctcctgcttttagtcgctcaaattcagaggccagcgtggattctgcctctatggaagacttttggcgcgagattgagtcgattaaagactctagcatgggaggccaggaagagcctcctcctgccgaggtaacccctgtcgatgaaggggagcttgaggccgagtggctgcaagatgtggggctgagcaccctcatcagcggcgatgaagaagaagatggaaaggcgctgctgtccactctgacccgaacacaggccgcagctgtccagaaacggtatcatacctatactcagaccatgcggaaaaaggacaaacaaagcatccgagacgtgagggacatctttggggtgagcgagtccccgcctagagatacttgcggcaaccataccaaccagctcgacggcacaaaggaggaacgagaactgccccgcgtgatcaagacatctggcagcatgcctgacgacgctagcttgaattccactacactgagcgacgctagccaggacaaggaggggtcgttcgccgttcccagaagtgacagtgttgccattctggagacaatcccagtcttgcccgtccattctaatgggtcccccgagccaggacagcccgtccagaacgccatatcagacgacgacttcttggagaagaacattcctccagaagccgaagaactgtcctttgaggtgtcttatagtgagatggtgacagaggccctgaagcgaaataagcttaaaaagtccgagattaagaaagaggattacgtgctcactaaattcaacgtgcagaagacacggttcggtcttactgaggccggagacttgagcgcggaagatatgaagaagattagacatctgtctcttattgagctgactgccttctttgacgctttcggaattcaactgaagcggaacaagactgagaaggtgaaaggcagggacaacggcatctttggagttccactgaccgtcctgcttgatggcgacaggaagaaggaccccggagttaaggtgcctcttgttttgcagaaattcttcgagaaagtggaagagagcggtctggaaagcgagggtatcttccgcttgagtggttgtactgctaaggtgaaacagtaccgggaggagcttgacgccaaattcaacgcagataaatttaagtgggataaaatgtgtcacagagaagccgcagtgatgttgaaagcctttttcagagagctgcccaccagcctgtttcctgtcgagtacataccagcttttatcagcttgatggagagaggtccacacgttaaggtccaattccaggctttgcacttgatggtaatggcactcccggacgctaatcgcgacgcagcccaggccttgatgaccttctttaataaggttattgcaaacgaatccaagaaccggatgagcttatggaatatctccacggtgatggctccaaacctcttcttcagtcgatctaagcacagtgactatgaggagcttctgctggccaacacagctgctcatatcattagactgatgctgaaataccagaagatcctgtggaaagtgccctcttttctgattacacaggtgcgcaggatgaatgaggccacaatgctactaaagaagcagttaccctcagtgagaaaacttcttagacgcaaaactttggagcgcgagacagcatcacctaagacttctaaagtgctccaaaagtctccttctgcccgacgcatgagtgatgttcctgaaggcgttatccgcgtccatgcaccgttactgagcaaggtgtccatggctatccaactgaacaatcagacaaaggctaaggatattttagcaaagtttcagtacgaaaaccgcatacttcattggcagcgcgccgctctgagctttctcaatggcaaatgggtgaagaaagaaagagaggagtctaccgaaacaaatcgctcaccaaagcacgttttcctgtttaccatcggactcgatatatcaacttag

SEQ ID NO: 203329 - DNA, 1692 bp, synthetic construct
  misc_feature 1..1692: note = Description of Artificial Sequence: Synthetic coding sequence
  source 1..1692: mol_type = other DNA
atgcggaagaaggacaagcagagcatccgggacgtgcgggacatctttggcgttagcgagtctcctccacgggacacgtgcggaaatcacaccaaccagctcgacgggacaaaagaggaacgcgaacttccccgcgtgatcaaaacaagcgggtctatgcccgatgatgcttcactgaacagtaccactctctctgacgcctcacaagacaaggagggaagctttgccgttccgcgttccgactctgtagcaatattggaaacaatcccagtgctcccagtgcatagcaacgggagtccagagcctggtcagcccgttcagaatgctatcagtgacgatgatttcttggagaagaacataccccccgaggctgaggaactgtcatttgaagtgtcatacagtgaaatggtcacagaggccttgaagcggaataagttgaagaagagcgaaatcaagaaagaggattacgttttgacaaagttcaacgtgcaaaagacacgcttcggattgaccgaggctggtgacctttctgccgaggacatgaaaaagatccggcacctttcacttatagagctgaccgcattttttgacgcatttggcatccagttgaaaagaaataaaactgagaaggtgaagggccgggataatggaatattcggagtgcccctcacagtgctgcttgacggcgaccgcaaaaaggaccccggtgtcaaagtgcccctggtgttacaaaaattcttcgaaaaagtcgaagagtctggccttgaaagcgagggaatctttaggctaagcggctgtacagcgaaagttaaacagtaccgggaggaactcgacgctaaatttaacgctgacaagtttaagtgggacaaaatgtgccacagagaggccgctgtgatgttaaaagccttttttcgtgaactccctacctcactgttcccggtcgaatacatccccgcgttcatcagtctgatggagagagggccacatgttaaggtccagtttcaggccctgcatctgatggtcatggctttgccagatgccaatcgggacgccgcacaagctctaatgacatttttcaacaaagtcatcgctaacgagagcaagaatcgcatgtctctctggaatatctccaccgtcatggctcctaatctgttcttctcccggagcaaacatagtgattatgaggaactgctcctggccaacactgccgcgcatatcattcgactaatgcttaaataccagaaaattctgtggaaggtaccctccttcctgatcacacaggtcagaagaatgaacgaagctactatgttgctgaagaaacagctgccctcggtgaggaaactcctgaggaggaagacactcgaacgcgaaactgctagccccaaaacttctaaggtactgcagaaaagcccatctgctaggcgaatgtcggatgttcctgaaggggtgatccgagtacacgctccgctattaagtaaggtcagcatggccattcagctgaacaatcagacgaaggccaaagacatcctggccaaatttcagtatgagaaccgtatactccactggcagagagccgctctgagctttcttaacgggaaatgggtgaagaaggaacgggaggagtctactgaaacaaacaggagccccaagcacgtattcctgtttaccattggactggacatctctacatag

SEQ ID NO: 203330 - DNA, 1713 bp, synthetic construct
  misc_feature 1..1713: note = Description of Artificial Sequence: Synthetic coding sequence
  source 1..1713: mol_type = other DNA
atgcggaagaaggacaagcagagcatccgggacgtgcgggacatcttcggtgtgtcagaaagtcctccccgagatacctgtggaaatcatacgaaccagctggatggtaccaaggaggaacgcgagctgccccgggttatcaagacttcaggctctatgcccgacgacgcctctttgaacagtaccactctgagtgacgccagccaagacaaggagggaagtttcgcggtccctaggtctgactcagtggcaattctggaaacaattcccgtgctgcccgtccacagcaatggaagccctgaacccggtcagccggttcagaatgctatctccgatgatgacttcctggagaaaaacattccacctgaggccgaggagttatccttcgaagtgtcttacagcgaaatggtgacagaagctctgaagagaaacaagcttaagaaatcagaaatcaaaaaagaagattacgtcctgactaaatttaacgtgcagaaaacacggttcggtctgaccgaggctggagatctctcagctgaggatatgaagaaaatacggcacctctcactaatcgagttgacagcgttttttgacgcctttggaatacagctgaagcgaaacaaaacggaaaaagtgaagggacgcgacaatggtattttcggcgtccctcttacagttctgctggatggagaccgcaagaaagatccaggggttaaggtccctctggttcttcagaagttctttgaaaaggtcgaagagtcagggttagagtccgaggggatctttagactgtccggttgtacagccaaagttaaacagtatcgggaagaactcgatgcgaagttcaacgccgataaatttaagtgggacaagatgtgtcatcgggaggcagccgtcatgctgaaggctttcttcagggagctgcctacgagtttgtttcctgttgagtacatcccagcatttatcagtctgatggaaaggggccctcacgtaaaggtgcagtttcaggcactgcacctgatggtgatggcgctgcctgacgccaacagagatgcagcccaggccctgatgaccttcttcaataaagtcatcgcaaacgaaagcaaaaaccgcatgagcctctggaacatcagcacagtgatggctcccaacctttttttctctcgatccaagcattcagactatgaagaacttctgttggcgaatactgccgcgcatatcatacgccttatgctcaagtaccagaagattctctggaaggtgccctcttttctcataacccaggtgaggcgcatgaacgaagcaacaatgctgctgaagaagcagctaccgtccgttcgaaaattactcagacgtaagactctcgaacgggagactgccagtcccaagacgtcgaaagtcttacaaaagagtcccagtgccagaagaatgtctgatgtgccggagggtgtcatccgcgtccatgctcccctgctcagtaaggtttctatggctatccagctaaataaccagacaaaggccaaggacattctcgcaaagttccagtatgagaacagccacgggtcttcagagtgcatcaaaattcagaatcagaggttatatgagattggtgggaatatcggcgaacactgtctggacccagatgcctacatcctcgacgtctataggatcaatccccaagccgagtgggtgattaagccacagcagtccagctag

SEQ ID NO: 203331 - DNA, 354 bp, synthetic construct
  misc_feature 1..354: note = Description of Artificial Sequence: Synthetic coding sequence
  source 1..354: mol_type = other DNA
atgctgagcaacgagagcctgcacccccccgccttcagccggagcaactccgaagcctccgtggattctgcttctatggaagacttctggagggaaattgagtctatcaaagatagcagcatggggggtcaggaagagcccccaccagctgaagtgacccctgttgacgagggagaactggaggcagagtggttacaggatgtcggactaagtactttaattagcggcgacgaagaggaagacggaaaagctttactttcaacactgacacgaacacaggcagctgctgtacagaagcgatatcacacatatactcagaccatgcgcaagaaggataagcagtcaatccggtag

SEQ ID NO: 203332 - DNA, 1665 bp, synthetic construct
  misc_feature 1..1665: note = Description of Artificial Sequence: Synthetic coding sequence
  source 1..1665: mol_type = other DNA
atggccttcatgcggatcaacgtgatcatgaacgagctgccccgggatacatgtggcaatcacacgaatcaactggacggcaccaaggaagagagggagctcccacgtgttattaagacatccgggtccatgcctgatgatgccagcctgaactcgactaccctgagcgatgcatcccaagataaggaggggtcttttgctgtgccccgctctgatagcgttgcaatcctggagaccattcctgttctgcctgtgcattcaaacggcagtccagaacccggccagcctgtacaaaacgccattagcgacgacgacttcctcgagaaaaacattccacccgaggctgaagaattgtccttcgaggtttcatatagcgagatggttacagaagctttgaagcgcaataagttaaagaagtcagaaataaaaaaggaagactacgtccttacgaaatttaacgttcagaagacccggtttggcctgactgaagccggagatctgtcagcagaagatatgaaaaaaattcgtcatctgtcactgatcgaactcaccgcattttttgatgcttttgggatacaacttaagcggaataaaactgaaaaagtcaaggggagggacaacgggatcttcggagttccattaacagtactcctcgatggggaccggaaaaaagatcccggggtgaaggtgccactggtgttacagaaattctttgagaaagtggaagagagcgggctggagtctgaaggcatattccgcttatcaggatgtacagcaaaagtgaagcagtaccgggaggaactcgatgcaaagttcaacgccgacaagttcaagtgggacaagatgtgtcacagagaggcagctgtgatgctaaaggccttttttagggaactgcccacttccctgtttcccgttgagtacattcccgcatttattagcctcatggagagaggcccacacgtgaaggtgcagtttcaggcgctgcatctgatggtgatggcccttcccgatgcaaaccgggacgcagcacaggccctgatgaccttttttaataaagtcatagcaaatgaatccaagaatcggatgtcactatggaacatctccacagttatggcaccaaacctgttctttagcaggagcaaacacagcgactacgaagagctgttactcgctaacactgcggcccacataatccggcttatgctgaaataccaaaagatcctctggaaggtgccctcttttctgattacacaggtccgacggatgaacgaagcgacaatgctcctgaagaagcagctcccatcggtccggaaacttctaaggcgcaagacactggagagggaaacagcctcgccaaaaacgagcaaggtcctccagaaaagccccagcgcaagacggatgtccgacgtgcctgagggagttatcagggtgcacgctccccttctcagcaaagtgagcatggcaatccaacttaacaaccagacaaaagcaaaagacattctggccaagttccagtacgagaatcgcattctgcattggcaacgcgctgccctcagctttctcaatgggaaatgggtgaagaaggagcgcgaagagagtacggaaaccaataggtctccaaaacatgtgttcctttttacaattggcttggacatctcaacatag

SEQ ID NO: 203333 - DNA, 3786 bp, synthetic construct
  misc_feature 1..3786: note = Description of Artificial Sequence: Synthetic coding sequence
  source 1..3786: mol_type = other DNA
atgatcgcccacaagcagaagaagaccaagaagaagcgggcctgggcaagtgggcagctgagcacagatatcaccacctcagaaatggggttaaagagtctatcgtctaactctatttttgatccagactacatcaaagaactggtgaatgatatacggaagttcagccacatgctgctctaccttaaagaagccatcttttccgattgctttaaagaggtcatacacatcaggttagaagagcttttacgggtgttaaagtccataatgaacaaacatcagaatctcaacagcgttgacctgcagaatgccgccgaaatgctgaccgcgaaggtcaaagccgtcaattttaccgaggttaatgaggagaacaaaaacgatctttttcaagaagtgtttagtagcattgagacgctagcattcactttcgggaacattctcaccaacttcctcatgggcgacgttggaaacgatagcctgctaaggctacctgtgtcacgtgagacgaagtcctttgaaaatgtttcagtcgaaagcgtcgattcctcttcagaaaaggggaatttctcccctctcgaactggacaacgtgttactgaagaataccgacagcatcgaactagccttaagctacgctaagacctggagcaaatacactaaaaatatagtctcctgggttgaaaagaagttgaatttggagctcgagtcaacccgcaatatggttaagcttgcagaggcaacccgcaccaacattggcatacaggaattcatgcccttacagtctctcttcactaacgcattgttaaacgacatagaatcgagccaccttcttcaacagaccattgccgccttacaggccaataaattcgttcagccactgcttggccggaagaacgaaatggaaaaacagcgcaaggaaatcaaggaattgtggaaacaggagcagaacaagatgctcgaagctgaaaatgcactgaaaaaagctaagctgttgtgcatgcagcgccaagatgagtacgaaaaggcaaagtcctctatgttcagggccgaggaagagcacctgagctcctccggcggactcgccaaaaatttaaataagcaactcgaaaagaagcgccggctcgaggaggaggcgctgcagaaggtggaggaagccaatgaactgtacaaagtgtgcgtgactaacgttgaggagcgccggaatgatctcgagaatacaaaacgcgagatcttggcacagcttaggacacttgtgttccagtgcgaccttacactcaaggccgtgacagtcaatctgttccatatgcagcatctccaggcggcaagcctggccgacagtctccagagtttgtgcgactccgctaaactgtacgaccccggacaggaatactccgaatttgtaaaggccacaaactccaccgaagaagagaaggtcgacggaaacgtcaacaagcacctcaatagttcccaaccatctggttttgggcccgccaactctctcgaggatgtggtgcgcctgcctgactcctccaacaagatcgaggaggaccgctgcagcaactctgctgatattactggtccctctttcatccgctcatggacattcggaatgttctcagattccgagagtacgggaggcagctccgaaagcaggtccctggatagcgagtctatctctcccggtgatttccataggaaactgccgcggactcccagttctggaaccatgagttccgccgacgaccttgacgagagggaacctccttcccccagcgaaaccggcccaaactcactggggacattcaagaaaacgctcatgtcaaaggctgcgcttacccataagtttcggaaactgcgctcacccacaaaatgtcgggattgcgagggaattgtcgtgttccagggagttgagtgcgaggagtgtctgctggtatgtcaccggaagtgcttagagaacttagtcatcatttgtggtcatcagaagttgcctggaaagattcacttatttggagccgaattcacccaggtcgctaagaaggagccagatggaatcccatttattctgaagatatgtgcatccgagatcgaaaatagagcattatgtctgcaggggatctaccgcgtgtgcggtaataaaattaagactgagaagctgtgccaggccctcgagaatggcatgcatctggtcgacatcagcgagttttcctcccacgacatatgcgacgtactgaagctgtatttgagacaattgcccgagcccttcattctctttcgactttataaggaatttattgatcttgccaaagagattcagcacgtaaacgaggagcaggagactaagaagaacagcctggaggacaagaagtggcccaatatgtgcatcgagattaatcggatcctgcttaagagcaaggacctactgcgacagctgcccgcgtctaatttcaacagcttgcactttctgattgtgcacctgaagagggttgttgatcacgctgaagagaataagatgaattccaagaacctcggagtgatctttggaccctccctgattcgtcctcgcccaactacagcacctattaccattagttctcttgccgagtactccaatcaagcacgcctggtggagtttctgattacttactcacagaagattttcgatggatctctgcaacctcaagatgttatgtgttctatcggcgtggtggaccagggatgcttccccaagcccctgttgtcaccagaggaaagagatatcgagcgcagcatgaaaagcctatttttctctagcaaagaggacatacataccagtgagtctgaaagcaagatattcgagcgtgcaaccagtttcgaggaatccgagcggaagcagaatgcgcttggcaagtgcgatgcatgtctatcagataaggcccagctgctcctagatcaggaggctgagtccgcctcacagaagatcgaggacgggaaaacccccaagcccctgtctttaaagtcggatcgttctaccaataatgtggaacgccacacacctagaacaaagataagaccggtgtccctacccgtcgaccggcttctgctcgcatccccccccaacgaaagaaacggccgcaacatgggaaacgtcaatctcgacaagttctgcaagaaccctgcattcgagggggtcaatcgaaaggacgccgccaccacagtctgtagcaaatttaatggattcgaccaacagaccctgcagaaaatccaggataaacaatacgaacaaaatagcctaaccgccaagacaaccatgatcatgccttccgcacttcaggaaaagggcgttaccacatcccttcagatttctggtgatcactcgattaacgcaacgcaaccaagtaaaccgtatgctgaaccagtgcgttccgttcgcgaggcctccgagcggcgtagttcggatagctaccctcttgcccccgtcagggcaccccggactctccagcctcaacactggaccaccttctacaaaccccatgcccctataatctccatacgcggcaacgaagaaaaacccgcctcacccagcgccgctgtgccccccgggaccgatcacgacccccatggcctagtcgtaaaatcgatgccagaccccgataaggcatccgcctgcccagggcaggccactgggcagcccaaagaagattccgaggagctcggattgcctgacgtgaatccgatgtgtcagcggccccggctgaaaaggatgcaacagttcgaggatctggagggagagatccctcagttcgtgtag

SEQ ID NO: 203334 - DNA, 1182 bp, synthetic construct
  misc_feature 1..1182: note = Description of Artificial Sequence: Synthetic coding sequence
  source 1..1182: mol_type = other DNA
atgatcgcccacaagcagaagaagaccaagaagaagcgggcctgggcatctggacagttgagtaccgacatcaccacctctgagatggggctgaagtccttgagtagtaactctattttcgaccctgactacattaaggaacttgtaaacgatattcggaagttctcacatatgttgctgtacctgaaggaggccattttcagtgactgcttcaaagaggtgatccatataaggcttgaggaactgctgcgggtgctgaagagcattatgaacaaacaccaaaacctcaactcggtagatttgcagaacgccgctgaaatgttaaccgccaaggtcaaggctgtcaattttactgaagtcaacgaagaaaataagaatgacctttttcaggaagtattctcctccatagaaacattggcttttaccttcgggaacatcctgaccaactttttgatgggagacgtgggcaatgattctctcctgcggctcccggtgagccgggagactaagtcctttgaaaacgtatcagtggagtcagtggatagctccagcgagaagggtaacttttcaccattggagctggacaacgttttgctgaaaaataccgattccatagagctggccctgagttatgccaaaacctggtcgaaatacaccaagaacatcgtgagctgggtggagaaaaagctgaatctggagctggagtcaacccgcaacatggtgaagctggctgaggctactcgcacaaatattggcattcaggagttcatgcctctccagagcctgttcaccaatgcactgttgaacgacatagaaagctcacacctcctgcaacagacgattgcagccctgcaggctaacaaattcgtgcagcctctgttgggtaggaaaaatgagatggagaaacagagaaaggaaatcaaagagctgtggaagcaagaacagaacaagatgctggaagctgagaacgcgctgaaaaaggccaaattactctgcatgcagcggcaagatgagtacgagaaagccaaaagctcaatgtttcgggctgaagaggagcatctttcgagctcaggcggactggctaaaaacctgaacaaacagctcgaaaaaaagcgtcgattggaggaggaagctctgcaaaaggttaccatctttttcttctttatctgcaagctcaactag

SEQ ID NO: 203335 - DNA, 3306 bp, synthetic construct
  misc_feature 1..3306: note = Description of Artificial Sequence: Synthetic coding sequence
  source 1..3306: mol_type = other DNA
atgaagagccggcagaagggcaagaagaagggcagcgccaaggagcgggttttcggttgtgacctacaggagcatctccaacattccggacaggaggtgccacaagttttaaaatcatgtgcggagttcgtcgaagagtacggtgttgtcgacggaatttaccgcctctctggcgtgagcagcaatattcagaaattaagacaggaatttgagtctgaacggaagcccgacctgcgaagagacgtttacttacaagatatccactgtgtctcgtcattatgcaaggcctacttccgggagctgccagatccccttctcacatatcggctgtatgacaaattcgcagaagcagtgggagtccaattagaacccgagaggctagtcaagatcctggaggtcctccgggagctgccagtcccaaattatagaaccctcgaattcctaatgcggcacctggtacacatggcctccttcagtgcccagaccaatatgcacgcccgcaatctggcgatcgtgtgggctcctaacctacttcgcagtaaggatattgaggcttccgggtttaatggtactgccgcttttatggaagtaagagtgcagagtatcgtagtggagttcattctgactcacgtggaccagttgttcgggggggcagctttgagcggcggcgaggtggaaagtggctggcgctcgcttcccggcacaagagcaagcgggagcccggaggatctgatgcccaggcccctaccttatcacctgccctctatcttacaggcaggggatggtccgcctcagatgcggccctaccacacaatcattgagatcgccgagcacaagaggaaaggctctctaaaagtcagaaagtggaggagtattttcaatttgggcaggtctggacatgagacaaaacgtaaactacccaggggagccgaggacagggaggacaagtctaataaagggacattgcggcccgctaaatcaatggattcacttagtgccgcggccggtgcctcagacgagccggagggcttagtaggtccttcttcccccagaccatccccacttctgcccgagtcactggaaaacgactccatcgaggcagcagaaggcgagcaggagcctgaggctgaagctctgggcggcaccaactccgagcctggcacccccagagctggaaggtcagcgataagagcaggcggatcctcccgagcagagcgatgcgctggagtgcacatcagcgatccctacaacgtaaacttgcccttgcatattacctctatcttgagtgtgccccctaacattatttccaatgtcagcctggccaggctcacacgggggctcgagtgccctgctctgcaacaccgcccttcccccgccagtgggccagggccaggaccgggcctgggccctggccccccggacgaaaagttagaggcctcccctgcgtcttctccacttgcggacagcggacctgacgatcttgcgccagctctagaggatagcctgtcccaggaagtccaggattcattcagtttcttggaagacagcagcagctccgagcccgaatgggtcggagcggaagacggtgaggtggcccaggccgaggctgccggggctgcattctccccgggggaggacgatccaggaatgggatatctcgaggagctcctcggggtcgggccccaagtagaggagttctccgttgaacctccgttggatgacctttcccttgacgaggcgcagtttgtgctggctccgtcctgctgctccctggactccgctgggccccgacccgaggtagaggaggaaaatggcgaagaggtcttcctgtccgcctatgacgacttgtctccgctattaggacccaagccccccatctggaagggctccggctcactggagggggaggctgccgggtgtggccgccaggcattgggacagggcggcgaggagcaggcttgttgggaagttggcgaggacaaacaggctgagccagggggccgactcgacattcgcgaggaggccgaagggagccccgagaccaaggtcgaggctggaaaagcttccgaagatcggggggaagcagggggaagtcaggagaccaaggttcggctgagggaagggtcccgtgaagagactgaggcaaaagaggagaaatccaaaggtcagaaaaaggccgatagcatggaggccaaaggggttgaagagcctggcggtgacgaatacacggatgaaaaggagaaagaaattgagcgagaagaggacgaacagcgtgaagaggcccaggtcgaggcgggcagggacctggagcaaggagcacaggaggaccaggtagctgaagaaaagtgggaggtcgtgcagaaacaggaggcggagggggtgcgggaagacgaggataagggccaacgcgagaaaggctaccacgaggcaagaaaagaccagggtgatggggaggactcccgttctcctgaggctgctacagaaggcggggcaggcgaagtaagcaaagagcgggagtcaggggatggagaggcagagggggatcagcgggctggcgggtattatctggaggaggacaccctgtctgaaggtagcggtgttgctagtctcgaggtggactgcgccaaggaggggaatccacatagttctgagatggaggaggtagcaccccagccaccccagccggaagaaatggaacccgagggacagccctccccagatggctgcctgtgcccttgttccttaggattgggaggagtgggtatgagattggcctctaccctcgttcaggtccagcaagtcaggagtgtgccggtggttccccccaagcctcaatttgccaagatgccttccgcaatgtgcagcaaaattcacgtagccccagcaaacccctgccctaggcctggccgtctagatggaacacccggagagagggcttggggttcccgagctagccgtagctcctggcggaacggagggagtcttagctttgacgccgcagtcgctttggcacgggacagacagagaacagaagctcagggcgtgaggagaacccagacttgtacagaggggggggactattgtcttatacccagaacttcaccttgctctatgatcagcgctcattcaccacggccactgtcttgcctggagttgccatccgaaggagccgaaggttctggctctaggagtcgcctgtcccttcctcctagggagcctcaggtgccggatccgctgctgagctcccagagacgttcatacgctttcgaaacccaggcaaatccaggcaagggcgaaggactgtag

SEQ ID NO: 203336 - DNA, 2673 bp, synthetic construct
  misc_feature 1..2673: note = Description of Artificial Sequence: Synthetic coding sequence
  source 1..2673: mol_type = other DNA
atgaagagccggcagaagggcaagaagaagggcagcgccaaggagagggtcttcggatgcgacttgcaggagcatctccagcacagtggccaagaagttccccaggtgctcaagagttgtgccgagtttgtggaggagtatggcgtggttgacggcatataccgcctctcaggggtttcttctaacattcagaaactaaggcaggagttcgagtccgaaagaaagcctgacttgagacgcgacgtgtacctccaagacatccactgtgtctcttccctttgcaaggcctattttcgggagttgcccgacccactgttgacatacaggctgtatgacaagtttgccgaggctgtaggggtccagttggagcccgagcgtttggttaaaattctagaggtcctgagagaacttcccgtgccaaattacagaacacttgagttcttgatgcgccacctggtccatatggcttccttctctgcacagacaaatatgcacgcgagaaatttagctattgtttgggctcctaacctgctccgaagtaaggacatagaagccagcggctttaacggcacagccgcatttatggaagtccgggttcagtcaatcgtcgtggagttcattctgacccacgtggaccagctgttcggcggcgccgccctgagtgggggagaagtagagtctggatggcggtccttgccggggacgcgagcttccggttcccccgaggacctgatgcctaggccactgccttatcacctgccttctattctgcaggccggtgacggcccgccgcagatgcgcccataccataccattattgagatagcagaacacaaaaggaagggatcattgaaggttaggaagtggcgaagtatattcaatctgggtcgcagtgggcatgagaccaagcgcaagcttccaagaggggcggaagaccgggaagataagtccaacaaaggcactctgcggcctgcaaagtccatggactcgctgtccgcagctgccggagcctcggacgagcctgagggactcgtcggaccgagcagtccccgtccaagcccactgctccctgaatcattagaaaacgactccattgaagccgcagagggtgagcaagagccagaggctgaggccctggggggaaccaacagcgagcccggcacaccacgagccggaagaagtgccataagggctggcggctcgagcagagccgaacgttgcgctggagtacatatttccgatccatacaatgtgaatttgcctctccacattactagcatcttgagtgtgccgcccaatattatctccaatgtctcactggctaggctcactcgcggcctcgagtgtccagcgctacagcatcgaccatcccccgcctccgggccgggtccgggcccaggccttgggccaggcccaccagatgaaaagctcgaagccagtcccgcgtcctcccccttagctgattccggccctgacgatttggcccccgccctggaggattccctgagccaagaggtacaggacagctttagctttttggaggacagctcttcaagcgagcctgaatgggtgggcgccgaggatggtgaggtggcgcaagcagaggcagccggcgctgctttttcccctggagaagatgaccccggcatggggtacctagaggaacttctgggcgtcggaccccaagtggaagaattttctgtggaacccccgttagacgacctcagcctggatgaggcccaattcgtgttggcgccaagctgctgcagtcttgacagcgccggtccccgccccgaggtggaagaggaaaacggcgaagaggtttttctgtctgcctatgatgatctatcgcctctgctgggacccaaacctcctatctggaaaggatccgggagtctggagggcgaggcagcaggatgtggaagacaggctttgggacaggggggggaagagcaggcatgctgggaggtcggtgaagataagcaagccgagccaggagggaggctggacattcgcgaggaggccgaaggaaccccccagccccctcaacctgaggagatggaacctgaagggcagccatcacctgatggctgcctgtgcccatgttcactcggtttgggtggagtcgggatgaggctggcgtctacgcttgtgcaggttcagcaggttcgttcagttccggtcgtcccgcctaaaccccagttcgccaaaatgccttccgcaatgtgttcaaagatccacgttgcaccagccaatccttgccccagacctggtcgcctggacgggacaccgggcgagagggcctgggggagtcgggccagtaggtcctcttggcggaacgggggctccttgtcgtttgatgctgcagtggcactggcacgcgacagacaaagaactgaggcccagggagtgcggcgaacacaaacttgcacagaagggggagactactgtcttattcctcgcacgagcccgtgttctatgatctcggctcactcccctcgccctctctcatgtctggaattgcctagtgaaggcgctgagggctccggctcaaggagtaggctgagcctccccccgagggagccacaggtgccagaccccctgctgtccagccaaaggcgcagttacgcattcgagacgcaagcaaatcccggaaagggagagggcctgtag

SEQ ID NO: 203337 - DNA, 1500 bp, synthetic construct
  misc_feature 1..1500: note = Description of Artificial Sequence: Synthetic coding sequence
  source 1..1500: mol_type = other DNA
atgcggcacctggtgcacatggccagcttcagcgcccagaccaacatgcatgccaggaacctggcaattgtctgggcgccaaaccttctcaggtccaaggatattgaggccagcgggttcaacgggaccgctgcatttatggaggtgcgcgtccagtcgatcgtggtagagttcattctcacacacgtggatcaactgtttggaggagccgccctgtctggtggcgaggtcgagtctggttggcgttcattgccaggtactcgcgccagtggatcccccgaagatctgatgcctcgaccattgccctaccatcttccatccattctacaggcaggtgatggaccaccccagatgcggccatatcacaccattattgagattgcagaacataagaggaagggaagtctgaaagtaaggaaatggcgatccatttttaacttagggcgcagtggccacgagaccaaacggaagttacctcgcggcgcagaggatcgagaggataagtcaaacaagggaaccctacgacctgcaaagtctatggatagcttgtctgcagcagctggtgcctcagacgaacctgagggactcgtgggaccgagcagcccgcgaccctcgccgttactgcctgaatcactcgaaaatgactctattgaggccgcggaaggcgagcaggaaccagaggcggaagcactggggggtacaaactcagaaccagggactccacgggccggaagaagcgccatccgggctggcggatcgagtagagcggaacgttgtgcgggtgtgcacatttctgatccttacaacgtaaacctaccccttcacatcacgagtattctctctgttccaccaaatataatttccaacgtgtcactggcaagactgacccggggccttgaatgtccggccctgcagcatcgacctagtcccgcctccgggcccggtcctgggccagggctcggcccagggcctccggacgagaagctggaggcatctcctgctagttccccgctggctgactctgggccggatgatctcgcacccgctttagaagattccctgtcccaggaggtgcaggattccttcagttttctcgaagactcatcctcctctgagcctgagtgggtgggcgctgaagacggagaggttgcccaggccgaagcagctggagccgccttctcacctggcgaggacgatcctggcatgggctatctcgaggaactgctgggcgttggcccacaggtggaagagttttctgtggaacctccactggatgatctgtctctcgatgaagcacagtttgtgctcgccccaagctgctgttcactggactccgctgggccaaggcccgaggtggaagaggagaacggcgaggaagtgtttctgtcagcctacgacgatctctcccctgccttaggactgctcttgcaaccaggatgggggcaccgcagtcacagctccgagggccagtgtctgagaatcaaggccgtgtttctgtag

SEQ ID NO: 203338 - DNA, 4335 bp, synthetic construct
  misc_feature 1..4335: note = Description of Artificial Sequence: Synthetic coding sequence
  source 1..4335: mol_type = other DNA
atgaagaacaagggcgccaagcagaagctgaagcggaagggcgccgcctccgcttttgggtgtgatctcaccgagtacctggagtcatcgggtcaggacgtgccatacgtgctgaagagctgcgctgaattcattgagactcacggcatcgtcgatggcatctaccgcctgtcaggagttacatccaacatccaaagacttcgacaggagtttggctcagaccaatgtcctgatctgacccgagaggtctacctgcaggatatccattgcgtcgggagcctctgtaagctgtattttagggagctccccaaccccttactaacttacgaactgtatgaaaaattcactgaggccgtgtctcactgccccgaagaagggcaactggccaggatacagaacgttatccaggagctccctccttcccactatcggaccctggaatatctgatccggcacctggctcacatcgcatcttttagcagtaaaacaaacatgcatgctcgcaacttggccctggtttgggcgccaaatcttcttcgctctaaagagatcgaggccacaggatgcaacggagacgctgccttccttgccgttcgagtgcagcaagtagtgattgagttcatcttgaatcacgttgatcagattttcaataacggagccccaggcagccttgagaacgatgagaaccggccaataatgaagtctctgacgttacccgccctgtccctgccgatgaagttagttagccttgaagaggcccaggcaagatcacttgccactaaccatccagcgaggaaggagcgcagggagaacagcctgccagaaattgtgcctcccatgggcactctctttcatactgtgctggaactgcctgacaataagcggaaactgagtagcaagtctaagaaatggaaaagcatatttaacctgggcaggtctggatcagactcgaaaagcaagctctcacggaatggcagcgtgtttgttaggggccaacgattgtcagtcgaaaaggctacaattcggcctgccaaaagtatggattcactatgcagcgtccccgtagagggaaaagagaccaaaggtaattttaatagaaccgtaaccactggcggattctttataccagccactaagatgcacagcactggcactgggtcctcctgcgacctaactaaacaggaaggggaatggggacaggagggcatgccccccggagccgagggagggttcgacgtctccagcgatcgttcacacttgcagggtgcacaggctagacccccaccagagcagctgaaggtatttcgtccagtggaagaccctgagtcggagcaaaccgctcccaaaatgctgggcatgttctatactagcaacgatagccctagcaaatctgtgttcaccagctcgctgttccagatggagcccagtccacggaaccagagaaaggcccttaacatctctgaacccttcgccgtaagtgtgccactgcgagtcagcgctgtgatttccactaactcgactccttgccgaacgcctccgaaggaactgcagagtctgagtagtctcgaggaattctcttttcatggaagtgaatccggcggatggcccgaagaggagaagcctttaggcgccgaaacttcagctgccagcgtgccgaaaaaagcggggctggaagatgccaaagcagtgcctgaagcccctgggaccgtcgagtgtagtaaagggttaagtcaggagcccggcgctcaccttgaggagaaaaagacaccagagagcagtctgtcttcccagcacttaaatgagctggagaagagaccaaatcctgagaaagtggtagaggaaggcagggaagccggcgaaatggagagtagcactcttcaagagtcccctcgagctcgggccgaggctgtactacttcatgagatggacgaagacgatctggccaacgccctcatctggcctgaaatccaacaggaactgaagattatagaatcagaagaggagttgtcttctttgccaccacccgcattaaagacatctccgatacagcccattctcgaaagctcactcgggccctttatcccctcagaacccccaggcagtctgccttgcggaagctttccggcgccggtgtctacgcctttggaggtgtggacccgagatcctgccaatcaaagtacccagggagccagcacagccgcctccagggagaagcccgagcccgagcaggggttgcaccctgatctggctagcttggcccccctggagatcgtgccatttgagaaagcctctccacaagccacagtggaggttggcggcccaggtaacctgagccctccattgccccctgcccccccaccaccaacacctttggaagagtctacgcccgttctgctctcaaaggggggtccggaaagggaagacagtagccgcaagctaaggactgatttgtacattgatcagctgaagtctcaagattctccagagatctcctctctgtgccaaggagaggaggctactccacgtcactcagacaagcagaacagtaagaatgccgctagcgaaggtaagggatgtggtttcccctcaccaactagagaagtggagatcgtttctcaggaggaagaggacgtgacccactccgtgcaggaaccaagtgactgcgacgaagatgacaccgtcactgacattgcccagcacggactcgagatggtcgagccttgggaggaacctcagtgggttaccagtccgttgcattctcccactttgaaagatgcccataaggcccaggtgcagggactccagggccaccagttggagaagagactgtcccatcggccatcattgaggcagtcgcattccctggattccaagcctactgtgaagtcacagtggactcttgaggtgccgagcagttctagttgcgccaacttagaaaccgaaagaaattccgatccccttcagccccaagcccccaggcgcgagattacaggatgggacgaaaaggcactcagaagctttcgtgagttttcaggtctgaagggcgcagaggctccacccaatcagaaggggccctccggcgtccagcctaacccggccgaaactagccccatttcacttgctgaggggaaggaattgggtacccacttaggccacagcagccctcagatcaggcagggaggagttccagggcctgagtcctcaaaggaatcttcccctagcgttcaggactcaacgtctcctggtgagcaccctgccaagcttcagctgaaatccaccgagtgtggcccgcctaaaggcaaaaaccggccctctagcctgaatttggatcctgctatacctatcgcagacttgttctggtttgaaaatgtggctagctttagcagcccaggaatgcaggtgtccgaaccaggcgatcccaaagtgacctggatgacaagcagttactgcaaggccgatccgtggagggtgtattcgcaagaccctcaggaccttgatatcgtcgcacatgccctcacgggcagaaggaattcggcacccgtgtcagtttctgccgtgcgcacgtcctttatggttaagatgtgccaagcccgtgctgtccccgtgataccacctaagatccagtatacacagatcccacaaccattacccagccagtcttctggggagaatggtgtgcaacccctcgagcgctcccaggagggaccatcctccactagcggtactacccagaagcccgccaaggatgactcgcccagctcactagaatcttctaaagaggagaagccaaagcaagatcctggcgctatcaagagcagcccggttgatgccaccgctccatgtatgtgcgaggggcctactctttctcctgaaccaggctctagcaacctgcttagcactcaggatgctgtggtgcagtgtcgtaagaggatgtcagaaactgagccgagcggagataatctcctgtcctccaagcttgaaagacccagcggcggaagcaaaccttttcatcgtagccgcccaggtcggccgcagtcactgatcttgttttccccgccatttcctattatggaccacttacccccttctagcacagtgactgatagtaaggtgttgctctcacctataagatcacctactcaaactgtaagtcccgggctcttgtgcggcgaactagccgagaacacctgggtgacccccgagggagtcactttaagaaataaaatgacgatcccaaagaatggacagaggctggaaaccagcacatcgtgcttttaccagccccagcggcggtcagtaatattggacggaaggtccggcaggcagatcgagtag

SEQ ID NO: 203339 - DNA, 3300 bp, synthetic construct
  misc_feature 1..3300: note = Description of Artificial Sequence: Synthetic coding sequence
  source 1..3300: mol_type = other DNA
atgaagaacaagggcgccaagcagaagctgaagcggaagggcgccgcatcagcattcggctgtgatctcacagaatatcttgaaagctcgggtcaggatgttccctatgtattaaaatcgtgcgcggagtttatagagacacatggcatcgtggacggcatctaccgattaagcggagtgacgtccaatatccaaaggttgcgacaagagtttggcagtgaccagtgcccagaccttacgagagaagtatatttacaggacatccattgcgtgggtagtctgtgtaaactgtacttcagggagctacctaacccgctgcttacgtacgaactttatgagaagtttaccgaggccgtctcccattgtccggaggaaggtcagctggcccgtattcagaatgtgattcaagagctgccaccatctcactacaggactttagagtacctgattcgccaccttgcccacatcgcatcattctcatcaaaaactaatatgcacgcacggaatctagctcttgtgtgggccccaaatctactgcgctctaaagaaatagaggccactgggtgcaacggcgacgcggcgttcctggcagtgcgagtccagcaggtggtcatcgagttcattctgaaccatgtagatcaaattttcaataacggtgcaccagggtccctcgagaatgacgagaaccggccaattatgaagtcacttaccctccctgctctaagcctgcccatgaagctggtcagcctagaggaggcccaagctaggagccttgctaccaatcatcctgccagaaaagaacggcgagaaaactccttacctgagatagtgccaccgatgggcactctcttccataccgtcctcgagctacccgataacaaacggaagctaagttcaaagtcaaagaagtggaagagcatcttcaatcttggccggtctggcagtgactccaagtctaagctctcaagaaacggcagcgttttcgtgaggggccaacgcctgtcagtcgaaaaggctaccatacgcccagccaagtcaatggatagcctctgtagcgtgccagtggaggggaaggagactaaggggaatttcaatcgcacagtcactacgggtggattctttatcccagcaaccaagatgcactccacaggcactggcagttcttgcgatctcaccaaacaggagggcgagtggggccaggagggaatgccgcccggtgcagaaggtggtttcgacgttagctctgaccgctcacacttgcagggcgctcaggctaggccaccaccagaacaacttaaggtattccgaccggtagaggatcccgagtcagaacaaacagcacccaagatgctgggcatgttttacacttccaatgatagccctagcaaatcagttttcaccagttccctgtttcagatggagccgagcccacgcaatcagcgcaaggcactgaatatcagtgagccttttgctgtatcagttccactgcgcgtgtcagcggtgatctccaccaattctacaccctgtagaactcctccaaaagagttgcaatctctcagttccctcgaagaattttccttccacgggagtgagagcggagggtggcccgaggaagaaaagcccctcggagctgagacaagcgccgctagcgtgccaaagaaggctggccttgaggatgccaaagccgttcccgaggcgcctggtaccgtcgagtgctcaaaagggctttcacaagagccaggagcgcatctagaagagaagaagactcctgagtcgtccttgagcagccagcaccttaatgagcttgaaaagcgacccaatcctgaaaaggtggtggaagaggggcgtgaagccggagaaatggagtcatccaccctgcaggaaagtccgcgcgccagagcggaggccgtgcttttacatgagatggatgaggatgatctggcaaacgccctgatttggccggagatacagcaagagttaaaaattatagagagtgaggaagagctctctagcctccctcccccagcgctgaagaccagccccattcagcccattctggagtcaagtctcggacccttcattccctccgaacccccggggagcctgccctgtgggtcctttcctgctcccgtgagcaccccactggaggtttggactagggatcctgccaaccagagcacccagggcgcaagtactgcggcatcacgtgagaaacccgagcccgagcaaggactccatccagacctggccagcctagccccgttagagattgttcctttcgagaaagcctcacctcaggctaccgttgaagtgggaggtccgggtaacctctcaccccctttaccacctgcccctcccccaccaacacccttggaggaatctaccccagttctgctcagcaagggaggacccgagcgtgaagatagtagccggaagctgcgcaccgatctatatatcgaccagctgaaaagccaggacagccccgaaatcagctccctttgccagggtgaggaagctacccctaggcatagcgacaagcaaaattccaagaacgccgctagcgaaggaaaaggatgtggattccccagtcccacgcgagaggttgaaattgtttcacaggaggaggaagatgtgacacacagcgtgcaggagcctagtgactgtgatgaagacgatactgtgacagatatcgctcaacacggtctagagatggtggagccatgggaagaacctcagtgggtgacatccccacttcatagtcctacactcaaagatgcccacaaggcacaagtgcaaggactacaagggcaccaacttgagaagcgcttatcccacagaccctcgctacgccagtcccactctctagacagtaaacctacagtgaaatcccagtggacattggaagtcccttcctcttcctcttgtgctaacttggaaaccgagcgaaactcagaccccttgcagccccaggctccaagacgggagatcaccgggtgggatgaaaaagccctgcgtagcttccgtgagttcagcggcctgaagggcgctgaagctcctcccaatcaaaagggccctagcggggtccagcccaaccccgcacagcccgtcggccctttaaggaatctgccaaagatgattcttcctccaccctggaaggctcagagaaaaaaaaaccaatccaaaattccagagcccctgtctcctcaccagtggatgcccctgcacccggcttgtgctagggacctgccgttcctgcagaatcaagcacggctgacgtgtagtcccccccgcatgcagtag

SEQ ID NO: 203340 - DNA, 4509 bp, synthetic construct
  misc_feature 1..4509: note = Description of Artificial Sequence: Synthetic coding sequence
  source 1..4509: mol_type = other DNA
atgatggccaagaacaaggagccccggccccccagctacaccatctcaatagtggggctctccgggaccgagaaagataagggaaattgtggtgtggggaaaagctgtttgtgtaataggttcgtacgaagcaaagccgatgagtactatcccgagcacacttccgtattatccaccatcgatttcggtggccgggttgtcaacaacgaccacttcctgtattggggggacattattcagaattcagaagacggtgtcgaatgcaaaattcatgttattgagcagacagagtttattgatgaccaaacctttctcccacacagaagcacaaacctgcagccttatataaagcgggctgccgcaagtaaactgcagtcagcggagaaactgatgtatatatgcactgaccagttaggccttgagcaggactttgagcagaagcagatgccagagggaaagctgaatgtggacgggtttctcctgtgtatcgatgtgtcacagggatgtaatcgcaagttcgacgaccagctaaagttcgtcaataatctttttgtgcaactgagcaaatccaagaaacccgtaattatagctgccacgaagtgcgatgaatgcgtagatcactacctgagagaggtccaggccttcgcctccaataaaaaaaatctgctggttgtggagactagtgcacgttttaacgtaaatattgagacctgctttacagccctagtgcagatgttggataagacaaggtccaagcccaaaattattccctacctggatgcatataagacccagaggcaacttgtggtaactgctaccgacaaattcgaaaagcttgtccagaccgtgagggactatcatgctacctggaagacagtgtccaataaacttaaaaatcatccagattacgaggaatacattaacctggaaggtacccgaaaggcccgtaatactttcagtaagcatatcgaacagctcaaacaggaacatatacggaagcgtagagaagagtatattaatactcttcctcgggctttcaacactcttttgccaaacctggaggagatcgaacacctgaattggtctgaggccctgaaactgatggaaaaacgggccgacttccagctgtgctttgttgtcctggaaaagacgccgtgggatgaaactgatcatatcgataagatcaatgataggcggataccctttgacctgctcagtaccttggaggccgaaaaagtctatcagaaccatgttcagcacctcatctcggagaaaagaagagtggaaatgaaagagaaatttaagaagaccttagaaaagatacagttcatttcccctggccagccatgggaggaggtgatgtgttttgtcatggaggacgaagcctacaaatatattactgaggctgacagtaaagaagtctacgggagacatcagagagagattgttgaaaaagcaaaggaggagttccaggaaatgctattcgaacacagcgaactgttttacgacctggacctgaatgccactcctagttctgataaaatgtcagagatccacactgtattgagcgaagaacccagatataaagctctccagaagctggcacccgatcgcgaaagtctcctgctgaagcacatcggattcgtgtaccaccctaccaaggagacatgcctttcagggcaaaattgcaccgacattaaggtcgagcagctgctggcatcttcccttctgcagctggaccatggcaggcttagactgtatcatgatagcaccaatatcgacaaggtgaatttgttcatactggggaaagatggcttagcacaagagctcgccaacgagatccgtacacagtctaccgacgatgagtacgcactcgatggcaagatctatgaactggatctgagacctgttgatgccaagagcccatatttcctttctcagctgtggacagccgcatttaagccacacggttgtttttgcgtgttcaacagcatagaaagcctaagctttattggagaattcatcggcaagattcgtactgaagcttcccaaatccgaaaagataaatatatggcgaatctccctttcactttgatcctcgccaatcaacgggacagtatttctaagaatctgcctatcttgaggcatcagggacagcagcttgcaaataaactgcagtgtccttttgtcgacgtgccagccggcacatatccacgaaagtttaacgaaacccagatcaagcaggcactgcggggggtgctggaatctgtcaagcacaacctggacgtcgtgtctcccatacctgcaaataaggatctgagcgaagcggacctccgcatcgtgatgtgcgcgatgtgtggggaccctttctccgttgatctcattttatccccattcctggacagtcattcctgcagcgcagctcaggcaggtcagaataattcgctgatgctggacaagatcatcggcgaaaagcgacgacggattcaaatcacaatactctcctaccattccagtattggcgtgcggaaggacgagctcgtgcacgggtatatcctcgtatacagtgctaaacggaaggcatcgatgggcatgttgcgtgcatttctgagcgaggttcaagacaccatccctgtacagctcgtagcagtcacggactcccaagctgatttctttgaaaatgaggccatcaaggaattaatgacagagggagagcatatagccactgagatcactgcgaaatttacagcactatactctttatcacaataccacagacagaccgaagtgttcactctctttttctcggatgtcttagaaaaaaaaaatatgatagagaatagttacctttccgataacaccagagagtccactcaccagtctgaggatgtattcctgccgagccctagggactgttttccatacaataactatccggactccgacgacgataccgaggccccgcccccttatagccctataggggatgacgtgcagttgttgcctactcctagtgaccgttctaggtaccgccttgaccttgagggcaatgagtatccaattcacagcacccctaactgccacgaccatgaaagaaatcacaaggtgccacctcctataaaacctaagccagtcgtccctaaaacaaacgtcaagaagctggaccccaacctgttaaagacaattgaggccgggatcgggaaaaatcctcgcaaacagacatctcgagtgcccctagcccatcccgaagatatggacccctcggacaactacgcagagcctatcgacaccatcttcaaacagaagggctacagtgatgagatctacgtggtcccagacgattcccagaacaggattaagatccgcaatagtttcgtcaataatactcaaggcgacgaagaaaatgggttttccgatcggacgtccaaatcgcacggagagcgacgcccttctaagtataagtataaatctaaaactttatttagtaaggccaaatcttactatcgcagaacacattcagacgcaagcgacgatgaggcattcactacctccaagacaaaaagaaaaggaaggcataggggatccgaagaggatccactactcagccccgtcgaaacttggaaaggcggaatcgataaccctgcaatcactagcgatcaggaactggacgataaaaagatgaagaaaaaaacccacaaggttaaagaagataagaagcagaaaaagaagaccaagaacttcaacccccctacacgtcgtaattgggagtctaattattttggcatgcccctccaagatctggttacagccgaaaagcccattcctctgtttgtggagaagtgcgtggaattcatcgaagacaccggactctgcaccgaaggcttgtatcgagttagcggcaacaagaccgaccaggataatatccagaagcaatttgatcaggaccacaatatcaacctcgtgagtatggaagtgactgttaatgctgtcgcaggagccctcaaagccttttttgcagaccttcccgaccctctcattccttactctttgcaccctgaactcctggaagccgcaaagatcccagataagacggagcgcctccatgcccttaaggagatcgtcaaaaagttccaccctgtgaattacgacgtgtttcggtacgtgatcactcatctcaacagagtgtctcagcaacacaagatcaatctgatgaccgctgacaatcttagtatttgcttctggccgaccctgatgcgaccagactttgaaaatcgcgagttcctatccacaactaagatccatcaatctgtggtcgagacttttatccagcagtgtcagttcttcttttataacggcgagatcgttgaaaccacaaatattgtagcgcccccgccaccgagcaatcctggtcagctggtagaaccgatggtcccgctccagctcccgcccccactgcagccacaattaatccagccccagctgcaaactgacccgctggggatcatatag

SEQ ID NO: 203341 - DNA, 714 bp, synthetic construct
  misc_feature 1..714: note = Description of Artificial Sequence: Synthetic coding sequence
  source 1..714: mol_type = other DNA
atgagcctgcccccccccccccccggccccctgcccctgcggcggcggagacggcggcccacccttctcggactctgtaccgaagggttgtaccgggtctcgggaaacaagacagatcaggataatattcagaagcaatttgaccaggatcacaatattaacctggtgagcatggaagtgacggtaaatgcagtcgcaggggcactgaaggccttctttgctgatctccctgaccccctgattccttacagcctgcatcctgaactcctggaggcggcgaaaattccagacaagacagagcgattgcacgcacttaaggagattgtgaagaaattccatcctgtgaattacgatgtctttagatatgtcatcacgcatttgaatagggtgtcccagcagcacaaaatcaatctcatgactgctgataatttaagtatctgtttttggcccaccctgatgcgccccgacttcgagaatagagaattcctcagcacaacaaaaatccaccagtcggttgttgagacattcattcagcaatgccagtttttcttttacaacggcgagattgttgagactaccaacatcgtagcccccccacccccatctaatccgggacagcttgtggaaccaatggtccccttgcagcttccaccacctctgcagccccagctgatccaacctcagcttcagacggatcccctgggaataatttag

SEQ ID NO: 203342 - DNA, 4506 bp, synthetic construct
  misc_feature 1..4506: note = Description of Artificial Sequence: Synthetic coding sequence
  source 1..4506: mol_type = other DNA
atgatggccaagaacaaggagccccggccccccagctacaccatctccatagtcggcctgagcggtaccgaaaaagacaaaggcaattgcggcgtggggaagagctgtctgtgtaatcggttcgttagatctaaagccgacgagtattaccccgaacacacgagcgtgcttagcacaattgacttcggggggagggtggttaacaacgaccatttcctctattggggcgatatcattcagaatagcgaagacggggtcgaatgcaagatacatgttattgagcagaccgagttcattgacgaccagacctttctgccccacagaagcactaatcttcagccctatatcaagagagcggcagcgtctaagctgcagtccgctgagaagctgatgtacatttgtacggatcaacttggattggaacaggattttgaacaaaagcaaatgccagagggcaaactgaatgtcgacgggttccttctttgcattgatgtgtcccagggctgcaaccgtaagttcgacgaccagctcaagttcgtgaataacctcttcgtacagcttagcaaaagtaagaaacctgtcattattgccgccacaaaatgtgacgaatgtgtggatcattatctgcgggaggtacaagcctttgccagcaataagaaaaacttgttggttgttgagactagcgctcgttttaatgtgaacatagaaacctgcttcactgcattggtgcagatgctcgataagactagaagtaagccaaagattataccatacctggacgcttataaaacacaacggcagctggtagtgacagccactgataaatttgagaagttagtgcagacggtccgcgattaccacgccacatggaagactgtttctaataagcttaagaaccatccggattatgaggagtacataaacctggaaggcacgcgaaaggctcgtaacaccttctctaaacatatcgaacagctgaagcaagagcatattagaaaacggagagaggaatacatcaacacactccccagggcctttaataccttgctgccaaacctggaggaaatcgagcaccttaactggagtgaggcactaaagctaatggaaaagagggctgacttccagctgtgcttcgttgtgcttgagaaaactccttgggacgagacagaccatattgataagatcaatgaccggagaatccctttcgacctgctctcaaccctggaggcagaaaaagtgtaccagaaccatgtgcagcatctgataagcgaaaagaggcgcgttgaaatgaaagaaaagtttaagaagacacttgagaaaatccagttcatttctcctggacagccttgggaagaggtgatgtgctttgtaatggaagatgaggcctataaatacattacggaagcggattcgaaggaggtctacggcagacaccaaagggagattgtggagaaggccaaagaggaatttcaggagatgctgttcgaacactctgagcttttctacgatcttgatctgaatgccaccccgagctctgacaaaatgagcgaaattcatacagtgttgtccgaagagccgcgctacaaagccctacagaagttggcgcccgacagggaatcactgttgctgaagcacatcggtttcgtataccacccaactaaagagacatgccttagcggccagaactgtactgacattaaagtggagcagttgctggcttcaagcctgctccagttggatcatgggcggttgagactttaccacgacagcaccaacattgacaaagtgaatctgttcattcttgggaaggatggtttggcccaagagttagctaatgaaattcggactcaaagtaccgacgatgaatacgctctggacggtaagatttatgagctagatctacggcccgttgacgccaagagtccatactttctctcacagttgtggaccgcagcgtttaaaccacatggctgtttctgtgtatttaatagtatcgaaagcctgtctttcatcggagaattcatcggcaaaatcaggacagaagcttcacaaattcgcaaagataagtacatggccaatctaccattcaccctcattctagcgaatcaacgggattctattagcaaaaaccttcccatcctgcggcaccagggacagcagctcgcaaataagctgcagtgcccattcgttgacgtgccagctggtacgtatcctagaaaattcaacgagacccaaattaaacaggctctgagaggagtcctcgagagcgtgaaacacaacttggatgtggtttctcctatcccggctaataaagatctcagtgaagcagacttgagaatcgtgatgtgcgctatgtgcggtgaccccttcagcgtcgacttgattctgtcaccattcctggactcacactcttgctctgcagcacaggccggtcaaaataactccctaatgctggataaaatcatcggcgagaagaggcgcaggatccaaattaccatcttgtcctaccactccagcataggtgtaaggaaggatgaactcgtgcacggatacattctcgtttacagtgctaagcgcaaagcttctatgggtatgttgagagcattcctgtccgaagttcaggacacgatcccggtgcagctcgtcgctgtgacagacagccaggctgattttttcgaaaatgaagcaataaaagagctgatgacagagggggagcacatagccacagagatcaccgcgaaattcacggccctgtactcgttgtcccagtatcaccgccagactgaggttttcacactctttttcagcgacgtgttggagaaaaagaacatgatcgagaatagttacctctcggataatacacgcgagagcacccaccagtccgaagatgtgtttctgccttccccccgggactgcttcccctataacaactatcccgacagtgatgatgacacagaggcaccccccccttatagcccgataggcgatgatgtgcagttactgccgacccctagcgacaggtcacgatatcggctagaccttgagggaaacgagtatcccatccactccacacctaattgtcacgaccacgagaggaaccataaggtccctccaccaattaagcctaagccagtcgtaccaaagactaatgttaagaaactcgatccgaatctgctgaaaacaatcgaagccggaattggcaagaacccgcgcaaacagactagcagagtgccgctcgcacatccggaggatatggaccccagtgacaattacgctgaacccatcgatacgatctttaagcaaaagggctactcggatgagatatacgtggttcctgacgattcacagaatcggatcaaaattcggaattcgttcgtgaacaatactcagggagacgaggagaacggcttctccgaccgaacctcaaaatctcacggagagagacggcctagcaaatacaagtacaagtccaaaacccttttctccaaagccaagagttactaccgtcgcacacatagtgacgctagcgacgacgaggcttttaccacctctaaaacaaaacgcaaaggccgtcatcgaggtagtgaagaagacccactgctttcccccgtggaaacgtggaaaggagggatcgacaacccagccattacaagtgaccaagaactggacgacaaaaagatgaaaaagaagactcacaaagtgaaagaggataaaaaaaaaaagaaaactaagaactttaaccctcctacccgccgaaactgggagtcaaactattttgggatgccactgcaggatcttgtgaccgctgagaaacccatccctctgttcgtggaaaagtgcgtggaatttattgaagacactgggctgtgtaccgaggggctatatagagtctccggcaataagacggaccaggataacatccagaagcagtttgatcaggaccataatataaatctagtctcaatggaagtgactgttaatgcagtagcgggcgccctgaaggccttcttcgccgatttacccgacccactgataccctactcccttcatccggaactgctcgaagctgcaaagatccccgataagacagagcggctgcacgctctgaaggagattgttaagaaattccatcccgtgaattatgatgtcttccggtacgtgatcacccatctgaatcgcgttagtcagcaacataagattaatttaatgacagctgataacctttccatttgtttctggcccacactgatgagacctgactttgaaaacagagaattccttagtaccacaaagatccatcagagcgttgtcgaaaccttcatacagcagtgccagttttttttctacaacggtgagattgtggagaccacaaacatcgtcgcgcctcctccaccatccaacccaggccagttggttgagcccatggtgcccctccaattgcctcctccactgcagccccagctaattcagcctcagcttcagaccgatcctctcggcattatatag

SEQ ID NO: 203343 - DNA, 726 bp, synthetic construct
  misc_feature 1..726: note = Description of Artificial Sequence: Synthetic coding sequence
  source 1..726: mol_type = other DNA
atgcccctgcaggacctggtgaccgccgagaagcccatccccctgttcgtggagaagtgcgttgaattcatcgaggatacaggtctgtgtaccgaggggctgtacagagtaagcggaaataaaactgaccaagacaatattcagaagcaatttgatcaggatcataacattaatctagtgtcgatggaggtcacagtgaatgcggtggccggggcgctcaaagcattctttgcagatctcccagacccactcatcccttacagtctccacccagaactgttggaggcagcgaagattcccgacaagacagaacgcctccacgctcttaaggaaatcgtgaaaaaatttcatcccgtgaactatgacgtgttccgatacgtcatcacccatcttaatcgggtgagtcagcagcataaaatcaacctaatgacagctgacaatttgtctatatgtttctggcctacgctgatgcgccccgattttgagaacagagaatttctgtcaacaaccaaaatccatcagagcgtggtagagacattcatacagcaatgccagttctttttctataacggcgagatcgtggagacgactaacattgtggccccaccccctccaagcaaccctggacagcttgttgaaccaatggtacctcttcagttgcccccccccctccagccccagctcattcaacctcagctgcaaacagatcccctgggcatcatctag

SEQ ID NO: 203344 - DNA, 4509 bp, synthetic construct
  misc_feature 1..4509: note = Description of Artificial Sequence: Synthetic coding sequence
  source 1..4509: mol_type = other DNA
atgatggccaagaacaaggagccccggccccccagctacaccatcagcatcgtggggctctcgggcaccgagaaagacaaaggcaactgtggggtaggaaagagctgcttgtgtaatagattcgtacggtccaaagccgacgagtattaccctgaacatacaagcgtgctgagtacaatcgatttcggtggacgcgtcgtgaacaatgaccatttcctgtattggggagatatcattcagaactctgaagacggagtcgagtgtaaaatacatgtcattgaacagactgaattcatcgacgaccaaacattcttgccccatagatcgactaacctgcagccttacatcaaacgcgccgctgctagcaagttgcagtccgcagaaaagctaatgtatatctgtactgatcagcttggactggaacaggatttcgaacagaaacagatgccggagggcaagctgaacgtggatgggttcttgctctgcatcgacgtttcccaaggatgcaataggaaattcgacgatcagttgaagttcgtcaataatctgtttgtgcagctcagcaagtctaaaaagcccgtaatcattgcggccactaagtgtgacgagtgtgttgaccactacctgcgcgaggtccaagctttcgcaagtaacaaaaaaaacctccttgtcgtggagaccagcgcacgctttaacgtcaacattgagacatgttttacagccctggtgcagatgctggacaagacccgatccaaacccaagattattccttacttggatgcctacaagactcagcgacagctggttgttacagcaaccgacaaattcgagaagctggtccagacagtgcgcgactaccatgctacatggaaaacggtctccaacaagctgaagaaccaccctgactacgaggagtatatcaatcttgagggcacccggaaggccaggaatacattttctaaacacatcgagcagcttaaacaggaacacattcgcaaacgcagagaggaatacataaataccttgccacgcgcctttaatacacttcttcccaatcttgaagaaatagagcatctaaactggtccgaagcattgaagctgatggaaaagcgggctgactttcagctgtgcttcgtcgtgctcgagaaaaccccgtgggacgaaaccgaccacatcgacaaaattaacgaccgccgcatccctttcgacctgttatctaccctggaagctgagaaagtgtatcagaaccatgtccagcacttgataagtgagaaaagaagggtggagatgaaggaaaagttcaagaagactctcgagaaaatacagttcataagtcccggccagccttgggaagaggtgatgtgctttgtcatggaagacgaagcttacaaatacataaccgaggccgactctaaggaagtgtatgggagacaccagcgagaaatcgtggaaaaggccaaggaagaatttcaggaaatgctgttcgaacactcagaattgttctatgatctcgacttgaacgccaccccgtcctcagataagatgagtgaaattcacacggtcttgtcagaagaaccgcgctataaagcgctgcagaagctggcgccggaccgagaatctctgctcttgaagcacattggctttgtctaccatcccacgaaagagacttgcttgagcggtcagaactgtacagacattaaggtggaacagctcctggcttctagtctgcttcagctggatcatgggcggctgaggttatatcacgattcaacaaacatcgataaggtgaatctgtttattctggggaaagacggactggcacaagaactggccaacgaaatcagaacccaatcaactgatgatgaatacgctcttgacggcaagatttatgagctggacctgcggcctgtggatgctaagagcccttactttttgtctcaactctggaccgccgcattcaagccccatgggtgcttctgcgtgtttaattccatagagtctctaagctttatcggggagtttattggcaagatccggactgaagcatcccaaattagaaaggataagtacatggccaacctgccttttaccctcattttggcgaatcagcgcgacagtatctccaagaacctccccatacttcgccaccagggacaacagttagcgaataagctgcagtgtccattcgtggacgttccagctggaacgtaccccaggaaatttaacgaaacccagataaaacaagctttgaggggggttctggaatctgttaagcacaacttggatgtggtgtctcccatacctgcaaataaagatctcagcgaggcggatcttcggattgtcatgtgtgccatgtgcggagaccccttctcagtagaccttatcttaagtcccttcctcgactctcatagctgttcagctgctcaggctgggcaaaataattccctgatgttggacaagatcattggcgaaaagagaaggaggatacaaatcacaatcctgagctatcattcatccatcggtgtacgaaaagacgaacttgtccatggatacatactggtatattctgccaaaaggaaggcttccatgggtatgttgagagccttcttgtcagaagtgcaagataccattcccgtccaacttgtagctgtcactgattcacaagctgatttctttgagaacgaggcaataaaggagctgatgaccgagggcgagcacatagccaccgagatcacggccaagttcactgcattatatagtctgtctcaataccaccgccaaacggaggtcttcaccctgttcttcagtgacgtgttagagaagaagaatatgatcgagaacagctatttgtctgataatacccgggagtcgacccatcagagcgaagatgtcttcctgccaagcccaagagattgtttcccctacaacaattaccctgacagcgatgatgataccgaggctccccccccttacagtcctattggggatgacgtccagctcctgcccaccccctcggataggtcccggtataggttggatttagagggcaacgaataccctattcactccacccccaattgccacgaccacgagcgaaaccataaagtaccgccgcccatcaaacccaagcccgttgtacctaagacaaatgttaaaaagttggatcccaacttgctcaagactatcgaagccggcatcggaaaaaatcctcggaagcagaccagccgtgtgcccttggcccacccagaggacatggacccatccgataattacgccgagccaattgatacgatctttaagcagaaaggttacagcgacgagatttacgttgttccagacgatagtcagaacagaatcaaaatccggaattctttcgtaaataatacgcagggagatgaggaaaacggctttagtgatagaacgagcaagagccacggggagaggcgtccctccaaatacaaatacaagtcgaagaccttgttttcaaaggcaaaatcttattaccggagaactcacagcgatgctagtgatgacgaggccttcacaacgtcaaagacaaaacgaaaagggagacatagaggtagcgaggaagacccccttctgagtcccgttgagacctggaaaggggggatagataatcccgcaatcacctccgaccaggaactcgatgacaagaagatgaaaaaaaagactcacaaagttaaagaagataagaagcagaagaagaaaacaaagaactttaatccacctactcggcgcaattgggagtcaaactacttcgggatgcccttgcaggacctagtgacggctgagaaacctatcccattgtttgtcgaaaaatgcgtggaattcattgaggataccgggctgtgcacagaaggactgtaccgggtatcagggaataaaaccgaccaggacaatatacaaaagcagtttgaccaggaccacaatatcaatcttgtcagcatggaagttaccgtgaacgctgtggctggggctttgaaggccttctttgcagatctgcccgatccgctgatcccatacagcctgcacccggagctcctggaagccgctaaaatacctgataagacagagcgactacatgccctcaaggagattgttaaaaaattccaccccgtgaattacgacgtgttcagatatgtgatcactcatttgaatagagtgagccagcagcacaagattaacctgatgactgcagataacctgagcatctgcttctggcccaccctgatgagacccgattttgaaaaccgcgaattcttaagtacgactaagattcaccagtccgtcgtggagacatttattcagcagtgccagttcttcttctacaatggggagatcgtagagaccacaaacattgtagcccccccccctccaagcaatcccggacagctggtggagccaatggtgcctctgcagctccctcctccccttcagccacagctgatccaaccgcagcttcagactgaccctcttggaatcatctag

SEQ ID NO: 203345 - DNA, 414 bp, synthetic construct
  misc_feature 1..414: note = Description of Artificial Sequence: Synthetic coding sequence
  source 1..414: mol_type = other DNA
atgcccctgcaggacctggtgaccgccgagaagcccatccccctgttcgtcgaaaagtgtgtggagtttattgaagacactgggctgtgcaccgaaggcctctaccgcgtgtctgggaacaagactgaccaggataatattcaaaaacagttcgaccaggaccataatatcaaccttgtctctatggaggtgacagtcaacgcggtcgcgggggcactcaaggccttcttcgccgatctgcctgatcctctgattccatactctctgcatccggagctgctggaagccgccaagattcccgacaaaacagaacggctccatgccctgaaggaaatcgtgaaaaaatttcatcccgtaaactacgatgtattccgctatgtgatcacacacctgaacagagtgtctcagcagtag

SEQ ID NO: 203346 - DNA, 114 bp, synthetic construct
  misc_feature 1..114: note = Description of Artificial Sequence: Synthetic coding sequence
  source 1..114: mol_type = other DNA
atgatggccaagaacaaggagccccggccccccagctacaccatctcaatcgtggggttgagtggaacagaaaaagacaaggggaattgtggcgtcggaaaaagctgcttgtag

SEQ ID NO: 203347 - DNA, 423 bp, synthetic construct
  misc_feature 1..423: note = Description of Artificial Sequence: Synthetic coding sequence
  source 1..423: mol_type = other DNA
atgatggccaagaacaaggagccccggccccccagctacaccatcagcattgtcggactctccggtaccgaaaaggacaagggaaattgtggcgtgggcaaatcatgtttgtgcaatcgttttgtgaggtcgaaagccgacgaatactatcccgagcatacctccgtgttgtctaccatcgactttgggggcagggtggtcaacaacgaccacttcctctactggggggacatcattcagaatagtgaagatggggttgagtgtaagatccacgtgatcgagcagacagagtttatcgatgaccagaccttcctcccccaccgcagtaccaatttgcagccctatataaaacgggccgctgcctctaaattacagagcgctgagaagctcatgtatatctgcacagatcagttaggactgtag

SEQ ID NO: 203348 - DNA, 4506 bp, synthetic construct
  misc_feature 1..4506: note = Description of Artificial Sequence: Synthetic coding sequence
  source 1..4506: mol_type = other DNA
atgatggccaagaacaaggagccccggccccccagctacaccatcagtatcgtgggtctgagtggcacagagaaagataaaggtaactgtggggttggaaaatcctgtctatgcaatagattcgttaggagtaaagctgatgagtactaccccgagcataccagtgtgttgtccaccatcgactttggcgggagagtggtaaataacgaccattttctctactggggggatatcatccagaattccgaagatggagtcgaatgtaagatacatgtcattgaacagactgaattcatcgacgaccaaaccttcctgcctcatcgcagtaccaatctccagccgtatattaagagagcggccgctagtaagctgcagagtgccgaaaaactgatgtatatttgtaccgaccagctcggcttggagcaagactttgagcagaaacaaatgccagagggcaagctgaacgtggacgggttcctactgtgcatagacgttagtcagggctgtaacagaaagtttgacgaccagctgaagttcgtcaataaccttttcgtgcagctgtctaagtcaaagaaacctgtgattattgccgctacaaagtgcgatgaatgcgtggaccactacctacgggaagtgcaagctttcgccagcaataagaagaacctgctggtcgtggaaacttccgctaggttcaatgttaatatagaaacttgtttcacggccctcgtgcaaatgctggacaaaaccagaagcaagcctaagatcatcccgtacctcgacgcatacaagacacagcgacagctggtggtgaccgccaccgataaattcgaaaagttggtgcaaaccgtcagggactaccacgcaacgtggaagaccgtttctaacaagctcaagaaccatccggactatgaggaatacattaatctggaggggactagaaaggctaggaacacattttcgaaacacatcgagcagttaaagcaagaacacattaggaagcgcagggaggagtacattaacactttgccaagagccttcaatacccttctccctaatctcgaagagattgagcacctgaattggtcagaagccctgaaactgatggagaagagagccgactttcaactgtgttttgtggttcttgaaaaaaccccatgggacgaaacagaccatattgacaagattaatgatcggcgcatcccctttgacctcttgtcaacactagaggcagagaaagtctaccaaaatcacgttcagcacttgatctcagaaaagagacgagttgaaatgaaagaaaagtttaagaaaaccctggagaaaattcagtttatctctccaggccagccatgggaggaagtaatgtgtttcgtgatggaggatgaggcttataagtacatcacagaggcggattccaaggaagtctacggacgtcatcagagagaaatagtcgagaaagccaaagaagaattccaggaaatgttattcgaacactcggagcttttttacgatttggacctgaacgccacacccagtagtgacaaaatgtctgaaatccataccgtgctgagcgaagaaccccgatataaggccctgcagaagctcgccccagatagagagtcgttgttactaaaacatatcggattcgtctatcacccaacaaaggagacttgcctgagtggccagaattgcaccgacattaaggtggaacaattgcttgctagttctcttctccagctggatcacggccgcctaagactctaccacgactccactaatattgataaggtgaacctctttatcctcggcaaagatggcttggctcaggagctggccaacgagattaggacgcaatcgacagacgatgagtacgcactggatggcaagatctatgagctggacttgaggcctgtcgatgctaaatctccgtatttcctgagccaactatggacagctgcttttaagccgcacggatgtttctgcgtatttaattccatcgagtccttgtcattcataggcgagttcatcggaaaaatccggaccgaagcatcacaaatacggaaggataagtacatggctaacctccctttcaccctgatcttggccaaccaacgcgactccattagtaagaatcttccaatcctgcggcatcagggacagcagctggccaacaaactccaatgccccttcgtagacgtgccggccgggacttacccgagaaagtttaacgagacacagattaagcaggctctgcgaggagtgctcgagtcagtaaagcataacctggatgtcgtgtctccgatccccgccaacaaggatcttagtgaagcggacctccgcatagtcatgtgcgctatgtgtggtgaccctttctcggtggacctgatacttagtccatttttagacagccattcttgttcagctgcccaagccggccagaacaatagcctaatgcttgacaagatcatcggcgagaagcgaagaagaatacagattacaattctgagctatcactctagcatcggagtgcggaaggatgaactcgtgcacggctacatccttgtgtactcagcaaaaagaaaagcaagcatgggcatgctgagggcatttctgtcggaagtgcaggataccatccccgtccagctggtcgccgtgaccgactcccaggccgacttctttgaaaatgaggccattaaggaactgatgaccgagggggaacatatcgctacagagataacagcgaagttcacagcactatatagcctgtctcaatatcatcgtcagaccgaggtcttcaccctattttttagcgatgttcttgaaaaaaaaaacatgattgaaaactcttatctgtcagacaatacgagggagagcacccaccagtcagaggatgtatttctaccgagtccccgggattgtttcccatacaacaattaccctgatagtgacgatgataccgaagcaccccctccttatagccccattggggacgacgtgcagcttttacctaccccttcagaccggtcaagatacaggctggacttggaaggtaacgaatatccaattcacagcactcccaattgccatgaccacgagcgcaatcataaagtacctccccccatcaagcccaagcccgtggtgcccaaaaccaacgtgaagaaactggaccccaatttattaaagaccatcgaagctggcataggcaagaacccccgaaagcagacttctagagttcctctggcacatccagaggacatggatccctccgataactatgccgaacccatcgatactattttcaagcagaagggctattctgacgagatatatgtcgtgccagatgattcccaaaataggattaagattaggaattctttcgtcaacaatacacagggcgacgaagagaatggattcagcgaccgaacatcaaagtcacatggggaaaggaggcccagcaaatataaatataagtctaaaaccttattctccaaggctaaaagctattacaggcggacacacagtgatgcttccgacgatgaagcatttacaacctctaaaactaaaagaaagggccgacacaggggctccgaggaagatcccctactctcacctgttgagacctggaagggcggaatcgataacccagcaattacatctgatcaggagcttgacgacaagaagatgaagaagaagacccataaggtaaaggaagacaaaaagaaaaagaagactaagaattttaatccacctactaggcgaaattgggagtccaactatttcggcatgcctttgcaggacttggtgacagccgagaaacccattcctctgtttgtggaaaaatgtgtagaatttattgaggacactgggctatgtacggaagggctgtaccgggtgagtgggaataagacagaccaggataatattcagaaacagtttgatcaggaccataatatcaacctagtgagtatggaggtgactgtcaatgccgttgcaggcgccctgaaggcctttttcgccgacctgcccgacccattgatcccgtactctcttcacccggagctcctggaggcagccaagattcccgacaaaacggaacgactccacgccctgaaggaaatagtgaaaaaattccacccagtcaactacgatgtctttagatacgtgattacacatttgaatcgcgtttctcagcaacacaagattaacctgatgactgccgacaacctgtcaatctgtttttggcctacacttatgcgccctgactttgagaaccgcgagtttctgtccaccactaaaatccatcagagcgttgtcgaaacattcatccagcaatgccagttttttttttacaatggcgaaatcgtggagactactaatatcgtggcccctcccccaccatctaaccccggtcaattggtggagccaatggtgccccttcagctgcccccgcccttgcagcctcaattaattcagccccagcttcagacagatccacttggcatcatttag

SEQ ID NO: 203349 - DNA, 2316 bp, synthetic construct
  misc_feature 1..2316: note = Description of Artificial Sequence: Synthetic coding sequence
  source 1..2316: mol_type = other DNA
atgagcggccggagcgtgcggctgcggagcgtgcccatccagagcctctcggagctggaacgagcacgcttacaggaggtggctttctaccagctgcagcaagattgcgatctctcgtgtcagattacaattccgaaagacgggcagaagcgaaaaaagtctctgagaaagaagttggatagtctgggaaaggagaagaacaaagacaaagagttcattccacaggcattcggaatgcctttgtcacaagtgattgcaaacgaccgtgcctataaattaaagcaggatcttcagcgcgatgaacaaaaagacgcttcagacttcgtggcctctctgctcccttttggcaacaagaggcaaaataaggagctgtcctcctcaaactcaagcctttcaagtacgtctgaaacaccaaacgagtctactagccctaataccccagagcccgcgcctagggctcgacgacggggcgccatgtctgtcgactccataacggacctggacgacaatcagtcccgtttgctggaggctttgcagctaagtctgccagctgaagcccagtctaagaaggaaaaggcaagggataaaaagctgtccctgaaccccatctaccgtcaggtaccacgcttggtggatagttgctgccaacatctcgaaaaacatggactgcagactgtcggcatctttcgggtgggctcgtcgaagaaacgggtgagacagttgcgggaggagtttgatcgaggaattgacgtgtcactcgaggaggagcatagcgtgcacgatgtggctgcactgctgaaggaattcctaagggatatgccggatccgctcctcacccgagaactgtatacagcttttattaacacactcttactggagcctgaggaacagttgggcacgctgcagctactgatctaccttctgccgccctgcaattgcgataccctccaccgcctcctgcaattcctatcaatcgttgcgagacatgcggacgataacatctccaaagatgggcaggaagtgactgggaacaagatgacttctctgaacctggctacaatctttgggcctaatctcttacataaacagaaatctagcgataaagagttttcggtacaaagctcagccagggctgaggagagtaccgctatcattgcggtggtccaaaaaatgatcgagaactatgaagcgttgttcatggtgccccccgatctgcaaaacgaagtgctgataagcctgttagaaacagatccagatgtagtggactatctgctgcgcagaaaagccagccaatcctccagtcccgatatgctacagagtgaagtgagcttcagtgttggagggcgtcactcctccactgacagcaataaagcaagcagcggagacatctccccgtacgacaataacagccctgtcctgagcgaaagatcgctgttagccatgcaggaagatgccgctcccggcggcagcgagaaactctaccgggtcccgggccagttcatgcttgttggacacctctcatccagcaagtctagggagtctagtccagggccgagactgggcaaagacctttcagaagagcccttcgacatttggggtacttggcattccactttgaaaagtggatctaaagatccaggtatgaccgggtcctcaggagacatcttcgagtcatcctcattacgcgccgggccgtgttccttaagtcaggggaacttgtcccctaattggccccgttggcaggggtccccagctgagctcgatagcgacacccagggggccagacggacacaggcggctgccccagctacagaaggcagagcacaccccgccgtgtcacgagcctgctccacaccacacgtgcaggtcgccggtaaagccgagcgtcccacagcacggagcgagcagtatctgactctttccggggcccatgatctgtccgaaagcgaactggatgtcgctgggcttcagagccgagccacacctcagtgtcagaggcctcatgggagcggcagagacgataagcgtcctcccccgccttatccaggcccggggaagcccgctgcagccgccgcctggatccagggccccccggaaggcgtagaaacgcccaccgatcagggggggcaggctgctgagcgcgaacagcaggtcacacagaagaaactgagttccgcaaattccttgcccgccggcgagcaggattcaccccgactcggggacgccgggtggcttgattggcagcgtgagcggtggcagatttgggagttgctttctacggacaacccagacgctttgcctgagacattggtctag

SEQ ID NO: 203350 - DNA, 2925 bp, synthetic construct
  misc_feature 1..2925: note = Description of Artificial Sequence: Synthetic coding sequence
  source 1..2925: mol_type = other DNA
atgagcgcccagagcctgctgcacagcgtgttcagctgcagcagccctgctagttcatcagccgcttccgccaaaggcttttcaaaacgcaagctacgccaaactcgttctcttgaccccgccctaatcggtggctgtgggtccgatgaagccggtgcagagggatctgcaagaggtgccacagcaggcagactttactctccgtcgttgccagcagagtccctggggcccaggctcgctagcagtagtcggggcccgccgcctcgtgctactcgcctcccccctcccgggcccctgtgcagttccttctcaacccctagcacaccgcaggagaagtccccgtctggctcctttcactttgactatgaggtgcccctgggtaggggagggctgaaaaagtccatggcatgggacctgccttctgtgctggctggccctgcctcttcaagaagcgcctccagtatactctgtagctcgggcggcggccccaacggtatattcgcttcaccgcgcaggtggctgcagcagcgaaagtttcaatcccccccagatagcaggggccatccatacgtcgtgtggaagtccgagggcgatttcacatggaatagcatgagtggcagaagtgtgcgtctgagatccgtacccatccagagcctgagcgagctcgaaagggcacgattgcaagaagtggccttttaccaacttcagcaggattgtgatctgtcatgtcagattactataccaaaagacgggcagaaacgcaagaaatccctgcgcaagaagctagattccctcggaaaagagaaaaataaagacaaagaattcattccgcaggcattcggcatgcccctgagtcaagtaatagccaatgaccgggcttacaaactgaagcaagacctgcagagggatgaacaaaaggacgccagcgatttcgtcgcctcactcctcccctttggtaacaagagacagaacaaggaactgtcctcttccaatagcagtctttcttccacatccgaaactccgaacgaatccacaagcccaaataccccagagcccgcccctcgggcacgccgccgcggagccatgtctgtggactccataaccgacctcgatgataaccagagcagactgttggaggcgctgcaactgagcctgccggccgaagcacagtccaagaaagagaaagcccgggataaaaagctcagcctgaatcctatctacagacaggtgccaaggcttgtcgactcctgctgtcaacacttggaaaagcatggactccagacagtaggaatctttcgcgtgggttcatcaaaaaagagggttcgccagctgcgggaagagttcgatcggggtatcgatgtgtccctggaggaggaacactcagtacacgacgtagctgctctccttaaagagttcctcagagatatgccggacccactgctgaccagagagctttacacagccttcatcaatactctccttttagaacccgaagaacaactcgggacactgcagctgctcatttacctactgcccccgtgcaactgtgacactctgcatcgcctcttgcagtttttgtctatcgtggccagacacgcagacgataacatctctaaagatgggcaggaagtgacagggaacaagatgacttcattgaatctggccaccatcttcggccctaatctcctgcataaacagaaaagctctgacaaggaattctccgtccagtcctccgctagagccgaggaaagcactgctatcatcgctgtagtacagaaaatgatagagaactacgaggctctcttcatggtccctcccgacctccagaacgaggtgctgattagtttgcttgagacagatcccgacgtggtagactacctgctgaggaggaaggcatcacagtcgagcagtccagacatgttacagtccgaggtatccttcagcgttgggggacgccatagttcgactgactccaataaggcatcaagcggcgacatctcaccttatgataacaactccccagtactctcagaaagatctctccttgcgatgcaggaagacgccgcccctggcggttcagagaagttgtaccgggtgcccggacagttcatgttagttggtcacctttcttcctccaagtccagggaatcctcacccgggcctagactcggtaaagatctgtccgaagagccttttgatatctgggggacctggcattctaccctgaaatctggaagtaaagaccctggtatgactggatctagcggcgatatatttgagtcatcgtctttacgcgctggaccttgcagcttgtcgcaaggcaacctctcacccaattggcctaggtggcaggggagccccgctgaacttgattcagacacacaaggcgccaggcgtactcaggctgcagcgcccgcaacagagggccgagcccacccagcagtctcaagggcttgctccacgccccacgtccaggtggcggggaaagcggagagaccgacggcaaggtctgagcagtacctcacgttgtctggagctcacgacttgtcagaatctgagctcgacgtcgctggattgcagtctcgcgccacaccgcagtgccagcgcccgcacggctctggccgcgacgacaagcgccccccgcctccttatcccggacccgggaagcctgctgccgctgctgcttggattcagggccctcctgagggagttgaaactcctaccgaccagggagggcaggctgccgagcgcgagcagcaggtgacacagaagaaactgagcagcgctaactccttgcctgcgggcgagcaggacagtcccagacttggggacgctgggtggctggattggcagcgggaacggtggcagatatgggaactgctctctacagataacccagacgccttgcccgagacgcttgtgtag

SEQ ID NO: 203351 - DNA, 1806 bp, synthetic construct
  misc_feature 1..1806: note = Description of Artificial Sequence: Synthetic coding sequence
  source 1..1806: mol_type = other DNA
ctggagctgtacgacctgcagatcctgggcaccaagccccccatgaacagcgatacgcacagaaacttcgaccctacagcaacactgcgtaatcagggggattttacatggaatagcatgtcgggtagatctgtgagactcaggtcagtgccaattcagtccctgtccgagctcgagcgagcaagactacaggaggtcgcgttctatcagctccagcaggactgcgacttatcgtgtcagataaccatccctaaggacggtcagaaacgaaaaaagtccctacgtaaaaagcttgacagtctgggcaaagagaaaaacaaggacaaggaattcatccctcaggctttcgggatgcccctgtcccaggtgatcgcgaatgaccgcgcctataagttgaaacaggatcttcagcgcgacgagcagaaggatgcttctgacttcgtggcatcactgttaccctttgggaacaagcggcagaacaaagagttatctagtagtaatagctctctgtctagcacttccgagacacccaatgagtcaacctcccccaatacacctgaaccagcacccagagcaagacggcggggggccatgtctgtggacagcattacagatctggacgacaaccaatcacgcctgttggaggccttgcagctgagcctgccggccgaagcccagtctaaaaaggagaaagcacgggacaagaaactatccctcaatccgatttatcgccaggtgcctcgcttggttgacagctgttgtcagcatctcgagaagcatgggctgcagacagtcggtatatttagggtgggtagttccaaaaaaagggtgcgccagctgagagaggagtttgatcgcggaatcgatgtgtccctcgaggaggagcatagtgtccacgacgtggccgccctgttaaaagagttcttgagagatatgccagaccctctccttacgagagagctctatacagctttcatcaacactctcttgctggagcctgaggaacagttgggcacactccaactcctgatatacctcctacctccttgcaattgtgacacactccacaggctgctgcaattcctcagcattgttgcacgacacgcggatgataacatctctaaagacggccaggaagtcaccggtaacaaaatgacatcgctcaacctagcgacaatattcggccccaacctgctgcacaagcagaagtcctccgacaaggaattctccgttcagtcttcggctagggccgaggaaagcacggccattattgctgtcgttcaaaagatgattgagaactatgaggccctctttatggtgccccccgacttgcaaaatgaagtgctcataagcctgctggagacagacccagatgtggtggattacctattgcgacggaaggcgagccagagcagctctcccgatatgctccagagcgaggtcagtttctccgtgggaggccgtcacagctctacagacagtaacaaagccagctccggcgatatctccccttacgacaacaacagtcccgtgttgtctgagcggagcctcctcgccatgcaggaggatgctgctcctggtgggtctgagaagttgtatagagtgccaggccagttcatgctagtggggcacttaagcagcagcaaatctcgggaatcaagccctggcccgcggttggggaaaggcaactggtccttggcaagccgacggtggcctaaacaagcaaccctcctcctgctccacgtggcttggtgcggcgctctcagaacgttttcgagcagtctcccatacctcatgttcctctag

SEQ ID NO: 203352 - DNA, 2298 bp, synthetic construct
  misc_feature 1..2298: note = Description of Artificial Sequence: Synthetic coding sequence
  source 1..2298: mol_type = other DNA
atgagcgcccagagcctgctgcacagcgtgttcagctgcagcagccctgcctcatcctcagctgctagtgccaagggattctctaaaaggaagctccgccaaaccagatcccttgacccagccctcataggcggctgcggctccgatgaggccggggctgaaggatccgcccgaggcgcaacagccggacgcctttacagtcctagtctgcctgccgagagtctggggccacgcctggcatcttccagccgcgggcctcccccccgtgccaccagacttcccccccctggccccctttgctcgtccttcagcaccccttcgactccccaggagaaatccccttctggcagctttcattttgactatgaagtccctctgggaagaggcgggctcaaaaagtccatggcatgggacctgccatcagtcctggcgggcccagccagtagccgttctgcttcaagcatcctgtgttcatccggtggaggtccgaacggcattttcgcctcaccgcggaggtggctgcagcagcgcaagtttcagagcccgccagactcccgcgggcacccttatgtggtgtggaaaagcgaaggggacttcacatggaactctatgagcggcagatcagttaggctcagatccgtgcccatccagtccttgagcgaactggagagagcgaggctgcaggaggtcgctttttaccagctccaacaggactgcgacctatcttgccagattacaattccaaaggacgggcagaaaagaaaaaagagtctcagaaagaagctggactctttaggaaaggagaagaataaagataaagaattcattccccaggcatttggcatgcctctgtcgcaagtgatcgcgaatgaccgggcctacaagctcaaacaggaccttcagcgggatgagcagaaggacgccagcgactttgtagcgagtctcctgccatttgggaacaaacgccagaacaaagaactgagctcatcaaactcctctctgtcctctacctccgaaaccccgaatgagtcgacttcccccaatactccggagccagcacctcgcgcgaggcgcagaggcgctatgagcgtggatagtatcactgatctggacgacaaccagagccggctcctcgaggccttacaattatctctccccgctgaagcccagtcgaaaaaagaaaaggctagagataaaaagctctcattgaatcctatttatagacaagtgccccgtttagttgacagttgttgccaacacctcgagaagcacgggctgcagactgtgggaattttccgggtgggatcttcaaagaaacgggtgaggcaactgcgcgaagaattcgacaggggcattgatgtatcactggaagaagagcattccgtgcatgatgtcgccgccctgctgaaagaatttctcagggatatgccggatccattattgacgagagaactatacaccgcattcatcaatacacttctcctcgagcccgaggaacagcttgggacacttcagctgctgatttacctgttgcctccatgcaactgtgacactctgcaccgtctcctgcagttcctgagtattgtcgccaggcacgccgatgataacatctccaaggatggacaggaggtaacagggaacaagatgacctccctcaaccttgccactatctttggcccgaacctgttgcacaagcagaagtccagcgacaaagagttctctgtgcagtccagcgccagagccgaagaatccaccgccatcatagctgtggtgcagaagatgatagagaattacgaggcccttttcatggtccctcccgacttacaaaatgaagtgctcatttcacttctggagacagaccccgacgtggtggattatcttcttagacggaaagcttcccaatcttccagccctgacatgttgcagtccgaagtatcattctctgtggggggcagacactcatcaactgatagcaacaaggcttctagcggtgatatctcaccttacgataataacagtcctgtgttgtcagagcggagtttacttgcaatgcaggaggatgcagcacctggtggcagtgagaagctctaccgggtgccaggacaattcatgttagtgggacacctgtcatcaagcaagtctcgtgaaagctctccgggcccaaggcttggaaagggcaattggagtcttgcaagtagacgctggccgaagcaggccaccctgctgctgctgcatgttgcctggtgcggagcgttgcgcaccttctcctcatcattgccctatctgatgttcttatag

SEQ ID NO: 203353 - DNA, 2073 bp, synthetic construct
  misc_feature 1..2073: note = Description of Artificial Sequence: Synthetic coding sequence
  source 1..2073: mol_type = other DNA
atgagcgcccagagcctgctgcacagcgtgttcagctgcagcagccctgcctcctcctccgccgccagcgccaaaggattctcaaagcgtaagctgcggcagacacgctccctggaccctgctcttatcggcgggtgtggctcggatgaagctggcgcagagggttcagcccgaggggctactgctggtagactatactctccgtcactgcccgcggaaagcctggggccaagacttgcttcctcttcaagaggtcccccccccagagccactcgactgccacccccgggaccgctatgctcctcattctccactccttccacaccccaagaaaagtctcctagtggatcctttcatttcgattacgaggtccccttaggaaggggaggcctgaagaagtctatggcgtgggatcttccatctgtgttagccggaccagcgagctctaggagcgccagctccatcctatgcagctccggcggaggccccaatggtattttcgcatctccccggcgctggctgcagcagaggaagtttcaatcccctcccgacagcagagggcatccttatgttgtttggaagagtgagctcgaattgtatgacctgcagatcttaggcactaagccacctatgaacagcgatactcacagaaattttgatccgactgcgacactccggaatcagggagatttcacttggaattcaatgtccggcaggtctgtcagacttcggagcgtcccaattcaaagtctcagcgagctggaaagggcccgcctccaggaagtggccttctatcaattgcagcaagactgtgacctgagttgccagatcacaatccctaaagacggtcagaaaagaaagaagtccttgcgcaaaaagctggactccctgggaaaggaaaaaaacaaagataaggagttcattccacaggctttcgggatgcctcttagccaggtcattgcgaatgatcgtgcctacaagctgaagcaggatctgcaaagggatgagcaaaaagacgcaagtgacttcgttgcgagcctcctgccatttggcaataagaggcaaaataaggagttaagcagcagtaactctagcctcagctcaaccagcgagaccccaaacgagtccaccagccctaatacacccgaacctgctcctagggcgcggaggagaggcgcgatgagtgtggattcaattaccgacctggacgacaaccagtcccggctgttggaggctttacaactttcgctccccgccgaggcccagtcaaaaaaggaaaaagcaagggataaaaaactgtctttgaaccctatctaccgccaggtgccacgactggttgactcgtgctgtcagcacttagagaagcatgggttgcagacagtaggaattttccgtgttggttcaagcaagaagcgggtcagacagcttagggaggagtttgatcgagggattgatgtgtctttggaggaagaacactctgtccacgacgtggctgcactcctgaaagaatttcttcgggatatgcctgaccccctgctgactagagaactctacacagccttcatcaatacgctgctcctggagcccgaagaacagcttggcacgctgcagttgctgatctatctgttgcctccatgcaattgcgacaccttgcatcggctgttgcaatttctctctatcgttgcccggcatgcagacgacaatatttcaaaagatggccaggaagttactggcaacaagatgacaagcctgaatctggccaccatcttcgggcccaacttgctgcacaaacaaaagtcaagtgataaggagttctctgtccagtccagtgccagagcagaggaaagtaccgccatcatagcagtagttcagaaaatgatcgaaaactacgaggccctgttcatggtcccacctgacctgcagaacgaggtccttatttcgcttcttgagactgatcctgatgttgttgactacttgcttcgccgcaaggcaagtcaatcttctacctcctccgtactccctgccgccgttcaggcctgtccccagtacccggccagtatgttcactccgtag

SEQ ID NO: 203354 - DNA, 2316 bp, synthetic construct
  misc_feature 1..2316: note = Description of Artificial Sequence: Synthetic coding sequence
  source 1..2316: mol_type = other DNA
atgagcggccggagcgtgcggctgcggagcgtgcccatccagagcctgtccgagttggagcgagcccgactgcaggaagttgccttctaccagttacaacaagattgcgatctgtcatgtcagatcaccatccccaaagacgggcagaaacgaaaaaagtcactgagaaaaaaactcgactctctaggtaaagagaagaacaaggacaaggagttcattccccaggcattcggcatgcccctcagtcaggttattgccaatgatagagcatataagctcaagcaagacttgcagcgggacgagcagaaagatgcatccgattttgtggcgagcttgttgcctttcggaaacaaacgccagaacaaagaacttagttcttccaactcctctctgagctccacgagcgagacccccaatgaatctactagccccaacactcctgagcccgctcccagggcccgcagacgtggggcaatgagtgttgatagcattactgacctcgatgacaatcagtcgcgactgctggaggccctgcaactgagcctaccagcagaggcccagagcaagaaggagaaggctcgtgacaagaagctcagcttgaatccgatttatcgacaggtgccccgcctggtggattcctgttgccagcaccttgagaagcacggcctacagacggtcggcatctttagagtcgggtcgagtaagaaaagagtcagacaactccgggaggagtttgatcggggaattgatgtcagtctggaagaggagcactccgttcacgatgttgctgccttgctcaaagagttcctccgcgacatgccagacccactcctgacgagagaactatacacagccttcatcaacaccttactgttagaacctgaagagcagctgggcactctgcaactgctgatctatctgcttccaccctgcaactgtgacactctgcaccggctcctacagttcctttccatcgttgccaggcacgctgatgataatatcagtaaagacggacaggaggtgaccggcaataaaatgacttcactgaaccttgcaaccatcttcggcccaaatcttctgcataaacagaagtcctctgacaaggagttttccgttcagagctcagcccgcgcggaagaatctactgccataatagcagtggtgcagaagatgattgagaactatgaagctttattcatggtccctcctgacctgcagaacgaggtcttgatctctctgctggagactgaccccgatgtggttgactatctacttaggagaaaagcgtcgcagtccagcagcccagatatgctccagtcagaagtcagttttagcgtcggcggacgacactcctccacagattcaaataaagcttccagtggagacataagtccctacgataataactcaccagtcctctcagaaagatccttgcttgcgatgcaggaagatgccgctcccggcggaagcgagaaactgtaccgggtgccagggcagtttatgctagtgggccacctgtctagctcaaaatcccgagagtcctcacccggacccagactggggaaagacctctcggaagaacctttcgacatctggggcacatggcacagcaccctgaaatctgggagcaaagatcccggcatgaccggtagctctggtgatatctttgagtcaagctcgctccgagccggcccctgctctctgtctcaggggaacctctccccaaattggcctagatggcaggggtcccccgccgagttagactcagatacgcaaggcgcgcgacgcacacaggccgccgcaccggccaccgaggggcgagcccatcccgcggtatcgcgagcatgttctacgccacacgtgcaggtagccggaaaagctgaaagacccactgcgagaagcgagcaatatttgacattgagtggggctcacgatttgtccgagagcgagttagacgtggcagggctgcagtcgcgcgcaacaccccagtgccaacgaccgcatggatccggaagagatgataaaaggcccccacccccctatcctggccctgggaagcccgctgccgcagccgcctggatacaaggtcctcctgaaggggtggaaacaccgaccgatcaggggggacaggccgcggaacgggagcagcaagtcacccagaagaaactgtcaagcgctaactccctgcctgctggggagcaggattctccgcgcttgggtgacgccggttggcttgactggcagcgcgaaaggtggcagatatgggagttgctgtcaaccgacaatcccgacgctttacccgaaactctcgtatag

SEQ ID NO: 203355 - DNA, 1404 bp, synthetic construct
  misc_feature 1..1404: note = Description of Artificial Sequence: Synthetic coding sequence
  source 1..1404: mol_type = other DNA
atgtaccggatcttcggcgacttcacctggaacagcatgagcggcagatccgtacgccttcgctccgtcccgatccagagcttgtcagagctggagagagcccggctccaggaggtggcattctaccagctgcagcaggactgtgacctgagctgccagatcaccatacctaaggatggtcaaaagaggaagaaatcactgcgcaagaagctagactctctcggcaaggaaaaaaacaaagacaaggaattcatcccacaggcttttggtatgccactgagtcaagtaatcgcgaacgatagagcctataaacttaagcaggacctgcagcgagacgaacagaaagatgcgagtgactttgtggcaagcttactcccctttggaaacaagaggcagaataaagagctttcatcttccaatagctccctcagttctacgtctgagaccccaaacgaaagcacctctcctaatacgccagagccagctccccgcgcccggcgccgcggggctatgtctgtcgacagtatcactgacttggacgacaatcaatccaggcttcttgaagccttgcagctcagtttgcccgccgaagctcagtccaagaaggaaaaagctcgcgacaagaaactgagcctgaacccaatatatcggcaggtgccccggcttgtggactcctgctgtcagcatttagagaagcatggactgcagacggtcggtatttttcgcgtcgggtcaagcaagaaaagggtgaggcaacttagagaggagtttgaccgggggatagatgtgagtcttgaggaggagcatagcgtgcatgatgttgccgcccttctcaaggagttcctgcgagatatgcctgatcccctgctgacaagagaattgtacaccgcatttataaatacactgttgttggaacctgaagaacagctcggcaccttgcagctgctaatctacctgcttccaccttgtaattgtgataccctgcataggctgctgcagtttttgagtatcgtggcgagacacgccgatgataatattagtaaggatggccaagaagtcaccggcaataagatgacaagtctgaacttggcaactatattcggccccaacttgttacacaaacagaagtcgtcggacaaggagttcagcgtgcagtcttcagcgcgggctgaagaaagcactgccatcatcgccgtcgtgcagaaaatgatcgagaactatgaggctttgtttatggtgccccctgacctccagaatgaggtgctgatatcacttcttgaaacagatccagatgtggtagactaccttctaaggagaaaggcgagccagtccagcactagttcagtcctgcctgctgcagtacaggcttgtccacagtaccccgcttccatgttcaccccatag

SEQ ID NO: 203356 - DNA, 1815 bp, synthetic construct
  misc_feature 1..1815: note = Description of Artificial Sequence: Synthetic coding sequence
  source 1..1815: mol_type = other DNA
atgaagcggctgcacatcttcggccccaagatccacagcagcggcggcctgtggcaacagaaaggtgactttacctggaactccatgtctggccggtcggtacggctgagatcagttcctatccaatccctgagtgagctggaacgagcccgattacaggaagtggccttttaccaactgcagcaagactgcgatctctcctgtcagattaccatccctaaagatggccaaaaacggaagaagagcttgcgcaaaaaactggactctctgggaaaggaaaaaaacaaggataaggaatttattcctcaggctttcgggatgccactctcacaggttatagccaatgacagagcttacaagctgaaacaagatctccaacgtgatgagcagaaggacgcctctgacttcgtagcctccttgctccctttcggcaacaaacggcagaacaaagaactgtcctcttccaatagcagtctctcctccacgtctgaaactcccaatgagtcaaccagccccaatactccagagcccgccccccgggccagacgcaggggagctatgtctgtggatagtatcaccgacctggatgataatcagtctaggcttctggaggcactgcaactctcgctgcccgcagaggcacagtctaagaaagagaaagcccgggataaaaagctcagtcttaacccaatctaccggcaggtgccacggttggttgatagttgctgccaacacctggagaagcacggcctgcaaacagtgggaatctttagggtggggtcatccaagaagagagtgaggcagttacgagaggaattcgaccgcgggatcgatgtgtccctggaagaagagcattccgtccacgatgtggcagcgctccttaaggagtttctgcgcgatatgccagatcccctgctgacacgtgaactctacaccgcttttatcaatacgcttctactggagcctgaggaacagctcgggactctgcaactactgatttacctcttgcccccttgcaactgtgatactcttcaccgcctgctccagttcttgtcaatcgtggcacgacacgctgacgataacatcagcaaggatggccaagaagtgacggggaacaagatgacatcattaaacctggctactatattcgggcccaacttgttacacaagcaaaaatcctctgacaaggaattttctgtgcagtcaagtgccagggccgaagagagtaccgctatcatcgccgtcgtccagaagatgattgagaattacgaagctctcttcatggtgcctcccgacctccagaacgaagtgctcatatctttgctggaaaccgatcccgacgtggtggactacttactcagacgaaaagctagccagtcaagctcccctgacatgttgcagtctgaagtctcattctccgtcggaggccgccattcctcaacagactctaataaggctagttcgggcgatatcagtccatacgacaataacagcccagtgctgagtgaaaggtcgctcctggcaatgcaggaagacgccgcccctggtggtagtgagaagctatatcgggtgccaggacagttcatgctcgtgggccatctatcctcatcaaagtcccgggagtcgagtccgggcccccgcttaggtaaggacctgtctgaagaaccattcgacatctggggcacttggcattccactctgaaatccggatcaaaggatccgggtatgaccggtacaacgcctctcttaaatattagctctcaggaggatcaccggcagaaggaccttagacttattttcaagatatatccatag

SEQ ID NO: 203357 - DNA, 918 bp, synthetic construct
  misc_feature 1..918: note = Description of Artificial Sequence: Synthetic coding sequence
  source 1..918: mol_type = other DNA
atggccggccaggaccccgccctgagcaccagccaccccttctacgatgtggcgcgccatggcatccttcaggtggccggggacgatcgatttggtcggcgggttgtcacattctcttgttgccgcatgcccccatctcatgagctcgatcaccaacggctgctcgaatatctgaagtatacactcgaccagtatgtcgaaaacgactacaccattgtatacttccactacggtctcaactcaagaaataagccctcactcgggtggctacagtcagcctataaggagttcgatcgaaaatacaagaaaaacctaaaagcgctgtatgttgtccatccgacctcatttatcaaggtcttgtggaatattttaaaacccctgatttctcataagttcgggaagaaagtgatatactttaattacctgagcgagttgcacgagcacctgaaatacgaccaattggtcatccctccagaagtgctgcggtacgacgagaagctgcagtcgctacatgaaggcagaaccccccctcctacaaagacacctccaccccgcccacccttgcccacccagcaatttggagtttctctgcagtacttgaaagataagaaccaaggggaactcataccacccgtgctcaggtttactgtcacatatctgagggaaaaaggcctacggacagagggcttgtttcggcgaagcgcttctgttcaaaccgtgcgtgagattcagcggctgtataaccaggggaagccagtgaacttcgacgattacggggacatccacataccagctgtcatcctgaaaaccttcctgagagagctgccccagccactactgactttccaagcgtatgaacaaatcctcggtataacatgcgtgcccggagagcatctccagcagaatgagcagttatag

SEQ ID NO: 203358 - DNA, 1302 bp, synthetic construct
  misc_feature 1..1302: note = Description of Artificial Sequence: Synthetic coding sequence
  source 1..1302: mol_type = other DNA
atggccggccaggaccccgccctgagcaccagccaccccttctacgatgtggctaggcacggcattttacaggtggccggggatgatagatttgggcggagagtagtaaccttttcctgttgtagaatgccaccttcacatgaactggaccaccagaggctgttggaataccttaagtatacccttgatcagtatgttgagaacgactatactatcgtctactttcattacggacttaactcgaggaacaagcctagcctgggctggttgcagagcgcatacaaagaattcgatcggaagtacaaaaagaatcttaaagccttatacgtggtgcacccgacttccttcattaaagtcctgtggaatatcctaaagcccttaatttcacataagttcggcaagaaagtgatatacttcaactatttaagcgagctccacgagcacctgaaatacgatcaactagttattccccctgaagtactgcgatatgatgagaagctgcagagtctacacgaaggtcgcacccctccccccacgaagaccccccccccccgtccccccctgcccacccaacagttcggcgtgtctcttcagtacctgaaagacaaaaaccagggtgaactcatccctccagttctccgctttacggtcacgtacctgcgcgaaaagggcctgcggaccgaagggctgtttcgccgctcagcttcagttcagaccgtacgggaaattcaaagactatataatcaagggaagccagtcaacttcgatgactatggagacattcatattccggccgtgattctaaagacctttcttcgtgaattgccccaaccattattgaccttccaggcctatgagcagatactgggcatcacctgcgtggaatcttctctgcgagtaacggggtgtcggcagatcctgaggtcattgccagaacacaactatgtggttctgcgctacctcatgggctttctgcacgctgtttcaagggaaagcatctttaataaaatgaactccagtaatctggcttgcgtatttggtttaaaccttatatggcctagtcagggagtgtcctcactgtctgcacttgtgcctctcaacatgtttacggaactgctcatcgagtactacgagaaaatattctccactccggaagcacccggtgagcacggattggccccctgggagcagggatctagggcagctcccctacaggaggcagtccctaggactcaggccactggtttgaccaaacctactctaccaccttctccattaatggcagcccgccggaggctgtag

SEQ ID NO: 203359 - DNA, 1668 bp, synthetic construct
  misc_feature 1..1668: note = Description of Artificial Sequence: Synthetic coding sequence
  source 1..1668: mol_type = other DNA
atgagcagccccagcctgagcgacctgggcaagcgggagcccgccgcggccgccgacgagcgcggcactcagcagcgaagagcttgcgccaatgctacctggaacagcatccataatggggtgatcgctgtgttccagaggaagggactaccggaccaggaactcttctctctgaatgagggggtccgacagctactgaagacagagctgggcagttttttcacagaatacttacagaaccagctacttactaaagggatggttattcttcgggacaagatacgattttatgaggagctgcaacgggacaaggccgccgctgctgcggtcctgggggcagtccgcaagcggccaagtgtggtcccaatggcaggacaggacccagccctgtctacctcccaccccttctacgatgtggcccggcatggaattttgcaagtcgcgggtgatgatcgtttcggtcgacgggtggtgacatttagctgttgcagaatgcctccatcccatgaacttgaccaccagagattgctcgagtacctcaaatacacactggaccagtacgtagaaaacgactacactatcgtatatttccactatggcctgaacagccgcaacaagccatccctgggttggttgcagtccgcctacaaagaatttgatcggaagtacaagaagaatcttaaggcattgtatgtagtacaccctactagcttcatcaaggtgctctggaatatcctgaagccactcatctcccacaagttcggaaagaaagtcatatacttcaactacctgtccgagctgcacgaacaccttaagtatgatcagcttgttatccctcccgaggtgctgcgttacgacgaaaagctgcagtctctccatgagggccgaacaccccctcctacaaagactcccccccctcgaccacccctccccacgcagcaatttggggtatcactgcagtacctgaaagacaaaaatcaaggagaactgataccccccgtcttgcggtttaccgtgacctatctacgagaaaaggggttgaggactgagggcctgttcagacgttctgctagtgtccagacggtgcgcgagattcaacggctatacaatcagggcaagcccgtcaactttgatgactacggggacatacacatcccagccgtcattctcaagacttttctgagggaactgccacagcccttgctgaccttccaggcttatgagcaaatcctaggaatcacttgcgtcgaaagttcactgagggtcacagggtgcagacagatcttgaggagcctgcccgagcacaactacgttgtactgagataccttatgggtttccttcacgccgtgtcgcgagagtctatatttaacaagatgaacagcagcaatcttgcttgtgtcttcggtctcaaccttatctggccctcccagggagtctcatctctgtcagccctggttcccctgaatatgtttacagagctgctgatagagtattacgaaaagatttttagcacgcctgaagccccgggggagcacggattggccccatgggagcaggggtccagggctgcccctctccaggaggccgtgccccgtacccaggctacagggctcactaagccaactctacccccctcccccttaatggcagccagacggaggctgtag

SEQ ID NO: 203360 - DNA, 1395 bp, synthetic construct
  misc_feature 1..1395: note = Description of Artificial Sequence: Synthetic coding sequence
  source 1..1395: mol_type = other DNA
atggccggccaggaccccgccctgagcaccagccaccccttctacgacgtcgcacggcacggaatcctccaggtcgccggagatgatcgcttcggtcgccgcgtcgtcacattcagttgttgcagaatgcccccatctcacgaactggaccaccaacgcctgctcgagtacttgaaatataccctcgaccagtacgttgaaaacgattacacgatcgtgtacttccattacggccttaacagccgtaataagccatctctgggttggttgcagtctgcctacaaggagtttgatagaaaagatggcgacctgaccatgtggccccgcctggtgtcaaattccaaactaaagcgctcatctcacctcagcctgccaaagtactgggactaccgctataagaaaaatttgaaggccctctacgtcgtgcacccgacatctttcatcaaagtgctctggaacatcctgaaaccccttatctcccacaagtttggaaagaaagtgatctactttaactacttgtctgagttacacgaacatctgaaatatgaccagctcgtcattccgccggaagttttacgctacgatgagaaacttcagtcattgcatgaaggcagaactccacccccaacaaagaccccgccaccccggcctcctctccctactcagcagtttggagtctcattgcagtacctgaaggataagaaccagggagagctcattccacctgtgttgagatttactgtgacgtatctacgggagaaaggactgcgcaccgaaggactattcaggcgctcggcctctgtgcagacggttagggagatacaaaggctgtacaaccaggggaagccggtgaacttcgatgattatggcgacattcacattcccgcggtgatcctaaaaacctttttgagggaattgccacagcccctgctcacctttcaagcatacgagcagatcctgggcatcacatgcgtggaatcctccctccgggttactgggtgtaggcagatcctccgctcccttcccgagcataactacgtagtactgcgatatttaatgggcttcctgcacgccgtgagcagggagtcgatcttcaacaagatgaactcctctaatctggcttgcgtgtttggcctgaacttaatctggccaagtcaaggtgtttcgtccctgtccgccttagtgccattgaatatgttcacagaactactcatcgagtactacgaaaagatcttttctacccccgaggcccccggtgaacacggccttgccccctgggaacaaggttctagggccgcaccactccaagaggccgttcccaggacacaggctacgggcctcacaaagcctaccttaccaccttcccctttaatggctgccagaaggaggctgtag

SEQ ID NO: 203361 - DNA, 393 bp, synthetic construct
  misc_feature 1..393: note = Description of Artificial Sequence: Synthetic coding sequence
  source 1..393: mol_type = other DNA
atggccggccaggaccccgccctgagcaccagccaccccttctacgatgttgctcgccatggcatactgcaggttgccggagacgaccggtttggaaggagagtggttacattttcttgctgccgtatgccgccatctcacgagcttgatcaccaacggctcttagaatacttaaagtacacattggaccagtatgtcgaaaatgattatactattgtgtatttccattacggcctgaattcccgtaataaaccgtcgctgggatggcttcagtctgcatataaggaattcgaccgtaaagacggagacctcactatgtggcctcgcctggtttctaacagcaagttaaaaaggtcctctcacctgtctctaccgaaatactgggactactag

SEQ ID NO: 203362 - DNA, 348 bp, synthetic construct
  misc_feature 1..348: note = Description of Artificial Sequence: Synthetic coding sequence
  source 1..348: mol_type = other DNA
atggccggccaggaccccgccctgagcaccagccaccccttctacgacgtcgccagacacggaattctgcaagtggccggggacgatcgttttggtcggcgcgtagttacctttagctgttgccggatgccacccagccacgaacttgatcaccagagactgctcgagtacttgaaatatacccttgatcagtacgtggagaacgattatacaatcgtgtatttccactatggtttaaactcacgaaacaagccatccctgggctggcttcagtcagcctacaaggagttcgatcgaaagtacaagaaaaacctcaaagccctgtatgtagttcacccaactagctag

SEQ ID NO: 203363 - DNA, 1932 bp, synthetic construct
  misc_feature 1..1932: note = Description of Artificial Sequence: Synthetic coding sequence
  source 1..1932: mol_type = other DNA
atgcggaccctgcggcggctgaagttcatgagcagccccagcctgtctgatctaggcaagcgggagcctgccgctgctgccgatgaacggggcacccagcagcgtcgagcctgcgcaaacgccacctggaacagcatccataacggtgtcattgccgtgttccagcgcaaggggctaccagatcaggaattgttttctctcaacgagggagtgcgacaactcctgaaaactgagcttggcagcttcttcaccgaataccttcagaatcagctactgacaaagggcatggtgattctgagggacaaaatccgcttctatgaaggacaaaagttgctggattcattggccgagacgtgggactttttcttctcagatgtgctgcccatgcttcaagccatcttttatccagtccagggcaaggaacctagtgtgcgacaactggcactcttgcatttcagaaacgcgatcaccctatctgtgaaactcgaagacgctctagcaagggcacacgccagagtaccccctgccattgtccagatgttgctggtgctgcagggagttcacgaaagtaggggagttactgaagactatctgaggttagagacactcgtgcaaaaagtagtcagtccatacttgggcacatacggcctgcactcttccgagggccctttcactcatagttgtattttggagctgcaacgtgataaagccgcggccgcagctgtgctaggagctgtgagaaagcggccatctgtcgtgcctatggccgggcaagaccccgctctcagcacttctcacccattttacgatgttgcaagacacggaattctgcaggtggccggtgacgaccgattcgggaggagagtggtcaccttctcctgttgcaggatgcctcccagtcacgagttggaccaccagaggctgctggaatacaaaaaaaatttgaaagctctgtacgtggtacatcccacctctttcatcaaggtcctgtggaacatccttaaaccacttataagtcacaagttcgggaaaaaagttatctatttcaattacctgagcgaactgcacgaacatttaaagtacgatcagctggtcatcccacccgaggttcttaggtatgatgaaaaacttcagagcctgcacgaggggcgcacccctcctccaaccaagacaccccctcctaggccaccccttccaactcaacaatttggcgtgagcctgcagtatctaaaggacaagaatcagggcgagttaatcccccctgttctgaggtttacggtgacttatctcagagaaaaaggcctgcggactgagggactcttcagaagaagcgcatcagtacaaacagtgagagaaattcagagactgtataatcagggtaaacctgtgaatttcgatgactatggcgatatccatattcccgcagtgattctgaagaccttcctgcgcgaactccctcagccgctcctgacatttcaggcctatgagcagatcctgggcatcacctgtgtggagtctagtttgagggtcacagggtgccgccagatcctgcgttccctgcccgagcataactacgtcgtgctgagatatctgatgggcttcctgcacgcggttagccgggagtctatatttaataaaatgaacagtagcaatctggcttgcgtctttggcttgaacctaatatggccaagccagggagtgtccagcctcagcgccctggttccactaaatatgttcactgaattgttgattgagtattatgaaaagatattctcaacccctgaagcccctggagagcatgggttggcgccctgggaacagggcagcagagcggcaccattacaggaggcagtgcccaggacacaggccactggtctgaccaagcccaccctgccgccctcaccactcatggccgctcgccgacggttgtag

SEQ ID NO: 203364 - DNA, 2322 bp, synthetic construct
  misc_feature 1..2322: note = Description of Artificial Sequence: Synthetic coding sequence
  source 1..2322: mol_type = other DNA
cagacccagaccgagagcctgaccctgtgcagcggcgaggccgagcgccgggggaaagaggagtggcccgactcgcaccactacccgggccccacaccagcccctgaaagttctgacgggccacacaaagttaccgtccttgcaaccatgttaagttctcggtggtggccttcttcttggggaatcctcggcctcggaccgaggtccccaccacgggggagccagctttgtgccctgtatgcctttacttacaccggagccgatggccagcaagtgtcactcgcagagggcgatcggtttttgctgctcagaaagaccaactcagattggtggctcgccaggcgcctggaagctccgtcaacctctaggccaatctttgttcctgctgcgtacatgatcgaggaaagcatcccttctcaaagtccaaccacagtaatacctgggcaattattatggacaccgggccctaaattatttcatgggtcacttgaggagcttagtcaagctctgccctcacgagctcaggcttcttccgagcagcctcctcccctgcccagaaaaatgtgcagatccgtgtctactgataacctgagcccctccctcctaaagccgtttcaggagggcccgagcggcaggtctctctcacaagaggaccttccaagtgaggcgtcagccagcacggctggcccacagcccttgatgtcagaaccccctgtttattgtaacctcgtggatttacggaggtgccctagatctcctccgcctggccccgcatgcccgctcctacaaagactggatgcatgggagcaacatctggacccgaattctggtcgctgtttttatattaattctctgactggctgtaaatcttggaagccgcctaggcgttcccggagcgaaacaaaccctggctctatggagggaactcagaccctcaagaggaacaacgatgttttacagccgcaggcaaaagggttccggagtgatactggcactccagagccattagacccccagggatcactgtcgctttctcagcgcacgtcccagttggacccccccgctttgcaggcccccaggcctttgcctcaactcctggatgacccccacgaggttgaaaagagcggcctcctaaatatgaccaagatcgcacagggtgggagaaaactgagaaagaactggggccccagttgggttgtactcacgggcaactccctggtgttttaccgtgagccccctcccacagccccaagctcaggctggggacccgctggttcacggcccgagtcatccgtggacttgcgcggggccgctctggcccatggacgtcacctgtcaagtcgtcggaatgtgctccatattagaacaattcctggacacgagtttcttctgcagagtgaccatgagacagaattgcgtgcctggcaccgggcccttagaaccgttatagaacgcctggatcgggagaaccccctagaattgcggttgtcgggatctggaccggccgagctctccgccggtgaagatgaggaagaggagtcggaactggtgtctaagcctctgctgcggctgtccagtagaaggtcctccattcgagggcctgaaggcacagagcaaaacagagtgagaaacaagctgaaaaggctaatagcaaagagaccgcctctgcagagtttgcaagagcgagggctgctgagggaccaggtctttggctgtcaactggagtccctttgccagcgtgagggtgacactgtgccatcgtttctcagactttgcattgcagccgtggacaaaaggggactcgacgtggacggaatttaccgcgtctcgggaaacctggccgttgtgcagaagctccgcttccttgttgaccgggagcgtgccgtaacctctgacggcaggtacgtctttcctgaacagcctgggcaagaggggcggctggatctggattcaacggaatgggatgacatacatgttgtgacaggtgccctgaagttgtttctccgcgagctaccccaacctttggtccccccactgctgcttccccactttagggcagctcttgccctgtcacagatccaggaactgatcgggagtatgcccaaacccaaccacgacacgctcagatatttactcgaacatttatgtagagttatagctcacagcgacaagaataggatgactccacacaacctgggcattgtttttggacccacgctgttccgaccagaacaggaaacttccgacccagccgcccatgctttgtatcctggacagctggtgcagttgatgctgactaactttacgagcctctttccatag

SEQ ID NO: 203365 - DNA, 2253 bp, synthetic construct
  misc_feature 1..2253: note = Description of Artificial Sequence: Synthetic coding sequence
  source 1..2253: mol_type = other DNA
atgctgagcagccggtggtggcccagcagctggggcatcctgggcctgggacctaggtcaccgcctagaggaagccagctttgcgccctgtatgcatttacctataccggagccgacgggcaacaagtctctctcgcagagggggaccgattcttgctgctgcgcaagaccaactcagactggtggctggccagacgcttagaagctccctcgactagtcgcccaattttcgtgccagcagcgtatatgattgaagagtccattccgtcccagtctcctacaacagtaatcccaggccagctgctgtggactccaggacctaaactattccacggctcattggaggaactgagccaggccctcccaagtcgcgcccaggcctcaagcgagcaacccccacctttaccccggaaaatgtgtcggtcagtgtccaccgacaacctgtcaccttccctcctcaagccctttcaggagggcccgtcggggaggagtctgtcccaggaagatctcccttctgaggccagtgccagtacagctgggccccagcccttgatgtcagagccgccagtgtactgcaatctggtagacttacgccgatgcccaagatctccccctccagggcctgcgtgccctcttctccagagacttgacgcatgggagcagcacctggaccctaattcgggaagatgtttctatattaacagcctgacaggatgcaagagctggaaacccccccgacgctcgcggtctgagacgaatccaggcagtatggagggcacacagaccttaaagcgcaacaacgatgttctgcaaccccaggctaagggattccgcagtgataccggaaccccagagccgctggatccacagggctctttgtctctttcccagcgcaccagtcagctcgaccctcctgccttgcaggcccccaggccactaccccagctgttggatgaccctcacgaggtcgaaaaatcgggcttgttaaacatgacaaagatcgcgcagggtggccggaagttgcgaaagaattgggggcctagctgggtggtgttaacggggaatagcttggtattctatcgcgaacccccacctaccgctccgtctagcggctgggggcctgccggctcacggcctgagtcgagcgtggatctgcgtggcgccgcactggcgcatggacggcatttgtcctcccggagaaatgtcttacatatccggactataccagggcatgaattccttctgcaatctgaccacgaaacagagctgagagcctggcatagagctttgcgcaccgttatcgaacgcctggtgcggtgggttgaggccagaagggaagcccctacagggagagaccaagggtcaggcgaccgggagaatccactggaactgcggttgtcaggcagtgggccagccgagctcagcgctggagaggacgaggaagaagagagtgagctcgtatctaaaccgctcctacggcttagtagtaggaggtctagcatccggggcccggagggaaccgaacagaaccgggtccgcaataagttgaagcgacttattgcaaagagaccaccactgcagagcctgcaggagcggggccttctacgcgatcaagtatttggttgtcagctagagtcgctctgtcagcgcgagggcgatacagtgccatccttcttgagactttgcattgccgcagtcgataaacggggcctggacgttgatgggatatacagagtctcaggaaatctggcagtagtccagaagcttcgttttctcgtcgatagagaaagagcggtgacctccgacggtcgatatgttttcccagagcagcccgggcaggagggaagactggaccttgactcaactgagtgggatgatattcatgtagtgacaggggccttaaagctcttcctgagggaactccctcaacccctggtgcccccgctgctcctgccccactttcgtgccgcgctcgcgctgtctgaatccgagcagtgtctgtcccagatccaggagctgatcggatccatgcctaaacccaatcacgacactttacggtatttgcttgagcatctatgccgggttatcgcccactccgacaagaatcgcatgactccacataatttgggcatagtcttcggccccaccctcttcagacctgaacaggagacctcagacccggccgcccacgcactataccctgggcaactcgtgcagctgatgttgaccaatttcacttcattattcccatag

SEQ ID NO: 203366 - DNA, 2196 bp, synthetic construct
  misc_feature 1..2196: note = Description of Artificial Sequence: Synthetic coding sequence
  source 1..2196: mol_type = other DNA
atgctgagcagccggtggtggcccagcagctggggcatcctgggcctgggcccaaggtcccctccgcgggggtcacaactgtgcgccctttatgcgttcacttacaccggggctgatgggcagcaggtctccctggccgaaggagatcgttttctcctcctgaggaaaacaaactctgactggtggttagcgcgcagactggaggcgccttctacttccagaccaatattcgtgccagccgcgtacatgattgaagaatcaatcccttcccaatccccaaccaccgtgatccccggacagttactctggacccctggaccaaagttattccacggctcactcgaagaactgagtcaagctcttccctcacgggcccaggcttcctcagagcaacctccacctcttcccaggaaaatgtgtcgatcagtgtcaaccgataaccttagtccatccctgctgaagccttttcaggagggaccctcaggccgatccctgtcccaggaagatttgccatctgaggcttccgccagtactgccgggccccagccattgatgagcgaacctcccgtgtattgcaatcttgtggacctgcgacggtgcccacgctctccaccacccggcccggcatgccctctgctgcaacggctcgatgcctgggaacagcatcttgatccaaattctgggaggtgcttctacattaattccctgaccggctgcaagagctggaaaccaccgagacggtcccggtcagagacaaaccccggcagcatggaggggacccagacacttaaaagaaataacgacgtactccagccacaggccaaaggcttcagaagtgatactgggacacccgagcccctcgatcctcagggaagcctgtccctctctcagcgaacttctcagctagaccctccggctctgcaagctccccggccactgccacagctgctcgatgacccgcacgaggttgaaaaatccgggctattgaacatgaccaagatcgcacaaggaggccgaaagctccggaaaaattggggaccatcatgggtagtactgacaggtaattcgctagtgttctatagggagcccccacctacagccccctcctccgggtggggcccggctggctctagaccagagtcttccgtggaccttcgaggagcggccttagcccacggtcgccatttgtcatccagacgcaatgtgctgcatataagaaccattccgggtcacgaattcctgcttcagtccgatcacgaaacggaactgcgggcttggcacagagctctgcggaccgtcatcgagagactggatagggagaatccactggagcttcgactctccgggagtggacccgcagagctgtccgcaggcgaagacgaggaagaggagagtgagttggtttccaagcccctcctgcgtctgagctcgaggcgttcttccattcgcggacccgaaggaaccgaacagaatcgtgtgaggaataagctgaagagactgatagccaaacggccaccgcttcagagcttgcaggagcgtggattactccgcgaccaagtctttggttgtcagcttgaaagcctctgccaacgggagggggatacagtgccgagtttccttcgcctgtgcatcgccgctgtcgacaagagaggattagacgtggatgggatctatcgagttagtggtaatctcgcagtggtgcagaaactacggttcctcgtggaccgtgaaagagccgtgacaagcgacggccggtatgtgttccctgaacagcctggacaggagggacgcctcgatctggatagtacagagtgggacgacattcacgttgttaccggcgcccttaaactctttctccgtgaactcccccagccactggtcccacccctgttgctgccacatttcagagcggcccttgcgctctccgagagcgagcagtgcctctcccagatccaggaactcattggctcgatgcccaagcctaaccacgacacactgagataccttctggagcacctgtgtagggttatcgcgcactctgataaaaataggatgacaccccataatctcgggatcgtcttcggtccaacactgtttcggcctgagcaggagacaagcgaccccgcggcgcacgcgctatacccaggccagctggtgcagctgatgcttactaactttacatccctgttcccctag

SEQ ID NO: 203367 - DNA, 2466 bp, synthetic construct
  misc_feature 1..2466: note = Description of Artificial Sequence: Synthetic coding sequence
  source 1..2466: mol_type = other DNA
atgcggcggggcagcagcgacagctgcgccagcggcagccaggtggccggtacaacagtggccggacctgcacacccagagtcgctcactctgtgttctggagaagccgagcgcagaggaaaggaggagtggcctgattcccaccactatcctggtccgacacctgcccctgaaagcagcgatggcccgcacaaggtcacagtgctagcaactatgttatcgtctcgttggtggccttcctcctggggcattttgggactagggcctaggagcccacctcggggttctcaactgtgtgctctgtacgctttcacgtacacaggcgcagacggccaacaggtgagcttggctgagggcgaccgctttctgctgctgagaaagacaaatagcgattggtggcttgcccgcaggctcgaggcccctagcacaagcaggcctatattcgtgcctgccgcttacatgatagaggaatccataccctcgcagtctccgaccaccgttatcccggggcagctcctatggactccagggccaaagctctttcatggctcactagaggaactgtcacaagccctgccgagcagagcacaggccagttccgaacaacctccgcccttacctcgcaaaatgtgccggagcgtgagtaccgataacctctctccctcattgcttaaaccatttcaggaaggtccatctgggcggtccctcagccaggaagacttgccttcggaggcctcggctagcacagcaggtccacagcctttaatgtccgaaccgcctgtatactgtaacttggtggaccttcgccggtgcccaaggtctccaccacctgggcccgcatgcccactgcttcagcggcttgatgcatgggagcagcatctcgatcccaacagtggtcgatgtttctacataaacagcctgacaggttgcaaaagttggaaaccccccaggaggagccgatctgaaacaaacccgggctccatggaaggtacacagacgcttaagcgcaacaacgacgtgctgcagcctcaggcaaagggtttccgtagtgacacaggtacccctgagcccctagatccgcaggggagcttgagtctatcacagagaactagtcagctggaccctcctgcgcttcaggcgcctagaccactgccgcaactacttgacgacccacacgaggttgagaagtccggtttacttaacatgaccaaaatagcccagggaggtaggaaactccgcaagaactggggacctagctgggttgtcctgacagggaactctttagttttttatcgcgagccgccaccaacagcgccatcctcaggatggggccccgccgggtctcgccctgagagcagtgtcgatctgagaggcgccgccctggcacacggtcgacatctaagcagtcgccgaaacgtgttgcatattcggacgattcccggccacgagttccttctccaaagtgatcacgagacggaattacgagcctggcatcgcgccctgaggactgtcatagagcgcctggtgaggtgggtggaagccagacgcgaggctcccacaggccgggatcagggtagtggcgatcgagagaatcctctcgagctgagactctcaggttcagggccagctgagttgtctgccggggaggacgaggaagaagagagcgagctcgtgtccaagccgctgctgcgactgagcagtagacgttcgagcattaggggaccagaggggaccgagcagaatagagtgcggaataaactcaagcgccttatcgctaagaggccccccctgcagtcactgcaggaacgagggctgctccgcgatcaggttttcggctgtcagctggagagtctgtgccaaagggagggtgatactgtgccctcgtttctcagattgtgcatcgccgccgtggataagagaggcctagatgtggacggaatttaccgggtatcagggaacctggcggtggttcaaaaactgagatttctggttgatagggaaagggccgtaactagtgatggccggtacgtcttccccgagcagcccggccaagagggacgcctggatctggatagtaccgagtgggacgacatacacgtcgtaactggcgcactgaaactttttttacgggagctcccccagcccctagtgcccccacttcttctgccccacttccgggccgcactcgccttgtccgagtctgagcagtgtttgagccaaatccaggagctgattggcagcatgcccaagccaaatcacgataccctcagatatttactggagcacttgtgccgggtaattgcccacagcgataagaatagaatgaccccacataatctggggattgtatttgggcccaccctgtttaggcccgagcaggagacctcagatcctgcagcccacgccttatacccaggtcaattggtacagcttatgctgactaattttacttcactgttcccttag

SEQ ID NO: 203368 - DNA, 900 bp, synthetic construct
  misc_feature 1..900: note = Description of Artificial Sequence: Synthetic coding sequence
  source 1..900: mol_type = other DNA
atgaccaagatcgcccagggcggccggaagctgcggaagaactggggtccgtcctgggtcgtcttaacgggaaactccctcgtcttttatcgagaaccacctccgactgcacccagctccggttgggggcctgctgggtcccgacccgagtcgtccgtcgatctacggggggctgccttggcgcacggtcggcacttgtccagcagacgcaatgttctgcatatccggacaatccctggtcacgagtttctgctgcagtctgatcacgaaacagagttacgggcctggcatcgggccctccggacggtgatcgagcggctggatcgcgaaaaccccctcgaacttagactgagcgggtccggacctgccgagctgtcagccggagaagacgaggaagaggagagtgaattggtgtctaagcctctccttcggctgagctctcgccgcagcagtattcgaggacctgaaggaacagagcaaaaccgtgtgcgcaataaactcaagagactgattgctaaacggcccccactgcagagccttcaggaacggggcttacttcgcgaccaggtgttcggctgccagctggaatcactgtgccaaagagaaggggacactgtcccttctttcctgcgcctctgtattgcagcagtggacaagcgcggcctggatgtcgatgggatatatcgggtgtccgggaatctggccgtcgtgcaaaagttaagattcttggtggaccgtgagcgcgctgtcactagtgacggtcgatacgtctttccggagcagcccgggcaggcccttagtgaaagtgagcagtgcctcagccagattcaggagttaatcggcagtatgcctaagcccaaccacgatacgctgagatacctcctggaacacctatgctag

SEQ ID NO: 203369 - DNA, 1923 bp, synthetic construct
  misc_feature 1..1923: note = Description of Artificial Sequence: Synthetic coding sequence
  source 1..1923: mol_type = other DNA
atgctgagcagccggtggtggcccagcagctggggcatcctgggccttggccccaggtcacctccaaggggtagccagctttgtgcgctttacgcctttacctacacgggagctgacggtcagcaggtatcccttgccgaaggagatcgctttctgctcctaagaaagaccaacagtgattggtggctggctagacgcctggaggctccatcgacttcacgacccatctttgtgcccgccgcctacatgattgaggaatctatccctagtcagtctcccactacagtgataccgggtcagctattatggacccctggccctaagcttttccacggctcattagaggagctgagtcaggccctgccatctagggcccaagctagtagtgaacagcccccccccttacctaggaaaatgtgtcgctcagttagcacagataacctgagtccctcactactgaaacctttccaggagggcccctctggtcgctctttgagtcaggaggacctccccagcgaagcaagtgcaagcacagcaggtcctcaacctttgatgtccgagcctccagtgtattgtaatctcgtcgatctgaggcgctgccctaggtctcctccccctgggccagcttgtccactcctacaaagactggatgcgtgggagcaacacttagatccgaatagtgggagatgtttctacataaatagccttacaggatgtaagagctggaagccacctcggagatctcgctcggagaccaacccgggatctatggagggaacacaaaccctgaaacggaataatgatgtccttcagccacaggctaaaggcttcagaagcgacactggcacccctgaaccgctcgacccccaaggtagtctgagcttgtcccagcgaacctctcagctggatccccctgcactccaggcaccaagaccactccctcagctgctagacgaccctcatgaagtggagaagtcgggtttactgaacatgacaaagattgcccagggaggtaggaaactgagaaagaactgggggccatcgtgggtggtcctgacggggaattcattggtcttctacagagaaccaccccccacagccccctcaagcgggtggggccctgcaggctccaggcccgagagctcggtagacctccggggcgcagccctggctcacggacggcatctgtcaagccgccgaaatgtattgcatattcggacaattcctggccatgagtttctgttgcaatccgaccatgaaacggaactccgcgcttggcaccgtgccctgagaaccgtcatagaaaggctcgatagagagaatcctctggaactgcgactgagcggcagtgggccagctgagctttccgccggagaagacgaggaggaggagtccgaactggtctctaagcctctcctccgactaagtagtaggagatcaagtatcaggggcccggagggcacggaacaaaacagggtgaggaacaaactgaagcgactgatcgccaagaggccacctctccagagcctccaggagcggggtttgctgagggatcaagttttcggctgccagctggagtccttgtgccagcgcgagggagataccgtgccctcgttccttagactgtgcatcgctgccgtggacaagcggggactagacgtggacgggatataccgggtgagtggaaacttggctgtggtgcagaagctcagatttttagtggaccgggaacgggcagtgacaagtgatggacgatacgtatttcccgagcagccaggccaggagggaagactcgacctcgattccactgaatgggatgacatccatgtagttacaggtgcccttaaactcttcctgcgtgaactcccccagcccctggtcccacctctgctcttgccacacttcagggcggcactgggatag

SEQ ID NO: 203370 - DNA, 1644 bp, synthetic construct
  misc_feature 1..1644: note = Description of Artificial Sequence: Synthetic coding sequence
  source 1..1644: mol_type = other DNA
atgagcgagccccccgtgtactgcaacctggtggacctgcggcggtgcccccgctccccacctccggggccagcttgcccgttactgcagaggctggacgcttgggaacagcacctcgaccctaacagtggcaggtgcttttatattaactcacttactggatgtaaatcatggaagccgcctcggcgcagccgcagtgaaacaaatcctggatccatggaggggactcagaccctgaagcgaaacaacgacgtgctgcagccgcaggccaagggcttccgctcagacacgggaacccctgagcctctcgatccccagggctcactttccctgtcccaacgaacaagccaactggatcccccagcgttgcaggccccaaggcctcttccacagctgctcgacgatccacacgaggtagagaagtccggcctgcttaacatgaccaagattgctcagggtgggagaaaactcagaaagaactggggaccgagctgggttgtgctgaccggcaacagcctggtattctatagagaaccgcctccaacggctccatctagcggatggggcccggccggctctcggcccgagagctcagtcgatctgagaggcgcggcactagcacatgggaggcacctctcctctagaaggaacgttctccacatccgcaccatccctggccacgaattcctgcttcagtctgatcacgaaacagagcttcgcgcctggcacagggcgttaaggaccgtaatcgaaaggctggacagggagaatcccctcgagctaaggttgtcagggtctggccctgcggagcttagtgccggcgaggacgaggaagaggaaagcgagctcgtgtccaaacctttactgcggctctcttctcggaggagctctattcgaggccccgagggtaccgagcaaaaccgagtccggaacaaactcaaaagacttatcgcaaaaagacctcctttgcaatcattgcaggaacgcggattgctcagagatcaagtcttcggctgtcagctcgaatctctgtgccagcgagagggagataccgtgccaagctttctcaggctgtgtatagccgccgtggataagcggggactcgatgtcgacggaatttacagagttagtggcaatctggccgtcgtacagaagttaagattcctagtggatcgggaacgggcagtgacctccgacggacgctatgttttcccggagcaacctggtcaggaaggaagactggatttggattcaactgagtgggacgatatacacgtagtcaccggggctctaaaactgttccttcgggagctaccacaaccccttgtgccccctctactgctgccccactttcgtgccgcccttgccttgagcgagagtgagcagtgtctgagtcaaatccaggaactgattggaagcatgcctaagcctaaccacgatactctgcgctacctgcttgagcatctttgcagagttatagcacacagcgataaaaataggatgacaccccacaatctgggaatcgttttcggacccaccttatttcgacctgagcaggaaacgagcgaccctgccgctcatgcactctatcctggccaactggttcaactgatgcttacaaacttcacatctttgttcccatag

SEQ ID NO: 203371 - DNA, 894 bp, synthetic construct
  misc_feature 1..894: note = Description of Artificial Sequence: Synthetic coding sequence
  source 1..894: mol_type = other DNA
atgagcgagccccccgtgtactgcaacctggtggacctgcggcggtgtccccgttccccaccccccggccctgcatgcccgctccttcagaggctggacgcgtgggagcagcatctagatccaaattctggccgctgcttctatataaacagtctcactggttgtaagagttggaagcctccacgcaggtcccgctctgagaccaaccccggtagcatggagggcacacagacacttaagcggaataacgatgtcttgcagcctcaggccaaggggttcagatctgatacaggaactcccgagccactagacccccagggcagcctgagcctgtcacagagaacgtcccaattggatcctcccgcactccaagctcccaggccccttccccagcttctcgatgatccacacgaggtcgagaaatcgggactgctgaatatgactaagatcgctcagggtggtcgcaaactccggaaaaattggggcccctcatgggttgttctcactggcaattctctcgtgttttaccgggagccgccacccactgcaccttccagcggatgggggcctgccggatcgcgaccggagtcctctgtcgacctcaggggtgctgccctggcgcatggcaggcatctcagtagcaggagaaatgtcctgcatatccggaccatacccggccacgaatttctgcttcagtcagaccatgagaccgagcttcgggcttggcatcgggccctgagaacagtgattgaaagactggaccgagagaatccactggagctgcggctatctgggtcaggcccagcagaactgtcagcgggggaagacgaagaagaggagagtgaactcgtcagtaaacctctcctgcgtctgtccagtagaaggtctagttag

SEQ ID NO: 203372 - DNA, 186 bp, synthetic construct
  misc_feature 1..186: note = Description of Artificial Sequence: Synthetic coding sequence
  source 1..186: mol_type = other DNA
atgagcgagccccccgtgtactgcaacctggtggacctgcggcggtgcccccgctcccccccacctggtcccgcatgccctttattacaacgacttgacgcatgggagcagcatttagatccgaacagtggcaggtgcttttacatcaattccctcacaggctgtaagtcctggaaacccccctag

SEQ ID NO: 203373 - DNA, 471 bp, synthetic construct
  misc_feature 1..471: note = Description of Artificial Sequence: Synthetic coding sequence
  source 1..471: mol_type = other DNA
tgagagggcgacaccgtgcccagcttcctgcggctgtgcatcgccgcagtggacaagcgggggcttgacgtagatggcatctaccgcgtgtcgggcaatctggccgtcgtgcagaaacttaggttcctggtggaccgagagcgggccgtgacgtccgatggacgttacgtgtttccggaacagccagggcaagctcttagcgagtccgagcagtgcttgtcacagattcaggagttaatcggaagcatgcctaagcctaaccacgacacccttcgctacctgttggaacatctgtgccgtgtcattgcacactctgataagaaccgtatgacaccacataaccttggcatagtctttggtccgacactgtttcggcctgagcaagaaacaagcgatccagcggctcacgcactgtaccccggtcagctggtgcaactgatgctgactaactttacttctttattcccttag

SEQ ID NO: 203374 - DNA, 396 bp, synthetic construct
  misc_feature 1..396: note = Description of Artificial Sequence: Synthetic coding sequence
  source 1..396: mol_type = other DNA
atgagcgagccccccgtgtactgcaacctggtggacctgcggcggtgtccgcgctcacctcctccaggaccagcctgcccactgctgcagaggcttgacgcctgggaacagcatctcgatccgaactccggaaggtgtttttatatcaattctctgacaggatgtaaatcttggaaacctcctcggaggtctcgctctgagaccaaccctgggagtatggagggcactcagaccttaaaaagaaacaacgacgtgctgcagcctcaagccaagggcttccgtagcgataccggaactccagaacccctggatcctcaaggcagcttaagtctgtcccaacggacatcccagctggaccccccagctttacaggccccccggccactcccacagtag

SEQ ID NO: 203375 - DNA, 2028 bp, synthetic construct
  misc_feature 1..2028: note = Description of Artificial Sequence: Synthetic coding sequence
  source 1..2028: mol_type = other DNA
gagcccggcagcggcagccgggaccccggccccggcatcgccgagccagacctgggtcgacccgccggtcacctcagagcagacacgtccccagccgagccgagagagatggaggattttgccagaggtgccgctagtcccggtccttcccgacctggtctggtgcccgtaagcataatcggggctgaggacgaagatttcgagaatgaactcgagacgaactcagaggaacaaaacagtcaattccagagtctcgagcaggtcaagagacgcccagctcacttaatggccttgttgcagcatgtagctctgcagttcgagccggggccattgctttgttgcctgcatgccgacatgctcgggtccctcgggccaaaagaggcaaaaaaggcttttctcgatttttaccactctttcttggagaaaactgccgttctcagagtgcccgtacccccaaatgtagcttttgagcttgaccggacgcgcgccgacctgatcagcgaagacgtacaacggcggttcgtccaagaagtagtgcagtctcagcaggtggctgtgggccggcaacttgaggattttcgatctaaacggctgatgggtatgactccatgggagcaggagctggcccagctcgaggcctgggtaggtcgggacagagcatcttacgaggcaagagagagacatgtggcagagcggcttttgatgcatctggaggagatgcagcatacgatctccacagatgaagagaaatctgctgctgtggtcaatgcgattgggctctatatgaggcacttaggagtccggacaaagtctggcgataagaagtccggtaggaactttttccggaagaaagtaatgggtaaccggaggtctgacgaaccggctaaaactaagaagggcctgtccagcatcttggatgctgcaagatggaacagaggagagccccaggttcccgactttcggcacctaaaagcagaggtagatgcggagaagccaggcgccactgacagaaaaggaggcgtaggaatgcctagccgcgatcggaatattggtgcacctggacaggatactccaggggttagtctgcacccactctccctcgattctccagatcgggagcctggcgcagacgctcccttggaactgggggattcctctccacagggtccaatgtccctggagtctctggcgccgcccgagtccaccgacgaaggcgccgagacggaacggtgtcctggatggggagctggtgcaggaggagtcgcttactgggctctcgtcggggggtgtcgggtcacagcggccatttgcgcctgcttgtctcaagcactagcgccccacgctcccctccttctatccgggtcagggcatagcagtccttttttctttcccttcctcatttcccttttattgccacattgtccaccttttctgctctccttcctgtttcccctcctgctccctctcctgccgttttttactaatcccagcccgcccccctttctttctaccactccttcaatctctttcattagcagccctctgttgtcacacctaccaccccctctgttcccacctcactctagtctcacctgggtattctttccccacctcccttcgcctagcgatctgccagctacattccattttttcagcccttccccctttagctttaagcctccgtgccccctcccccccactcctcgattagcacccgcctcctggtgtccttcgctgaaccccccccccctctgtagcgtgccttgggggccatgtcccccgtatagctggggagcagggtctgctagctgtccaagcctctgcagatgctttggcgacccactagttggtgcagggcgttgggtacggtttcacttgggcccccccctcactctttgtccctccctcccacgcagatggaagagatgggtgccgggaccctgggtcggcgaaggcctggcccctccacccttcctgcctgcgcccccgctctcaccgtggccactgccacctcttcattccctctag

SEQ ID NO: 203376 - DNA, 2784 bp, synthetic construct
  misc_feature 1..2784: note = Description of Artificial Sequence: Synthetic coding sequence
  source 1..2784: mol_type = other DNA
atggccagcctgagcacctggagcagccccgccgagccccgggagatggaagacttcgcccgtggcgccgcttcaccaggacccagtcgcccaggcctcgtcccagtgtctatcataggcgcagaagacgaagacttcgagaatgagctagagaccaactcagaggaacagaattcacaattccaaagtctcgaacaggtcaagagacggccagcgcatcttatggctctgctccagcacgttgctcttcagttcgaacccggaccactcctgtgctgtctccatgcggacatgctgggctccttaggcccaaaagaggctaagaaggcatttctcgatttttaccactcttttctggagaaaaccgcagtgctgcgggttcccgtaccaccgaacgttgctttcgagctggacagaacccgggccgatctaatttccgaggatgtgcagagaaggtttgtgcaggaagtggtccaatcccagcaggtggcggtggggagacagctggaagatttccgctctaaaagattgatggggatgactccttgggaacaggaactggctcagctggaagcctgggtcggacgagatagagcctcctacgaagcaagagagaggcacgtcgccgagagactcctcatgcacctcgaggaaatgcagcacacaatcagtacagatgaggagaagtccgccgcagttgtcaacgcaatcggcctctacatgcggcatctcggggtccgaactaagtcaggcgacaagaagagtggcaggaatttcttccggaagaaagtgatgggaaaccgccgaagcgacgagcctgccaagaccaagaagggtcttagcagcatcctcgatgccgcgaggtggaaccggggagaaccccaggtccctgatttccgacatctgaaggccgaagtggacgccgaaaagccaggggcaacagacagaaaaggcggtgttggaatgccttcacgagacagaaacatcggggccccaggtcaggatacgccgggtgtatctctacacccgctctctctggattcacccgacagggaaccgggtgcagatgccccactggagctgggggacagcagccctcaggggcccatgtcactcgagagtctggccccccctgagagtacggatgaaggggccgagaccgaaagccccgaacccggcgatgagggagaaccaggaaggtccggtcttgagctagaacctgaagagccacccggttggcgggagcttgtgccaccggatacgttgcattctcttccaaagtcgcaggtgaagaggcaggaggtgatctctgagcttttggtcactgaagcagcccacgtaagaatgctgcgggtcctacacgacctgttctttcagccaatggctgaatgcttattcttcccacttgaggagctgcaaaatatatttccctccttggatgagctcatcgaggtccactcactctttcttgatcgcttgatgaaaagacgtcaagagtccgggtatcttatagaggagatcggagatgttcttctggcccgttttgacggagcagagggttcttggttccagaaaattagcagtagattctgcagccggcagtcttttgccttggaacagcttaaggcaaagcaaaggaaggaccccaggttctgcgctttcgtgcaagaggcggagagcagacccagatgtcgtaggctgcaactgaaggacatgatcccaacagagatgcaacggctgacaaagtaccctcttctacttcagagcataggacagaacactgaggaaccgaccgagagagagaaagtggagctggccgcggaatgttgccgtgagatcctccaccacgtgaaccaagccgtaagagacatggaggacctccttaggctcaaagactaccagcgccgtctggacctgtctcaccttagacaatcttccgaccccatgttgtctgagtttaaaaatcttgacattaccaaaaaaaaactggtccatgagggtcccctgacgtggcgtgtcaccaaagataaggccgtcgaagtgcacgtcctcctcctagacgatttgttattactcctgcaaagacaggacgagaggctccttttgaagtcccacagtcgcactctgacacccactccagatggtaaaaccatgctccgccccgtattgcgcctcacctccgcgatgacacgggaggtggcaacagaccacaaggccttctacgttctgttcacttgggaccaggaagcccagatctacgagctggtcgctcaaactgtctcagagcggaaaaactggtgcgcgcttattaccgaaacagctgggtccttgaaagtgcccgccccggcctcccgacccaaacccaggccttcgccctctagcactcgcgagccacttctctcctcttccgagaacggcaatgggggccgcgagactagccccgccgatgctaggaccgagcggattttgtccgatctgttacccttctgtcgtcctggcccagagggacagcttgctgcgacagccctcagaaaagttttgtccctgaaacagctgctgttccccgcggaagaagataatggcgccggaccacctagagacggcgacggtgtacctggcggaggcccactgagtccagcacggactcaggaaatccaggaaaacctgctgtccctcgaagagactatgaagcagctggaggaattggaggaagagttttgtcgattacggcctttactgagtcaactgggcggtaactcggtgccacagcctggatgtacttag

SEQ ID NO: 203377 - DNA, 2640 bp, synthetic construct
  misc_feature 1..2640: note = Description of Artificial Sequence: Synthetic coding sequence
  source 1..2640: mol_type = other DNA
atggaggacttcgcccggggcgccgccagccccggccccagccggcccggcctagtccctgtatctatcataggggccgaagatgaggatttcgaaaatgagctggagaccaatagcgaagagcagaacagtcagtttcagtctctcgagcaggtgaagaggagacctgcccacttgatggcattgctgcagcatgtggccctccaatttgaaccaggccctctggtgttgcgcgtgcccgtgcctccaaatgtggcctttgaactggaccgcacacgcgccgaccttatcagtgaagacgtgcagcgcaggttcgttcaggaggtggtccaatcacagcaggtcgccgttggacgccaactcgaagattttcgtagtaagcgcttgatgggtatgacaccgtgggagcaggagcttgctcaactcgaggcttgggtgggacgggaccgtgcttcttatgaagccagggaaagacacgtggctgagcggctgttgatgcatctggaggagatgcagcacaccatcagtacagacgaagagaagtctgcagctgtcgtcaacgccatcgggttatacatgaggcacctgggggtacgaactaaatctggggacaagaagtcaggcagaaactttttcagaaagaaagtcatgggaaatagaaggtccgatgagcccgcaaagacaaagaaaggacttagcagcattctggacgcagcgaggtggaatagaggagagccgcaggttccagacttccgccatctcaaggccgaggtcgacgccgaaaaacccggagcaactgaccgcaaagggggtgtggggatgccttccagagatcgcaatataggtgccccgggtcaggacaccccgggcgtgtctcttcacccactttccctggacagcccggacagagagcctggagctgacgccccactggagctcggcgattctagcccccaaggccccatgtcacttgaatctctggctccacctgagagtactgatgagggcgctgagacggagtcaccggagcccggtgacgagggcgaacccgggcgtagtgggcttgaactggagccagaagaacccccgggctggagagaactagtacctccagatacccttcactccttgcccaagtctcaggtcaagagacaggaggtgatatctgaactgctcgtaacagaagcagcgcacgtgcggatgctgcgcgtgctccatgatctcttctttcaacctatggcggagtgcttattctttcctctggaggagctgcagaacatcttcccgagcctggatgaactgatcgaagtgcattccctgttccttgatcgcctcatgaaaagaaggcaggaatctgggtacttaatcgaagaaatcggcgacgtgttactcgcccgctttgatggtgccgagggttcttggttccagaaaatcagttctaggttttgttcgcgccaaagtttcgcattggagcagctgaaggccaagcagaggaaagatccaaggttttgcgcattcgtgcaggaagctgaaagccgaccacgatgtcggcgattgcagctgaaggacatgatcccgaccgaaatgcagcgacttaccaaatatcccctgttgctccaaagtatcggacaaaataccgaggagcccacagaacgagagaaggtcgagctggcagcagaatgctgcagggaaatcttacaccacgtgaaccaggcagtgcgtgacatggaggacctgctgagacttaaggactatcaaagacgccttgatctgtctcacctaagacagagctccgaccctatgttgagcgaatttaagaatttggacattactaaaaagaaactcgttcacgaaggccccctcacctggcgagtcaccaaggacaaggctgtggaagtgcatgtccttctgctggatgatttgttactgttgcttcagagacaggacgagcggctactcctcaaatcacatagcagaactttaacccccaccccagatggcaaaactatgcttcggcctgtgctccggctaacaagcgctatgacgagggaggtcgcgacagatcacaaagcattctacgtactctttacttgggatcaggaagcccaaatctacgaacttgtcgctcagacagttagcgagcgtaagaactggtgcgctttaatcaccgaaactgccggaagtctgaaagtgcctgcccccgcctcacggccaaagccgcggccatccccatcatctactcgcgagcctttgctgtctagcagcgaaaacggaaacggaggccgtgaaacgtcgcctgcagacgcccggaccgagcgtatacttagcgaccttctacccttttgccggcctggccctgaaggacagctggccgctacagctctccggaaagtcctgtctctgaagcagctgctgttcccagccgaggaggacaatggtgcaggccccccgcgggacggcgatggagtccctggtggtggccctctgtcccctgcccgcacgcaggaaattcaggaaaacctactttccctggaggaaaccatgaaacagctcgaagagctggaggaggagttttgccggctgcgccctctgctgagtcagctgggaggaaactctgtgccacaacctggatgcacctag

SEQ ID NO: 203378 - DNA, 2739 bp, synthetic construct
  misc_feature 1..2739: note = Description of Artificial Sequence: Synthetic coding sequence
  source 1..2739: mol_type = other DNA
atggaggacttcgcccggggcgccgccagccccggccccagccggccgggtcttgtgccagtgagcatcatcggggctgaggacgaggacttcgagaatgagctggaaacaaactctgaggagcagaattcacaattccagagcttagagcaggtgaaacgacgtccggctcatctcatggccctcctgcagcatgtcgcgctacagtttgagccaggacctctactgtgttgcctgcacgcagatatgttgggatccctggggccgaaggaggctaagaaggcttttttggatttctatcactccttcctcgagaagacggccgtcttgagggttcccgtgccaccaaacgtagcatttgagctggataggactcgcgccgatctgatttccgaagatgttcagaggcgcttcgtgcaggaagtggtccagagccagcaggttgccgtgggccgccaacttgaggacttcaggagcaaaaggctgatggggatgactccttgggagcaagagctcgcacagctcgaggcctgggtgggccgtgatagagcttcgtacgaagcacgagaaaggcatgtggctgaacggctcttgatgcacctggaggagatgcagcacactatttcaacagacgaagaaaaaagtgcagctgtggtgaacgccattggactctatatgcgacaccttggcgtgagaactaaaagcggtgataaaaagagtggcaggaatttctttcgcaagaaggtgatgggcaacagaagaagtgatgagcccgcaaaaacgaagaagggcctgtccagcattttagacgcagcgaggtggaatagaggagagccccaggttccggatttccggcatctaaaggctgaggtggatgcggagaagcctggtgcgaccgacaggaaaggcggggtaggcatgccatctcgcgacaggaacatcggcgctcccggacaggatacgcccggagtttccctgcaccccctttctctggatagcccagacagagagcccggggccgatgcccccttagagctgggagattcctctccccagggccctatgagtctagagtctctcgcgccaccagaatcaactgatgagggggcggaaacagaaagtccagaaccgggtgatgagggcgagccaggacgatctggactggagctcgagccggaggagcccccaggatggagggagctggtgcctccagacactctgcactccctgccgaaaagccaggtcaagagacaggaagtaatttcagagctcctcgtgaccgaggccgctcacgttcggatgttgcgcgtgctccacgacctcttcttccaaccaatggctgaatgtctctttttccccttagaagagctgcagaacatttttccctctctggacgagctcatcgaagttcatagtctttttctggatcgcctgatgaaacgaaggcaggagtcaggatacttaattgaggagattggcgacgttctgctcgcccgatttgatggcgccgagggaagctggtttcagaagatcagtagcagattttgctccagacagtccttcgctctggagcaacttaaagccaaacagcggaaagaccctaggttctgtgcctttgtacaggaggctgagtccagacctcgctgtaggagactgcagctgaaagacatgatccccactgagatgcagagattgactaaatacccccttctgctgcagagcattggccaaaataccgaagagcctaccgagagggagaaggtggagttggccgccgaatgttgtagggaaatactccaccacgtaaatcaggccgtgcgcgatatggaggacctactcagactcaaagactaccagcgcaggcttgacctatcgcacctccggcagagtagtgatcctatgctgagcgaattcaagaatctggacatcactaaaaagaagctggtacacgagggccccctcacctggcgggttacgaaagacaaagcagtggaagtgcacgtgctattgctcgacgatctgctgctgttactgcagcgtcaagacgagcggctgttacttaaaagtcactcaaggacactcacgcccacccccgatggcaagaccatgcttaggccagttttgcgcttaacgtccgctatgacccgtgaagtagccaccgaccacaaggctttttacgtgttgtttacttgggaccaagaggcccaaatttatgagttagtcgcacaaaccgtgtccgaaaggaagaactggtgcgccctaatcacagaaacagctggatcactcaaggttcccgcacctgcgtctaggcctaagccaagacctagtcctagtagcactagagagccactcctcagttcttccgaaaacggcaatggagggcgggaaacaagccctgctgacgctcggaccgaaagaatactaagcgacctcctgcccttttgtcggcccggaccagaaggccagctggctgccacagctctgagaaaggtactctctttaaagcagctgcttttccctgccgaggaagataatggagctggccctcccagagacggggatggtgtaccggggggtgggccgttgagcccagctagaactcaggaaatccaggagaacctgctttcactggaggagaccatgaaacagttggaggaattggaagaagaattttgcagactccggcctctattgtctcaactcggtggtaattccgttccacaacctggatgtacctag

SEQ ID NO: 203379 - DNA, 2847 bp, synthetic construct
  misc_feature 1..2847: note = Description of Artificial Sequence: Synthetic coding sequence
  source 1..2847: mol_type = other DNA
atggccagcctgagcacctggagcagccccgccgagccccgggagatggaagattttgcacgcggcgcagcaagtcctggcccatcacgcccaggtttggtgcctgttagtatcattggagccgaggacgaagacttcgaaaacgaactcgagaccaattctgaggaacagaatagtcagtttcaatctctggagcaggtcaagcggcgccccgcacatctcatggccctacttcagcacgtcgcgctgcaattcgagccgggaccactggtcctgagggtgccggtgcccccaaacgtcgcctttgagctcgataggacaagggccgacctgatctcagaggatgtccagcgcaggttcgttcaggaagtagttcagagccagcaggttgccgtggggcgacaactggaggactttcgaagcaaacggttgatgggcatgaccccctgggagcaggaactggctcagctagaggcgtgggtagggcgagaccgcgcgtcttacgaggccagggaaaggcatgtagcagagcgcttgctgatgcacctcgaagaaatgcagcatactatatctaccgacgaggaaaagtctgcggccgttgtgaacgccattggcctttacatgaggcatttgggcgtaagaaccaagagcggcgataaaaagagcggtaggaactttttccgcaagaaggtgatgggaaacagacggtcagacgagccagcgaaaacaaagaaggggctgtcgagcattctggacgccgcgagatggaacagaggcgaacctcaggttcctgatttcaggcatcttaaggctgaggtggatgctgagaaacctggcgccactgatagaaagggtggtgtgggcatgccctcgagggaccgcaacattggggcccccggccaggacacccctggtgtctccctacacccactatctctggattcacccgatagagaaccaggagctgatgctcccctcgagttgggcgactcgtcacctcagggacccatgtcactagagtctttggcaccacccgaatccaccgacgaaggggcagagacggaatccccagagcccggtgatgaaggcgagccaggcaggtccgggctagagctggaacctgaggagcctccaggctggcgggagcttgtgccccctgacactctccactcacttccaaagagccaagttaaaagacaggaggttatttctgaactgctcgttaccgaggcggcccacgtccgcatgctccgcgtgctccatgacctattctttcagccaatggcagagtgcttatttttcccacttgaggagctgcagaatattttcccttctttggatgaactgatcgaggtgcatagtctctttcttgaccggctgatgaaacgacgacaggagtccgggtatctcatcgaagaaattggggacgtattactggctcgcttcgatggggccgaaggctcctggttccagaagatatccagccgattctgttccagacagtccttcgcccttgaacagctgaaagccaagcaaaggaaggatccaaggttttgcgctttcgttcaggaggcagagagccggcccaggtgtaggagactacagttgaaggatatgattcccaccgagatgcagaggctaaccaagtacccattgctccttcagtctattggtcagaatacagaggagcccacggagagggaaaaagtcgagctcgccgccgagtgctgtagggaaatcttacatcacgttaatcaggctgtgagggacatggaggacctgctccgcctgaaagactatcaacggcgtctggatctgtcacacttgcggcagagctcagaccccatgttgtcagagttcaaaaatctggatatcacgaaaaaaaaattagtacatgagggccccctaacctggcgcgttactaaggacaaggccgtggaagtccacgtgttgctgctagatgacctgctgctgctgctgcaacgccaggacgagagactacttttgaagagtcactcgagaacgctgacccctaccccagacggtaagactatgctgcggcccgtgctgcgactgacgagcgcaatgacacgggaagttgctaccgatcataaagcattctacgttctgtttacctgggaccaggaggcgcagatctacgagttggtagctcagaccgtgtctgagagaaagaactggtgtgcccttatcacggaaaccgccggcagcctcaaagttcctgcacctgctagtaggcccaaaccacgcccatccccgagtagcactcgcgagcccctgctgtcatctagtgagaatggtaacgggggccgagaaacgtctcccgctgacgcccggacagaacgcatcttatctgacctgctgcctttctgtaggccgggacctgagggacagttagctgcaactgcattgaggaagggggtaggcggaggtatccttcctcctgagactccaccagttagtgcctggggagagctttgtcccccagcctggctacatctgaggttcccgccccggaaagctttctgcaaaaaagagcgtaatggaggtgaggatgtgcgcgaccacccacacccacacagctgtaggagcattagtcacccagaaggtcttagaaggggaagttgtgggccacgattgggtggggcacagttaggactgctggcaccgcatgaacctaggccctctctgcctcccgcactatgtcttggagactcaggcctccacagcggaggccatcatggggatccaggacacttgtccatcgcatgtggcgggcacccatccacaccgactccaaagtgtcttcgaagtgtttttattccctag

SEQ ID NO: 203380 - DNA, 4023 bp, synthetic construct
  misc_feature 1..4023: note = Description of Artificial Sequence: Synthetic coding sequence
  source 1..4023: mol_type = other DNA
atgcggccccccggcttcctgagccgggcccccagcctgaaccgggctgaacgcggaatctggtcttgttcaatggaccagcgggaaccactccctccagcgcctgcggaaaatgagatgaagtacgacactaataacaacgaagaggaggagggagaacagttcgacttcgatagcggtgatgagattccggaggccgacagacaggcgccctccgctcccgaaaccggtggggctggggcgtctgaagcgcccgctcccacaggaggcgaggacggggccggagccgagaccacacctgtggctgagcctaccaagttggtgttacccatgaaagtgaatccatatagtgtgatagacattactccattccaggaggaccagccgcccacccccgttccgtcagcagaagaggagaacgtgggccttcacgtcccttgcgggtacctagtgccggtgccttgtggatacgcggtccctagcaatctgccactcttgctacccgcctactcatccccagtaattatctgcgctaccagtctggacgaagaagctgaaacacccgaggtcaccgaggatcggcagccaaactccctcagcagtgaggagccgccgacctcagaggaccaagttggcagagaggactctgctctagcacggtgggcagcagaccccgctaatactgcatggatggagaatcccgaggaggcaatctatgacgatgtccctcgggaaaattccgactcggagcctgacgaaatgatttatgatgatgttgaaaacggcgacgaaggcgggaattcttccctcgagtatggctggtcctcgtcagaatttgagtcgtacgaggaacagtccgacagtgaatgtaagaacggaattcccagatcctttttacgcagcaaccacaaaaaacaacttagtcacgatctgacgcgactaaaagagcactacgaaaaaaagatgagagacctgatggctagcacagtgggggtagtggagattcagcagctacgccagaagcacgaactcaagatgcagaagcttgttaaagccgccaaagatggtactaaagacggtctcgagagaacacgggctgcagtgaaacgtggcagatcttttatccgaaccaagtctctcatcgcccaggaccaccgtagcagtcttgaggaagaacagaacctgttcatcgatgtggactgcaagcatcccgaggcaatacttacgccaatgcctgaagggcttagtcagcagcaggtggttcggagatacatccttggatcagtcgtggactccgaaaagaattacgtcgacgccctgaagagaattttagaacagtacgagaagccactgtctgaaatggaacctaaagtgctttcagaaagaaagctgaaaactgtattctatagggtaaaggagatcttgcagtgccacagtctgttccagattgcactggccagcagggtgtcagaatgggactccgtagaaatgatcggtgacgtattcgtggccagtttttcaaaatcaatggtactggacgcctacagcgagtacgtgaacaacttcagcactgccgtggccgtgctgaagaagacctgtgctacaaaaccggcttttctggaatttctcaagcaagagcaggaggcctcgccggatcgtactacattgtattcgctcatgatgaaaccaatccagcggtttcctcagtttatcttgcttctccaggatatgttaaagaacacgtctaagggtcatcccgatcggctccctttgcagatggccctcaccgagcttgagacactggctgagaaactgaacgagaggaaacgagatgccgaccagagatgcgaagtgaaacagattgcaaaggcaataaacgagcggtatctcaacaagcttctttctagcggctcccggtacctaatcaggagtgacgacatgatcgagactgtctataacgatagaggcgaaatcgtgaaaactaaggaacgccgggtttttatgctgaatgacgttcttatgtgcgctactgtgtcttccaggccatcccatgactcccgagtgatgagttcacagcggtatctgctaaagtggtctgtcccgctgggccacgttgatgcaatcgaatatgggtcaagtgcaggcactggcgaacatagccggcatcttgcggtacacccccccgagtccttggccgtggtagccaacgcaaagccaaacaaggtttatatgggacctggccagctctatcaggatttgcaaaacctgctgcacgacttaaatgtgatcggccaaatcactcagctgattggtaaccttaagggcaactatcagaacttgaaccagtctgtggcacatgattggacatccggtctgcagcggctgattttgaaaaaggaggatgaaatccgcgctgcggactgctgtagaatacagctgcagcttccaggaaagcaggataagtcaggtcgcccaacatttttcacggctgtctttaacaccttcacgcccgccattaaggagtcatgggtgaactcactgcagatggccaaactggcccttgaggaggaaaatcacatgggctggttctgtgtggaggatgatggcaaccatatcaaaaaggaaaaacacccactccttgttgggcacatgcccgtcatggtggccaagcagcaggagttcaaaatcgggagctgtacccatcagatggggcaaatcgctatcgtttctttccagaatagtacccctaaagtgatagagtgctttaacgtcgaatctagaatcctgtgtatgctatatgtgcccgtcgaagagaagaggagggagcctggcgcccctcccgatcccgagacacccgcggttagagccagcgatgtgcccacaatttgtgtggggacagaagaggggagtatctccatctacaagtcctcccagggatcgaaaaaagtcagactgcagcacttctttacacccgagaaatccaccgtcatgagtttggcatgcacgtctcagtcgctctacgctgggctagtgaacggagcggttgcatcttatgctcgagccccagatggatcttgggactcagagccgcaaaaagttatcaaactgggagtgctcccagtgcggagtctgcttatgatggaagacacgctgtgggcagcgtcaggggggcaggtctttatcatctcagtggagacacatgcagttgagggacagctggaggctcaccaggaggagggcatggtcatcagtcacatggccgtaagcggggtcggcatctggattgcattcacctcaggttctacattgaggctgtttcacacggagaccttgaaacacctccaagatatcaacatcgccacccccgtacacaacatgctgccagggcaccaacgcctgtcggtgaccagccttctcgtgtgtcacggactcctcatggtgggaacgagcctcggagtgctcgtggccttgcctgtgcctagactccagggcattcccaaggttactggcaggggcatggtgtcctatcatgcgcataactccccagttaagtttatcgtgctggctacagctctacacgaaaaagataaggacaagtcaagagatagcttagcgcctggccccgagccacaggacgaggatcagaaagacgcactgccaagcggaggcgcggggtcttctctgagtcagggcgatccggacgcagctatatggctaggggattccttaggtagtatgactcagaagtcggacctttcgtcttcctctgggagtcttagcttgtcccatggaagctctagccttgagcataggtctgaggactctaccatctacgacctgttgaaggatccagtgtctttacgctctaaagcccgccgcgcgaaaaaggccaaggcgagcagtgcgttagttgtatgcggaggtcagggccatcgacgggtgcatcgcaaagccaggcagccccaccaggaagagctagcccctaccgttatggtgtggcagatccctctgctgaatatttag

SEQ ID NO: 203381 - DNA, 4035 bp, synthetic construct
  misc_feature 1..4035: note = Description of Artificial Sequence: Synthetic coding sequence
  source 1..4035: mol_type = other DNA
atggaccagcgggagcccctgccccccgcccccgccgagaacgagatgaagtatgacactaataacaacgaagaggaggaaggtgagcagttcgatttcgacagcggcgacgagatccctgaagcggatagacaggcaccctcagcccccgagacaggcggggccggcgccagcgaggcccctgcaccaactggtggcgaagatggtgcaggcgctgaaaccacacctgtcgctgaaccgacaaaactggtgctcccgatgaaagtgaatccgtacagtgtaattgacattacccctttccaggaggaccagccgccaacaccagtgccgagcgccgaggaagagaacgttggtctccacgtgccatgcggatatctcgttccggtcccctgcggctacgctgtgccatcaaacttacctcttttactcccagcatattcttcacctgtcattatatgcgcaacctctctggatgaagaggagacaccagaagttacagaggaccgccagcccaactctctgagcagcgaggagccgcctacctccgaggatcaggtaggccgcgaggatagcgccctggctcgctgggccgccgatcccgcaaacaccgcctggatggaaaatcctgaggaagctatctatgatgacgtgcctagggaaaattccgattctgagccagacgaaatgatctacgatgacgtcgaaaacggagatgaaggagggaactcgtccttggagtacggctggtctagcagcgagttcgagagctacgaagaacagtctgatagcgagtgcaagaacggtataccaaggtcttttctgcgcagtaaccacaaaaaacaacttagtcacgatctcacccgcctgaaagagcactacgaaaaaaagatgagggacctgatggcttcaactgtgggggtggtggaaatccaacagctgcgtcagaagcacgagctgaaaatgcagaagctggtgaaggcagcaaaggatgggacaaaagacggcctcgagcgcacccgggctgcagtgaagaggggacggagtttcatccgcactaaatctctgattgcccaagatcaccgttcgtcgctggaggaggaacagaatttgttcatcgacgtggactgtaagcatccagaggctattctgactcccatgccggaagggctctcgcagcagcaggtcgtcagaaggtatattctaggctcagtggtcgactcagagaagaattatgtggatgccttgaaaaggatactagagcagtacgagaagcctctttctgagatggagcccaaagtccttagtgagcgaaagctgaagactgtcttctatagagtgaaagagattttgcagtgtcacagtctcttccaaattgcactggcaagtcgtgtttcagagtgggactctgtcgagatgatcggcgacgtgttcgtggcatccttcagcaagtctatggttctggatgcttatagtgagtatgtgaataacttctccacagccgtcgcagtgctgaagaaaacttgtgctacaaaacctgcctttctggagtttctcaagcaagagcaggaagcctctcctgatcggacaaccctgtacagtctgatgatgaaaccaattcagagatttcctcagttcatcctactgctgcaggacatgctgaaaaacacctcaaaggggcatcctgatagactgcctttgcagatggctctgactgagctagagacactggctgagaagctaaacgaacgtaagagggacgccgaccaaaggtgtgaggtcaaacagatcgcgaaggccattaacgagcggtatctcaacaaattgctgagctctggatcaagatatctgataaggagtgatgacatgatcgagactgtctataatgatcgaggcgagattgtgaaaactaaggagcggcgcgtgttcatgcttaacgatgttttgatgtgtgcgaccgtgtcatcacggccctctcacgactcacgagtaatgtcttctcagcggtatctgctcaagtggagcgttccactcggccatgtggatgccatagagtacggttccagcgcaggcacaggggaacattcccgccacctggctgtccacccgcctgaatcgttggctgtggtagctaatgcgaagccaaataaagtttacatggggcccggtcagctgtaccaggatctgcagaacttgctgcacgacttgaacgtgattggccaaattacacaattaattggtaatctaaaagggaactaccaaaatctgaatcaaagcgtagcacacgattggacatccggattgcaacggttgattttgaagaaagaagatgagattagggctgccgactgttgccggatccagctgcagctaccagggaaacaggataagtcaggacgccccacgttttttactgcagtgttcaacactttcacgcccgctatcaaggagagctgggtgaactccctccagatggcaaaactggcgctggaggaggaaaaccacatgggttggttttgcgttgaggacgatggcaaccacatcaagaaggaaaaacatccactgctagtcggacacatgcccgtcatggtggcgaagcaacaggagtttaaaatcgaatgcgctgcttacaatccagaaccctatctgaataacgagtcccaacctgacagcttttcaacagcacacgggtttctctggattgggtcctgtacacatcaaatggggcagattgcaattgtgtcgtttcagaattcaactcccaaggtaatcgaatgttttaatgtggagtccagaatcttatgcatgctgtacgttcctgtagaggaaaagcgccgggagccaggcgcaccgcccgatcctgagacacccgccgtgagggctagtgatgttccaaccatttgtgtgggcactgaagagggcagcattagcatatacaagagttctcagggcagcaagaaggtgaggctgcagcatttcttcacccccgagaaatccactgtgatgtcgctagcttgcacatcacagtctctgtatgccgggctggttaacggagccgttgccagttatgcacgggcacctgacggctcgtgggactcagagccacagaaggtgatcaaattgggggtgctccccgtcaggtccctgctgatgatggaagacaccctttgggccgcgagtggaggccaggtgttcattatttctgtggagacacatgctgtggaggggcagctcgaagcccaccaagaagaaggtatggttatttcccatatggcagtgtcaggagtgggaatctggatcgcgttcaccagtggctcaacactgaggttatttcatacagaaactttgaagcatctacaggacattaacatagccacacccgtccataacatgctccctggacaccaacgcctgtccgtaacaagcctgttagtgtgtcatgggctgcttatggtgggaaccagccttggcgtgttggtcgcgttgcccgtgccacgcttacagggcattcccaaagtgaccggacgcgggatggtctcttatcacgcccataactctccagtgaaatttatcgttctggcaacggccctgcacgaaaaggacaaagataagtctagagattccctcgctcccgggccggaaccacaagatgaagatcagaaggatgctctcccatccgggggggccggctcgagtctgagtcaaggcgatcccgatgctgccatctggctcggtgattccctgggaagtatgacgcagaagtctgatctgtcctcttcgtccggtagtctcagtctctcgcatggctcctcaagcctggagcacaggtccgaagacagtacgatctatgatcttctgaaggaccccgtctctttaagatcgaaggcaaggcgggcgaaaaaggcaaaagcctcttctgcactggtggtttgcggtggccagggtcacagacgtgtgcacaggaaggccaggcaaccacatcaggaggaactggcacctacagtgatggtgtggcaaattcctctgctgaacatttag

SEQ ID NO: 203382 - DNA, 1833 bp, synthetic construct
  misc_feature 1..1833: note = Description of Artificial Sequence: Synthetic coding sequence
  source 1..1833: mol_type = other DNA
atgcggccccccggcttcctgagccgggcccccagcctgaaccgggccgagagaggtatatggagctgctcaatggaccagcgcgaaccattgccacctgccccggctgaaaacgagatgaaatatgatactaataacaatgaggaagaagagggagaacagtttgactttgattccggcgatgagattcctgaggccgatcgtcaggctccatccgcccctgaaactgggggcgccggggcgtcagaggccccggcccctacaggcggggaggatggcgctggcgcagaaaccacccccgtggccgaacctaccaaacttgtgttaccaatgaaggtgaatccatacagtgttattgatatcacaccctttcaggaggatcagccacccacacccgtgccttctgccgaagaggagaacgttggcctccacgttccctgtggctatttagtgcccgttccctgtggatacgcagtgcccagcaatttacctcttctcctgcctgcctactcatcgcccgtaattatctgtgcaacatcactggacgaggaagctgaaactcccgaggtgaccgaggatcgccagcctaacagtctcagtagtgaagagccacccacttcagaggatcaggtgggcagggaagactccgccctggctaggtgggccgctgacccggccaacacggcctggatggagaacccggaggaggctatttatgatgacgtgccccgcgagaattccgactccgagccagacgaaatgatctatgacgatgtcgaaaatggggacgaagggggcaattcatctctggagtatggctggtcctcctctgaattcgagtcttatgaggagcagtcggactcagaatgcaaaaacgggataccccggtcttttctgaggagcaatcataagaaacagatgcaaaagctggttaaggcagctaaggatggcacaaaagatggcctggaacggacacgggctgccgtgaagagagggaggtccttcatccgtacgaaatccttgatcgcccaagaccacagatccagtcttgaggaggagcagaacctgttcattgatgttgattgtaagcatcccgaggcgatcctgacaccaatgccagaaggcctgagccagcagcaggtggtccgtcgctatatcctggggagtgtcgtggattccgaaaagaactatgttgatgccctgaagcggatactggagcagtacgaaaaacctctatcagaaatggaacctaaggtgctgtctgaacgcaagttgaagacagtgttttaccgagtaaaagagatacttcaatgccattcgttgttccaaatagcactcgcctcccgggtgtcagaatgggattcagtcgaaatgatcggtgacgtgttcgttgccagcttctccaaatcgatggtccttgacgcttactccgaatatgtcaacaatttttcaacagccgtcgcagtgctgaagaaaacatgcgctacaaaacccgctttcttggagtttctgaagcaggagcaggaggcatctcctgatcgcacaaccctctacagcttgatgatgaagccaatccagcgcttccctcagtttattctgttgcttcaggatatgctcaaaaatacttctaaaggtcatccagataggctgccactgcagatggctctcaccgaactggagacactcgctgagaagctgaacgaacgaaagcgtgacgctgatcagcgatgcgaagtgaagcagattgccaaagctattaatgaacgatatctgaacaaggtcgagagggggttcctgcagttgtactctaagatcatctttgccctgtgttag

SEQ ID NO: 203383 - DNA, 4110 bp, synthetic construct
  misc_feature 1..4110: note = Description of Artificial Sequence: Synthetic coding sequence
  source 1..4110: mol_type = other DNA
atgcggccccccggcttcctgagccgggcccccagcctgaaccgggcagagcgaggcatctggagttgctcaatggatcagagagagcctcttccccccgcccctgccgagaacgagatgaaatatgataccaacaacaacgaagaagaggagggcgaacagttcgatttcgatagcggggatgaaatacctgaagccgatagacaggccccgagcgcgccagagaccggaggcgctggcgcctctgaggctccagccccaaccggaggcgaagacggcgctggcgctgagactacccccgtggccgagcctacaaagttggttctgcccatgaaagtcaacccgtactctgtaattgacatcacccccttccaggaagaccaaccccctactcccgtccctagcgccgaagaggaaaacgtcggcttgcatgtcccttgcgggtacttagtgccagtcccatgtggatacgcggtgccatcgaacctgcctctgcttcttcccgcgtactcctctcctgtcattatttgcgcaacctctttagatgaagaggcagagactcccgaggtgacagaggaccgccagccaaatagcctgtcatcagaggaacctccgacttctgaagaccaggtcggtagggaggattctgcactcgcccgatgggccgcagatcctgccaataccgcctggatggagaatcctgaagaagctatttatgatgacgtacctagggagaactcagattctgaaccggacgagatgatctatgatgacgtggaaaatggcgacgaagggggcaatagtagtttggagtatggatggtcttcatctgagtttgaaagttatgaagaacagtccgattcagaatgcaagaatggtatcccccgtagctttcttcgcagcaatcataagaagcagttgtctcatgacctcactaggctgaaggaacattacgaaaaaaagatgcgggacctcatggcatccaccgtgggggttgtggagattcagcagctgagacagaagcatgagttgaagatgcagaagctggtgaaagcagctaaagacggcactaaggatggactggaacgaacacgagccgcagtgaaaagaggtcgttccttcatcagaacaaaatcccttatagctcaggatcacagatccagcctggaggaagaacaaaatctgtttattgatgtggattgcaagcacccggaagccatactgacccccatgccggaaggtctttcacagcagcaagtagttaggcgatacatcctggggtctgtcgtcgatagcgagaagaattatgtggacgctctgaagcggatcttagagcaatacgaaaagccactctctgaaatggaacccaaagtgcttagcgagaggaagctcaagaccgtcttctacagagttaaggagatactacaatgccactctctgtttcaaattgcgctggcgagtagagtttcagagtgggactccgttgagatgattggagacgtctttgtcgccagcttttcaaagagtatggttttggacgcctacagcgagtacgtgaataacttttctactgctgtcgctgtgctgaaaaagacgtgtgccaccaaacctgccttcctggagtttctgaaacaggagcaggaagccagcccggatagaaccaccctgtactcactgatgatgaagcctatccagcgattcccgcagtttatcttgttactccaagacatgttgaagaatacatcaaaggggcaccctgacagattacccctgcagatggcccttaccgagttagagacacttgcggagaagctgaacgaaagaaagcgggacgcagatcagcgttgcgaggtcaaacagattgcaaaggccattaacgagagatatttaaataagctcttgtccagtggatctcgatacctgatcaggagcgatgacatgatcgagactgtgtataatgacagaggcgagatcgtcaagacaaaggagcgacgcgtgttcatgcttaacgatgttctaatgtgcgccaccgtcagctctcggccgtcccacgactctcgtgtgatgtcaagccagcgctatctgctgaagtggagtgtgcctctgggccacgtggatgccattgaatacggatccagcgccggtacaggcgagcattctcgtcacctggctgtgcaccctcctgaatccctggccgtggtggccaacgccaagccgaacaaggtctatatgggcccggggcagctgtaccaggatctccagaatctacttcatgatctcaacgtgattggacagataacacagttgatagggaacttaaagggaaactaccagaacttgaaccagtccgttgcgcacgactggacttctggcctgcaacgtctgattctgaaaaaagaggatgagatccgggccgcagattgctgtagaatccagctgcaactgccagggaagcaagataagtcaggacggccaactttttttaccgccgtgtttaatacgttcaccccggccatcaaagagagttgggtgaatagcctgcagatggcaaaactggctctggaagaagaaaaccatatgggatggttttgtgtggaggatgatggcaatcatattaaaaaagagaagcatcctctccttgtggggcacatgccagttatggttgccaaacagcaggagtttaagattgagtgtgctgcatataaccctgaaccgtatctgaataatgagtctcagccggactcattttctactgcccatggcttcctgtggatagggtcgtgcacccaccagatgggacagatcgcaatcgtgtcattccagaacagcacccctaaagtgattgagtgttttaatgtggagtccaggatcctatgcatgttgtatgtccctgttgaggaaaagcgacgtgaaccaggcgcccctccagatcccgagacacccgccgtgcgagcgagcgacgtgcctactatctgcgtaggtaccgaggaaggaagtatctctatctacaagtcgagccagggcagcaagaaggttaggctgcagcacttttttactccagaaaagtccaccgtgatgtctctcgcctgtacttcccaatccttgtatgcaggcctcgtgaatggggctgtggcttcttacgctagggcgcccgacggatcctgggactccgaacctcagaaggtgatcaaactgggcgtgctacccgttaggtctctgctgatgatggaagataccctgtgggctgcatctggcggacaggtcttcataatatcagtggagactcacgctgtggaaggacagctggaggctcatcaggaagaaggcatggtaatcagccatatggcagtctcaggtgtgggaatttggattgcattcacgtccggttccactttacggttgttccacacagaaaccttgaaacatctgcaggatattaacatcgccacacccgtccacaacatgttgcccggccatcagcgactgtctgtgacaagtctgctcgtctgccacgggctgctgatggtggggacatccttgggcgtgctagtcgctttgcccgttcctcggctgcagggcatcccgaaagtgacaggtcggggcatggtgtcttatcacgctcacaactcaccagtgaaattcatcgtgcttgctactgccttacacgagaaggacaaagataagtcccgtgactccctggctccaggtccagaaccgcaggacgaggatcagaaagatgccctgccatctggcggcgccggctcaagcctctcgcagggcgatcctgacgctgccatatggttaggggattccctgggtagtatgacacagaagagcgatttgagcagttcatctgggtccctcagcctttcccacggttcctcctccttggagcacaggtcagaagattccacaatctacgacctcctgaaggatcccgtctctctgcggagcaaagctcgccgagcaaagaaggcgaaggccagttctgccctagtggtatgtggtgggcaggggcacagacgagtacaccgcaaagcgcggcagccacaccaggaggagctggcccctactgttatggtgtggcaaatcccgttgctcaacatttag

SEQ ID NO: 203384 - DNA, 4107 bp, synthetic construct
  misc_feature 1..4107: note = Description of Artificial Sequence: Synthetic coding sequence
  source 1..4107: mol_type = other DNA
atgcggccccccggcttcctgagccgggcccccagcctgaaccgggccgaaaggggcatctggagttgctccatggatcagcgggagcccctgccacccgcccccgccgaaaatgagatgaagtatgataccaacaacaacgaggaggaagagggggaacagtttgacttcgactccggagacgagatacctgaagctgatcgccaagccccctccgctcccgagactggtggcgccggagcttcggaggctcctgctcccactggcggagaggacggcgccggcgccgagaccactcctgtggccgaacctacgaaactggttttacctatgaaagtcaatccttactccgtcattgatatcaccccctttcaagaagaccagccgcctaccccagtgcctagcgccgaggaagaaaatgtgggtctgcacgtgccctgtggttacttagtccctgtcccctgtggatacgcagtgccttcaaatttacccttgctgttaccagcgtactcatcacctgtaataatctgcgccacctctctggatgaggaggctgagactcccgaagtgacagaggaccggcagcctaattccctgagttccgaagaaccgccaacaagcgaggaccaggtgggacgagaagactccgccctggcgcggtgggccgccgatcctgccaatacagcctggatggagaaccccgaggaggcgatctacgatgatgtgccccgtgaaaactccgatagcgaacccgatgagatgatttatgacgatgtggaaaacggagatgagggtggaaattccagcctggagtatggttggtcgagctctgaattcgaaagctacgaagagcagtctgacagcgagtgtaaaaacggaatccccagatcttttctgcgatcaaatcacaaaaaacagttgtcccacgacctgacaaggctcaaggaacattatgaaaagaaaatgagagatttaatggcttccacggtgggtgtagtcgagatacagcagctaaggcagaagcatgaactgaaaatgcagaaactggtcaaagctgcaaaggacgggacaaaggatgggctggagcggactcgcgccgctgttaagagaggccgctcctttatacggactaaatccctgattgcgcaagatcaccgttccagtctcgaggaggaacagaatctattcattgatgtcgactgtaagcaccctgaagccattctgacccctatgcctgagggactgtcccaacagcaggttgtcagacgctacattctgggttccgtggtggactcagagaagaattacgttgatgcactcaagcgcatccttgagcagtacgagaagcccctcagcgagatggaaccgaaagtcctgagtgaaaggaagctgaagacagtgttctatagagtcaaggagattttacaatgccactctcttttccaaatagctctggcatcaagggtcagcgaatgggatagcgttgagatgatcggtgacgttttcgtggcatccttctcaaaatcaatggttcttgacgcttattctgagtatgttaacaactttagcaccgccgtggcggtactgaagaaaacgtgcgctacgaagccagcctttctcgaatttctgaaggagcaagaggctagtcctgacagaaccaccttgtacagcctcatgatgaaacctatccaacgatttcctcagttcatcctcttattacaggacatgctaaaaaatacgagcaaggggcacccagatcggctgcctctacagatggcgctcacagaactagagaccctggctgaaaagttgaatgagcggaagcgcgacgccgaccaacgatgcgaggtgaaacagattgccaaagccatcaatgagagatacttgaacaaactgctgtcgtccgggtccaggtacctgattcgctctgatgacatgattgaaaccgtgtacaacgacaggggcgagattgtgaagaccaaggagagaagagtattcatgctaaacgacgtgcttatgtgcgctacagtgtctagcagaccatcacatgacagcagggtgatgtcctcccaaagatatctgttaaaatggtctgtcccgttgggacatgtggatgcgatcgagtacggaagcagtgccggcacaggagaacactcccggcaccttgcagtacaccctccggaatccctggcagttgtggctaacgccaagccgaataaggtttatatgggccccggacagctctaccaggacttacagaatttgttgcatgatctgaacgtgatcggccaaatcacccagctgattggaaacctgaaagggaactatcaaaacctcaaccagagcgtcgctcacgactggacttctggccttcaacggctaattttgaagaaagaggatgaaatccgcgctgcagactgctgtaggatacaactccaactgcctggaaagcaggataagtcagggcgtcccacgttcttcactgctgttttcaatacatttactccagcaattaaggaatcgtgggtcaacagcttgcagatggctaaactcgccctggaagaagaaaatcacatggggtggttctgtgtggaggatgacggtaatcatatcaagaaagaaaagcatccgctgctagttggacacatgcctgtgatggttgcaaagcaacaggaattcaagatagagtgtgcagcatataaccccgagccatacctgaataatgagtcgcaaccagatagtttctcaacggcgcacggctttttatggataggcagctgcacacaccagatgggtcagatcgcaattgtgtcgttccaaaactcaacccctaaggttattgaatgctttaacgttgaatcaaggatcctttgcatgctctacgtccccgtggaagagaagcgccgcgaacctggagccccaccagacccagaaaccccggcggttcgggcatcagatgtacctaccatctgtgtcggcaccgaggaaggaagcatatcaatttacaaatcttcccagggttccaagaaagtgagattacaacattttttcacgcctgagaaatctaccgtgatgagtctagcatgtacttcccaatcattgtacgccggcctggttaacggggccgtcgcgagctacgccagagcaccagacgggtcctgggacagtgagcctcagaaagtgataaagctgggcgtgctgcctgtgagatccctgcttatgatggaggacacactgtgggctgcttctggggggcaagtcttcatcatttctgttgagacccatgccgtagagggtcagctggaggcacaccaggaagagggaatggtgatctctcacatggccgtgtccggggtgggaatatggattgcctttacctccggatctacgcttcgcctgtttcacacggaaacgctgaagcacttgcaagacataaacattgctacccctgtgcacaatatgctgcccgggcatcaacggctgtctgtgacatcactcctggtatgccatgggctgttgatggtgggcaccagcttgggagtgctagtcgctctgcctgtgccaagattgcaggggatccctaaggtaacaggccgtggcatggtgagttaccacgcacacaactcccccgtcaaatttattgttttggcaaccgccctgcacgaaaaggacaaggataagtccagggattccttggcgcccggaccagaacctcaggatgaagaccagaaggatgctcttcctagcgggggcgctggctcttctctgtcgcagggcgatccagacgcagcaatctggctgggagacagtcttggttccatgacacagaagtccgaccttagctcctcaagcggctctctatctctctctcatgggtcaagctcactggaacaccgatctgaggacagtaccatttacgatttgctgaaggatcctgtatccctgcggagcaaggcacgcagagcaaaaaaagccaaggcttctagtgccctggtggtgtgcggcggccagggtcacaggagggtacaccgaaaggcccggcagccccatcaggaggaactggctcctacagtgatggtgtggcagattcccctcctcaacatctag

SEQ ID NO: 203385 - DNA, 2949 bp, synthetic construct
  misc_feature 1..2949: note = Description of Artificial Sequence: Synthetic coding sequence
  source 1..2949: mol_type = other DNA
atgctgcccagcagcagctggggcaagcggaagctgcggggccggctgggctgggtgcgtagcgatgcgaggggtgtcatgtgggccaggcaagaaggcctacatcaccctcatccacatgccgttatcaggtgcccgagcagcagctcttcgagcgtgtcgtgttctggagacagcgaggaggaggatatggggttgctggaggtgtcagtaagcgatattaaacctccagcccctgaattgggcccgatgccagagggcctgtcacctcagcaggtggttcgccgccacattctggggtccatagtgcagtcggagggatcctatgttgaatctttgaagcggattctgcaagactaccgaaaccctctcatggagatggagccaaaggcgctgtcagcccgtaagtgccaagtggtcttctttcgtgttaaagagatactacattgccattccatgttccagatagctctcagttccagggtggctgaatgggattccaccgaaaagattggagacctgttcgttgcgtcggacatgctgaagaacactccccgcggacatcccgaccgactgtcgttgcagctagccctcacagagctcgaaaccctggcggaaaagctcaacgaacaaaaaagactggcagatcaggttgccgagatccagcagctgaccaaatccgtttctgaccggagttccctgaacaagctgctaaccagcggccaacgacagcttctgttgtgcgagacactaacggagaccgtatacggcgatagaggccagcttataaaatcaaaggagagaagagtgttcctgctcaacgacatgctcgtttgtgcaaacattaatttcaaggggcagctggagatctcttccctcgttccactgggacccaagtacgtagtaaaatggaatacggctctgccccaggtccaagtggttgaggtcgggcaggatggagggacctacgataaggacaacgtattaattcaacactctggggccaagaaagcatccgcctccggtcaggctcagaacaaggtgtatctcggccccccgaggcttttccaggagctacaggacctgcaaaaggacctcgccgtggtcgagcagattaccctgctgattagcaccttacacgggacgtaccagaatctcaatatgacagtggcccaggactggtgtctcgccctgcagcgccttatgagggtgaaagaagaagaaatacatagcgccaataaatgtaggttgcgcttgcttctaccagggaaacctgataaatccggacgacctattagcttcatggtggtctttatcacccctaacccgttgagcaagatctcctgggtaaacagactgcatctggcaaaaatcggcctgagggaggagaatcagcccggatggctctgccctgatgaggataagaaaagtaaagcccccttctggtgtccaattctggcctgttgtattccagcctttagttctagagccctttcattacagctaggggccctagtgcacagccctgtgaactgccccctcttgggattctccgctgtgtccacgtcactcccacagggctatttatgggtcggaggcggtcaggagggagcagggggacaagtcgagattttctcactcaaccgaccaagcccccgcacagtcaaaagcttccctttagccgcccctgtgttgtgtatggagtacattcctgaactggaggaagaggccgagagtcgagacgaaagtcctacagttgccgacccctccgcgacggtacatcccactatttgcctgggcctgcaagatggtagtattcttctgtattccagtgtagacacaggcacccaatgcttagtgtcctgccggtcaccgggtctccaacctgtgctttgtctccgtcacagtcccttccatctgctggcaggtctccaagacggaacattggctgcctacccacgcacttccggcggcgtgctttgggacctggagtccccacctgtttgtctcaccgtgggcccaggacccgtacgcaccctactcagcctggaagatgctgtttgggcatcgtgtggaccctgggtcactgtactggaagcgaccactttgcagccccagcagtccttcgaggcccatcaggacgaggctgtgtccgtgactcatatggtaaaggcggggagcggagtgtggatggcttttagctctggaacttctatccggcttttccataccgaaaccctcgaacacctacaggagattaatatcgccacccgaactacatttcttctgcctggccagaagcatctttgtgtgacaagcttactcatttgtcaaggactgctctgggtaggtaccgatcagggggtcattgtcctcctgccagtaccgcggcttgagggcattcccaagatcacaggtaaggggatggtaagtcttaacggccactgcggacctgtggccttcctggctgtcgcaacaagtatactcgcgcctgatattctgcggtccgatcaggaggaagccgaaggaccaagggctgaagaggacaagcctgatggccaggcccatgaacctatgccggattcacacgtggggcgcgaactcactaggaagaaaggaatccttctgcagtatagactgcgctccactgctcatctgcccggaccccttctcagcatgcgcgagccagcacccgcagacggtgctgctcttgagcactcagaagaggacggatccatctatgaaatggccgacgatccggatatttgggtgcgctccaggccatgtgcccgcgacgcacaccgaaaggaaatctgttccgtcgcaatcatctcaggtggccaaggctaccgaaacttcggatccgcccttggctcaagcggacggcaagctccctgtggagagactgacagtacattgctgatctggcaagtacccctgatgttatag

SEQ ID NO: 203386 - DNA, 3840 bp, synthetic construct
  misc_feature 1..3840: note = Description of Artificial Sequence: Synthetic coding sequence
  source 1..3840: mol_type = other DNA
atggccagcagcaacccccccccccagcccgccatcggcgaccagttagtcccaggggtgcccgggcccagctctgaggccgaggatgaccctggtgaggcttttgaattcgacgatagcgacgacgaagaggacacctcagccgccctcggggtaccttcgctggctcccgaacgggatacagatccacctctgatccatcttgactccatacctgtaacggaccccgaccccgccgctgctcctcctggcactggagtaccagcttgggtgagtaacggggatgcagctgatgctgccttcagcggggcccgacactcttcgtggaaaaggaaaagtagtcgtagaattgatcgatttaccttccccgccttggaagaagatgttatttacgacgacgtgccctgtgaatcccccgatgctcatcagcccggagctgaaagaaacctgctctacgaggatgctcaccgggctggcgctccacgccaggcggaggatctcgggtggtcttcatctgagtttgagtcgtacagtgaagattccggggaagaagcaaagccagaagtggaggttgagcctgcaaaacacagggtgagtttccaacccaagctaagtcccgacctgacaagactgaaagagcggtacgctcgcacgaaacgggatatcctggctttgcgcgtcggtggcagggacatgcaggaactcaagcataaatacgactgcaagatgacacagctaatgaaagctgctaagagtggaactaaggacggattggaaaagacacgaatggccgtgatgcgtaaagtgagcttcctgcataggaaggatgtgctgggcgactccgaggaagaggatatgggactgcttgaagtctctgtgtcagatatcaagcctccagcaccggagctgggcccaatgcctgagggactgagcccccagcaagtggttcggagacatatcctggggtctatagttcagtcagaaggtagttacgtggagtcactaaagagaatactgcaggattatcggaatcctttgatggaaatggaacctaaggctcttagtgctagaaaatgtcaagtggtatttttccgggtgaaggagatcctgcattgtcactccatgttccagattgccctttcttcaagagtggccgagtgggatagcaccgagaaaatcggggacctgttcgtcgcaagcttttcgaaatcaatggtactggacgtctacagcgactatgtgaataacttcacttccgccatgtccataatcaagaaagcctgcttgacaaaacccgccttcttagagttcctaaagcgtcgacaagtgtgtagtccagatagagtgaccctgtacggtctgatggtcaagcccatccagcggttccctcagtttattctgttgctgcaagatatgttgaagaacaccccccgtggacatccagacaggctttcactgcagttggctctcaccgagctagaaaccctcgccgagaagctgaacgaacagaagcgcctggccgatcaagttgcagagatccagcagctgacaaagtccgtctcagatcgctctagcttgaacaagctcttgacttcagggcagcgccagctgctcctttgcgaaaccttaacagaaacagtttatggcgaccgtggacagctcatcaaaagtaaagagcggcgggtgttcctgctcaacgatatgctggtgtgtgccaacatcaatttcaagccggcaaatcacagagggcagctggaaattagttccttggtgcccctcggtcccaagtacgtcgtgaaatggaatactgcccttccccaggttcaggtcgtcgaggttgggcaggacgggggcacgtacgataaggacaatgtgctgattcagcacagcggcgcaaaaaaggcctctgcctccggacaggcccaaaacaaagtttatctgggccccccccggctattccaagagctgcaggaccttcagaaggacttagctgtcgtggaacaaattactttgctgattagtaccctgcatggaacgtaccagaatctcaatatgactgtagcacaggactggtgcctggctctgcagagattgatgcgagtcaaggaagaagagatccacagcgctaataagtgccgcctgcgtctgctcctgcctggcaaaccagataaatcggggaggccaatttcattcatggtggtgttcattactcccaacccactttccaagattagttgggtgaatcggctgcacttagcaaaaatcggactgagggaggaaaatcagccgggctggctttgccccgatgaggacaagaagtccaaggctcccttttggtgcccaattctggcctgctgcattcccgccttttcgtcccgggctctgagtctccaactgggagctctggttcatagtcccgtcaactgtccgcttctcggcttcagtgcggtaagcaccagtctgccacaggggtatttgtgggtcggcgggggacaggagggtgcaggcgggcaagtggaaattttctcgctgaaccgcccttcacctcgcaccgtgaagagttttcctctcgccgccccggtcctgtgtatggagtacataccagagctggaagaagaagccgaatccagggacgagtcccctacggttgcagacccctctgccacggtccaccctacaatctgcctcggcctgcaagacggctccatcctgctttattccagcgtggacacaggtactcagtgtctggtctcctgtaggagcccagggctgcagccagtattgtgtctgcgccattctccattccacctgcttgccgggttacaggacggcaccctcgccgcttatccccgcacatcaggaggcgttctctgggacctggaaagccctcccgtgtgcttgactgtcggacctgggcctgtccgcacgctgctatccctggaggacgccgtgtgggcaagctgcggcccatgggtgaccgtacttgaagcaacaactctccagccacaacaaagctttgaagcacatcaagatgaggctgtctcggtcacacatatggtgaaagcaggcagtggtgtctggatggccttctctagcggtacatcaatccgtttatttcacaccgaaactctcgaacacctgcaagagatcaacatcgcaactcggaccaccttcctgttgcctggccagaaacacctgtgcgtgacttccctgctcatttgtcaaggcctgctctgggtgggaaccgaccagggagtgattgtgctgttaccggtgccaagactcgaaggcatccccaagataacgggtaaagggatggtttctttgaatggccactgcggccctgtggcatttctggctgtcgcaacaagcatcctggctccagatatattgaggagtgatcaggaagaggccgagggccctcgcgcggaagaggataagccagacggacaagcacatgaaccaatgcctgactcacatgtgggtagggagctgactcgtaagaaggggattctgttacaataccgcttgagaagcactgcccaccttccgggtcctctcctgtctatgagggaaccggcacccgcagacggtgcagcactcgagcattcagaagaggatggatccatctacgaaatggctgatgatcctgatatctgggtacgcagcagaccttgcgcacgtgatgcccataggaaagagatttgcagcgtcgcaataatatccggcggtcagggttaccggaatttcgggtccgctctcggaagttcaggtcgccaggctccctgtggagagactgacagtaccttgctcatatggcaagtgcctctcatgctctag

SEQ ID NO: 203387 - DNA, 3159 bp, synthetic construct
  misc_feature 1..3159: note = Description of Artificial Sequence: Synthetic coding sequence
  source 1..3159: mol_type = other DNA
atgctgcccagcagcagctggggcaagcggaagctgcggggccggctgggatgggtgagatccgacgccaggggcgtgatgtgggccaggcaagagggcctgcatcatccccatcctcacgccgttattcgatgcccatccagctctagcagctcggtgtcttgtagcggcgattctgaggaggaagacatgggtttgctcgaggtgtccgtctcagacatcaaaccccctgcccctgagctcggaccgatgccggaaggccttagccctcagcaggtcgtgcgacgtcatatactcggatccatagtgcagagcgagggatcttacgtcgagagcctcaagcgaatcctacaggattaccgcaatccacttatggagatggagcctaaagctctgtcggcccgcaaatgccaggtggtctttttccgcgtcaaggagatcttgcactgtcactccatgttccagattgccctaagttctagggtggccgagtgggattctacagagaagatcggtgacctgttcgtggcctctttctccaagtcaatggtgctggacgtatacagcgactacgtcaataatttcacaagcgctatgtccatcattaagaaggcctgcttaacaaaacccgcattcttggaatttctcaaacgacggcaggtgtgcagcccagatcgcgtgaccctttacggattaatggtgaaaccaatacagaggtttccccagtttatcctcctgctccaggacatgctgaagaatacccccaggggccatccagaccgcctgagtctgcagctggcattgacggaactggaaaccctggcggagaagcttaatgaacagaagcgcctcgcggaccaggtcgccgagatccaacagctcaccaagtctgtgagcgatcggtcttctctcaacaagctgctgacttccggccagcggcagctcctattatgtgagaccctgacagaaaccgtttatggagaccgaggccagttgataaagtccaaagagaggagggtatttctgctgaacgacatgctcgtttgcgcaaatattaattttaaaggacaattggaaatctcatctctggtgccgctgggaccgaagtacgttgtcaaatggaacacagcactgccgcaggttcaagttgtagaggtaggacaagacggaggtacatacgacaaggataatgtactcattcagcactcgggggccaagaaggcttcagcctcggggcaggcacaaaacaaggtatatctggggccaccgaggctatttcaggagcttcaagatctgcagaaggatctcgctgtagtggaacaaattacattgctcatctccactctccacgggacctaccagaacctgaacatgacggtggcccaagattggtgtctggctcttcagaggctgatgcgcgtcaaggaggaagagatccatagtgcgaacaaatgccgactgagactgttgttgcctgggaagcccgataagtctggcagacccatttcttttatggtcgtgtttatcacgcccaacccacttagcaagatatcgtgggtcaacaggttgcatttagctaagatcggattacgcgaggagaaccagcccggctggctgtgtcctgacgaggacaaaaagtccaaagccccgttctggtgtcccatcttagcatgctgcattcctgctttcagctctcgcgccttaagcctgcagctgggggcactggttcactcccctgtgaactgtccactgctcggattctccgccgtgtcaacttcgctcccgcagggctatctgtgggttggcggagggcaggagggggccggagggcaagtagagatcttttcgctcaaccggcccagcccaaggactgtgaagtctttcccactggctgcacctgtgttgtgtatggagtatattcctgagttggaggaagaagcagaatctagagacgagagcccaaccgtcgccgatccctccgctacggtacatccgaccatttgtctggggcttcaagatgggtccattctgctgtattcttctgtggacacgggaacacagtgcctagtctcttgccgctccccaggtttgcagccagtgttgtgtctccgacacagcccctttcaccttctggcgggtctccaggatggaaccctggccgcctacccgcgcacctcaggcggggtgctctgggacctcgaatcacctcccgtatgtcttactgtcggtccaggtcccgtccggaccctgctatctctggaggacgccgtctgggcatcttgcggtccgtgggtgacagtccttgaagctacaacacttcagcctcagcagtcatttgaagcccatcaggatgaagccgtttccgtaacacacatggtcaaagccggatctggtgtgtggatggcattttctagtgggacatcaattagactgttccatactgagacattggagcacctccaggaaatcaacatagccacgcgtaccacctttctgctcccagggcaaaagcacttgtgcgttacaagcctcttgatttgtcagggcctgctgtgggtggggaccgaccagggggtgatcgtcctcctgcccgtaccacgactggagggcatcccaaagataactggcaagggcatggttagcctgaacggacattgcggccccgtcgcttttctcgccgttgcaacgagtattcttgctcccgatatcctgaggtcagatcaagaggaagctgaaggaccgagagcagaggaagataaacctgatgggcaggcccacgagccgatgcccgattcccatgtcgggcgagagctgacacggaagaaagggattctattacagtatcgcttaaggagcacagcgcacttgcctggccccctgctgtccatgcgcgaaccagctcctgcagatggagccgccttggagcattccgaggaggatgggagcatctatgaaatggccgacgatccagatatatgggtgcggtccagaccatgtgccagggacgcccatcggaaggagatctgttctgtggccatcatctccggcggacagggctaccgcaatttcggaagcgcccttggctcatccggtagacaggctccgtgcggggagactgatagcaccctcctaatttggcaggtgccgctcatgctatag

SEQ ID NO: 203388 - DNA, 3723 bp, synthetic construct
  misc_feature 1..3723: note = Description of Artificial Sequence: Synthetic coding sequence
  source 1..3723: mol_type = other DNA
atggccagcagcaacccccccccccagcccgccatcggcgaccagctggtgcccggcgtccctggcccttcctcagaggccgaggatgatcccggggaagcattcgagtttgacgatagcgacgacgaagaagacacatctgccgccctgggcgtcccaagcctcgcaccggagcgcgatacagacccgccactgatacatttagatagcatcccagtcacggacccagaccccgccgctgcaccccctggcacgggggtccctgcttgggtgtctaatggggatgcagccgatgccgcgttttcaggagccagacatagtagttggaagagaaagagttctcggaggatcgataggttcacttttcctgctctagaggaggatgtgatctacgacgatgtaccatgcgagtctcccgacgcgcaccagccaggagcagagcggaatctcctgtatgaagatgctcaccgggctggagctcctagacaggccgaagacctcggctggtctagcagtgagttcgagagttacagcgaagattccggagaagaggcaaaaccagaggtggaggttgagcctgctaaacacagagtcagtttccaaccaaagatgactcagctcatgaaagcagctaaatcaggtaccaaggatggattggagaagacccgtatggcagttatgagaaaggtttccttcttgcacagaaaagacgtgctgggggactccgaagaagaagacatgggcctattggaagtgtcagtgtccgatatcaagcctccagcccctgagttgggccctatgccggagggtctgagccctcagcaggtcgtccgcaggcatatcctgggcagcatagtacaatctgaagggtcttatgtggaatcactaaagcgcatcctgcaagactatcgaaatcctctgatggagatggaacctaaggcactcagtgccaggaaatgccaggtcgtgtttttccgagtaaaggagatactgcattgccacagtatgtttcaaattgccctgtcttcccgagttgcagagtgggactctactgagaaaatcggggatttattcgtcgctagcttttcgaagtctatggtgctggacgtgtattcagactacgtgaataatttcacgtccgccatgtccattattaagaaggcctgtctgactaagccagccttccttgagttcctgaagcgcaggcaggtgtgtagtcccgaccgagttacgctctatggtctcatggttaaacctattcagcgcttcccccagttcatcttacttctgcaggatatgctaaaaaatactccccgaggccatccagataggctttcattacagctggccttgaccgagctggaaacactggctgagaagctaaacgaacagaagaggctcgccgaccaagtggctgaaatacagcagttgacaaagagtgtatccgataggtcatccctgaataagctccttactagtggccagaggcagcttctgctttgcgagacacttaccgaaactgtgtacggagataggggacagcttatcaagtccaaggagaggagagtgttcctgctcaacgatatgctggtgtgcgccaacattaactttaagcccgccaaccatcgggggcagctcgaaatctctagcctggtcccactgggacctaaatatgtggtgaaatggaataccgccttgccacaggtgcaagtggtggaggtcggacaggacggaggaacttatgataaggataatgtgcttatccagcatagcggcgccaagaaggcatccgcctctggccaagctcaaaacaaggtctaccttggtcctccccgtctttttcaggaactgcaggatctgcagaaggacttggcggtagtggaacaaataacgctgctcatcagcactctccacgggacatatcagaacctgaatatgacggtggctcaggattggtgtctggctctccagaggctgatgcgagtaaaagaagaggaaatacatagtgccaataaatgtagactccgtctcctgctccccggcaagcctgacaaatctggtaggcccatttccttcatggtggtgtttatcactcccaatcccctttctaaaatcagttgggtcaacaggctccatctggcaaagatagggctccgcgaggaaaaccagcctggctggctgtgtcccgacgaagacaagaagagcaaagccccattctggtgtcccatcctcgcttgctgtatccccgcgttctcctccagagctttgtctttgcaacttggcgctctcgtccacagcccagtaaactgtcccctgttagggtttagcgctgtttctacctccctgcctcagggctacctatgggtgggcggtggccaagagggggccggggggcaggtagagatctttagcctgaaccggccatcacctagaaccgtgaagagctttccactggcagcgccagtattatgcatggagtatattcccgagctggaggaagaggccgagagccgcgacgagtcccccaccgttgcagaccccagcgctaccgtgcaccctactatctgcctcgggctgcaagacggcagcatcctgttatattcaagcgttgatacagggacccagtgtctcgtcagctgtcgctcacccggactccagccagtgctgtgcctacggcattctccattccatctgctggctggcctgcaggatggcactctggctgcctacccgcgcacctctgggggagtcctttgggatttagaatcacctccggtgtgcctcaccgttggaccaggtcctgttagaacactcctatctctcgaggacgcagtctgggccagttgtgggccatgggtgaccgtcctggaagccactacactgcaaccgcaacagagttttgaagcgcatcaggatgaagctgtctccgtgactcatatggtcaaggccggcagtggcgtgtggatggccttttcatcaggtacctccatcagactgttccacaccgagacactcgagcatttacaggaaatcaatatcgctacacggactactttcctgcttcctggccagaagcacttgtgtgtcacctccttgctgatctgccaggggttgctttgggtcggtactgatcagggagtgatcgtcttacttcccgtaccccgattggaaggtatcccgaagatcactggcaaaggaatggtgagtctgaatggccattgcggcccagtagcatttctcgccgtcgccacttctattttggccccagacattttaagatctgaccaggaagaggctgaggggccacgagctgaagaggacaagcccgacggccaggcacacgaacctatgccagactcacacgtcgggagagaactgaccagaaaaaaaggcatcttgctacagtatcgtctgcggtctacagcccacctgcccggtcccctcctgagcatgcgggagcctgccccagcagacggagccgccttagaacatagtgaggaggatgggagcatttatgagatggccgacgatccagacatttgggtgcgtagtaggccctgtgctcgcgatgcacacaggaaggagatctgtagcgtcgccatcatctctggtggacagggctataggaattttggcagtgcattgggttctagcggccgccaagcaccctgcggcgagaccgactcgactctcctgatatggcaggttccactgatgttatag

SEQ ID NO: 203389 - DNA, 1467 bp, synthetic construct
  misc_feature 1..1467: note = Description of Artificial Sequence: Synthetic coding sequence
  source 1..1467: mol_type = other DNA
atgacccagctgatgaaggccgccaagagcggcaccaaggacggcctcgagaaaacccgcatggcggtgatgaggaaggtgagcttcctccaccggaaggatgtcctaggagattccgaagaggaagacatgggactgctggaagtttctgtctccgatatcaagcctcccgccccagagctgggcccaatgccagaggggttatctccacaacaggtggtgaggcgccatattttgggcagcatagtgcaatccgagggaagttacgttgagtcactgaagaggattttacaagactataggaatccactgatggagatggaacctaaggctttgtcagcccgcaaatgccaggtcgtgttcttccgggtgaaggaaatactccactgtcacagcatgtttcagattgcactcagctctagagtggccgagtgggattccacagagaaaattggtgatctattcgtggccagtttctcaaaatccatggtactagacgtctatagtgattacgttaataattttacatctgccatgtcgatcatcaagaaagcatgtctgacgaagccagcatttctggaattcctcaaacgacggcaagtatgctcccctgatagagtcactctgtatgggctgatggtcaagccgattcaacgctttccccagttcattttactgctgcaagatatgctgaaaaatacgccccggggccatccggatcgcctgtccctgcagctcgccctgaccgagctggagaccctagcagagaagctcaacgaacaaaagagactcgctgatcaggtggctgaaattcagcagttgactaagtctgtctccgaccgttcaagccttaacaaactactgactagcggtcagagacaactattgttgtgcgagacgctgactgagaccgtgtacggagacagaggccagttgatcaagagcaaagaacgcagagtatttctcctcaatgacatgcttgtctgcgcgaacatcaactttaaacccgccaatcatcggggacagctcgaaattagctcactggtccccttggggcctaagtatgttgtaaagtggaataccgcccttcctcaagtccaagtggtggaggttggccaggatggcggaacgtatgacaaggacaatgttctgatccaacactcaggtgctaaaaaggccagcgcgagcggtcaggcacaaaataaagtgtatctgggcccccccagattattccaagaactgcaggacctgcagaaagatctggcagtggtcgaacagatcactctcttaattagcaccctccacgggacgtaccaaaatctaaatatgaccgtggctcaggattggtgtctggccctgcagagactgatgcgcgtcaaggaagaggagatccattctgctaataagtgccggctccggctgcttcttccaggcaagcccgacaagggaacgtggtccgacatgtag

SEQ ID NO: 203390 - DNA, 3204 bp, synthetic construct
  misc_feature 1..3204: note = Description of Artificial Sequence: Synthetic coding sequence
  source 1..3204: mol_type = other DNA
atggccagcagcaacccccccccccagcccgccatcggcgaccagctagtgccaggagtgccgggaccgtccagcgaagcggaagacgaccccggggaggcatttgagtttgatgattccgacgatgaggaagacacctcagccgctctgggtgtgcctagtctggcaccggagcgcgacaccgacccacccctcattcatctggattccattccggttacagaccctgacccagcggccgcccctccagggacgggagtgccggcctgggttagtaacggagatgccgctgatgctgccttcagtggagcgcggcatagctcttggaagcgtaaaagtagcaggaggattgaccgctttactttccctgcccttgaggaggacgtgatttacgacgacgtgccctgcgaatccccagatgcccatcaaccaggcgcagaacggaatctgctctatgaggacgcccaccgcgccggggccccacgtcaagctgaagacctaggatggtcctcatctgagtttgagtcttattccgaagacagcggtgaagaggcgaagccggaagtggaagtcgagcctgcaaaacaccgtgtgtctttccagccaaaactgagtccagacctgaccagattgaaggaacggtatgcccgcactaagagagacattttggctctgcgggtgggcggtcgcgatatgcaagaacttaaacacaagtatgactgtaagatgactcaactcatgaaagccgctaaaagtggcacaaaagatggactcgaaaagacgcggatggcagtgatgagaaaggtaagctttcttcaccgcaaggatgtgctgggtgatagcgaagaggaggatatggggcttctcgaggtgtccgtgtctgatattaagccgcctgctcccgaactggggccgatgcctgagggactgtcgccacagcaggttgtcaggcgtcatatccttggctcaattgttcagtcagaaggttcatacgtggagtcacttaagcgcattttgcaggactataggaaccctcttatggagatggagccgaaggccctcagcgctcgtaaatgtcaggttgtgttcttcagagtgaaagaaatcctgcattgccacagtatgttccagatcgccctgagctccagggtcgccgagtgggattccacagagaaaattggcgacctgttcgttgcgtccttctcaaagtccatggtgctcgatgtgtattctgattacgtaaacaacttcacaagcgccatgtccataataaagaaagcttgcctgactaaaccagcttttctggagttcttgaagaggcgacaggtgtgctctccagatcgggtgaccttatacggacttatggtaaagcccattcagcgcttcccacagttcatccttctgttacaggacatgctgaaaaatactcccaggggtcaccccgatcgcttaagtctgcaactggccctgacagagctcgaaaccctggctgagaagttaaatgagcagaaacgtttggcggaccaagtcgccgagatccagcagttgaccaaatctgtttccgatcggagtagtctgaataaactactgactagcggtcagaggcagctactgctatgtgaaaccctgactgagaccgtttatggagaccgaggccagctgatcaagtccaaggagcgcagagtctttctgctcaacgacatgctggtttgtgcgaacatcaattttaagggccagctggaaatcagctctctggtccccctgggtccgaaatatgtcgttaagtggaacactgcactgcctcaggtccaggtcgtggaagttggtcaggatggtgggacatacgataaggataatgtgctgatccagcactccggcgccaagaaggcctccgcatcaggacaagcacagaacaaagtctatctgggcccccctagacttttccaagaactgcaggatctgcagaaagacctcgccgtcgtagaacagattaccctgcttatctcaacactgcacggtacataccaaaatctcaatatgacagtggcacaggactggtgcctggcactacaacgacttatgcgcgtgaaggaggaagagatccattccgctaataaatgcagactcagattgctgctcccgggtaaacccgataaaagcggaaggcccatctcttttatggtcgtattcatcacgccaaaccccttatccaaaatttcctgggtgaaccgtctgcacctggccaaaattggactcagagaggagaaccagcccggatggctctgcccagatgaggacaagaagtccaaggcacctttctggtgcccaattctggcatgttgcatcccagcattctcttctcgggctctgtcactccagttaggcgccctggtgcacagccccgtgaactgccctctcttagggttttccgccgtcagcacctctttgccccagggctacctgtgggtgggcggtggtcaggaaggagcagggggccaggtggagatatttagtcttaatcgaccctcaccgagaacagtgaaaagctttcctttggcagccccagtgctctgtatggagtacattcccgaacttgaagaagaagccgaaagtagagacgaatcacctaccgtggccgacccgtcggccacagtacacccaacgatctgcctgggtcttcaagatggatcaatactgctgtacagctccgtcgataccgggacccagtgcttagtttcgtgccggagtcccggcctgcagcccgtactctgtttgaggcattcaccttttcatctgcttgcaggattgcaggacgggacgctggccgcttacccgcgtacgagcgggggagtgctttgggacttggagagccctcccgtttgtctaacagtggggcccgggcctgttcggacgctgctgagtctcgaggatgcagtgtgggcttcctgcggtccctgggtcaccgtgcttgaggcgactaccttacaaccgcagcagtctttcgaggcccaccaggatgaggctgtctcagttacacacatggtcaaggcaggctccggcgtgtggatggctttttcatccggaactagcatccgcctgttccatactgaaacacttgagcatcttcaggagatcaacatagcaacacgcacaaccttcctgctgcccgatcggagcttgatcaaatgttctccccgtgcttag

SEQ ID NO: 203391 - DNA, 3723 bp, synthetic construct
  misc_feature 1..3723: note = Description of Artificial Sequence: Synthetic coding sequence
  source 1..3723: mol_type = other DNA
atggccagcagcaacccccccccccagcccgccatcggcgaccagctggtgcctggagttcctgggccaagctccgaggctgaggatgaccccggcgaggctttcgaatttgacgactcagatgacgaggaggacacctcggcagccctgggcgtcccatccctggctcccgaacgagacacggatccccctctaatccacttggatagtattcccgtgactgatccagatccggccgcagcacccccgggaactggcgtacccgcatgggtgagcaatggtgacgcagcagatgccgcctttagcggggctcgccactcaagttggaaacgcaagtcttctcggagaatagaccgctttacattccccgctctcgaggaggacgtgatctacgacgatgtgccttgtgaaagtcccgatgcccatcagcccggggcagagcgaaatctgctgtacgaggacgcccaccgggccggggccccacgccaggcagaggacctcggctggagttccagcgagtttgaatcctacagtgaagactcaggtgaggaggcaaagcccgaggtcgaagttgagcccgcaaagcacagagtctcgttccagcctaaaatgacacagctgatgaaggctgcaaagagtgggacaaaggacggcctggaaaagaccaggatggccgtgatgcgaaaagtctcattcctgcatcggaaggatgtcttgggcgattccgaggaggaggatatgggcctgctcgaagtgtcagtgagtgatattaagccacccgcacccgaactcgggcctatgcccgaagggttgagcccccagcaggtcgtaagacgccatattctgggatctattgtgcagtccgagggatcgtatgtggaatcactcaaacgcattctgcaggattaccggaatccattgatggagatggagcccaaggctctctctgcacgcaaatgccaggtggtcttttttcgggttaaagagatccttcactgccactctatgtttcaaatcgctttatcatccagggtcgcggagtgggatagtacagaaaagatcggcgacctgttcgtcgcttccttctccaagtcaatggtgctcgacgtttatagcgactacgtgaacaacttcaccagcgcaatgtctatcattaagaaggcgtgcttgacgaagccagcattcttggagttcttaaagcggcggcaggtctgctcaccagatcgagtgactctgtatggacttatggtcaagcctattcagaggttccctcagtttatcctgctgctgcaggacatgctaaagaatacaccccgaggccatcctgacaggctgtctctccagctagcgttaactgaactcgagactcttgccgagaaactcaacgagcagaagcgcctggctgaccaggtggccgagatccagcagctgacaaagtctgtgagcgacagatcctctttgaataaattgctgacatccggacagcggcagctgcttctgtgtgagaccctgacagaaactgtgtacggagaccgggggcagttaatcaaatccaaggaaagacgcgtcttcctgctcaatgatatgctcgtgtgtgccaacatcaactttaaaccagctaaccaccgcggccagctggagattagctctctcgtacccctaggtccaaagtatgtggtgaaatggaatactgccctccctcaagtgcaggtcgttgaggtggggcaagacggcgggacttacgacaaggataatgttctgatccagcatagcggagcaaagaaggcttctgcttccggtcaggcacagaacaaagtgtacctaggaccaccacggctgtttcaggaactccaggacctgcagaaagacttagctgtcgtagaacaaattaccctgctcatcagcacactgcacggcacataccagaacctcaatatgaccgtagcccaggactggtgcctggccttacagaggttaatgcgggtgaaggaggaggaaatccacagcgcaaataaatgcaggcttcggttgctgcttcccggcaaacccgacaagtcaggcaggccaatcagttttatggtcgtgttcatcacgcccaaccccctgtccaagataagctgggtgaaccggttgcacctcgcaaaaattggcctgagagaagaaaaccagccgggatggctctgccccgacgaggataagaaaagcaaggcacctttctggtgccccattttggcatgctgcatcccggcgttcagcagccgcgctctctcgctccagcttggggcactggttcactcccccgtgaactgtccgctgctgggcttctccgcggttagtaccagcttgcctcagggctatctgtgggttggaggaggacaagagggagccgggggtcaggtggagatctttagcctcaatagaccttcccctcgcaccgtgaagtcattcccgcttgccgctcctgtattatgtatggagtatattcctgagctggaagaagaggcagaatcgagggacgaaagccctacggtggcagacccatcggccacggttcatccaaccatttgccttggtctccaggacggcagtatcctgttgtactcctctgtggacacgggtacgcaatgcctcgtttcctgccggagcccagggctccaacccgtgctgtgcctcagacattccccatttcacctcttggccgggctgcaagacggaacgctcgcagcgtatccccgaacatcagggggcgtgctgtgggacttagaatccccacccgtatgcctgaccgtcggtccaggaccggtgcgcacactgctttctctggaagacgccgtgtgggcctcctgtggcccctgggtgaccgttctcgaggccaccactctccaaccccagcagtccttcgaggcacaccaggatgaggctgtgtctgtcacccacatggttaaggccggctctggtgtatggatggcgtttagcagtggaactagtataagacttttccatactgaaactctagaacatctccaagaaattaacatcgcaacccgtacgactttcttgctgcccggccagaaacacttgtgcgtgacctcactgttgatctgtcaggggctcctgtgggttgggacagatcagggagtaatagtgctgttgcctgtcccgcgactggaaggcattccaaagattactggaaaggggatggtttcgcttaatggccactgtgggcccgtggctttcctcgccgtagccacctctattctggctcctgacatcctgagatccgaccaagaggaggctgaggggccgcgcgccgaagaggacaagcccgacggccaggcccatgagccaatgccagattcacacgtgggcagggaactcacccggaagaagggaatcctgctgcagtatcggctgagatccaccgcccatcttccaggcccgctgctgtcaatgcgggaacctgctccagccgatggggcagctctggagcactcagaagaggatggtagtatttacgagatggcagacgacccagacatatgggtcagaagccggccatgtgctagagacgcacaccgcaaagaaatttgctccgtcgccattatatcaggcgggcaagggtacagaaattttggatccgcactggggagcagcggacggcaggctccctgtggagagaccgatagcacattgctgatctggcaagttcctctgatgctctag

SEQ ID NO: 203392 - DNA, 3129 bp, synthetic construct
  misc_feature 1..3129: note = Description of Artificial Sequence: Synthetic coding sequence
  source 1..3129: mol_type = other DNA
atgctgcccagcagcagctggggcaagcggaagctgcggggccggttgggttgggtgcggtctgatgcacggggagtaatgtgggcacggcaggagggcttacaccaccctcacccccacgccgttatacggtgcccctcatcctctagtagctccgtctcatgcagcggagactctgaagaggaggacatgggcctactcgaagtttctgtcagcgacattaaaccacctgctccagagcttggccctatgccagaggggctgtctccacagcaagtggtgcgccggcatatcctgggcagcatagtgcagtcagaaggaagctacgtcgaaagtttgaagaggattctccaagattaccggaaccctttgatggagatggagccaaaggctttgagcgccaggaagtgccaggtcgtgttctttcgcgttaaggaaatcctgcactgccacagtatgttccaaattgccttgtccagccgtgtggctgaatgggactccacggagaagatcggagacctctttgtcgctagcttctcgaagagcatggtcctggatgtctattctgactacgtaaataatttcaccagcgccatgtctataattaaaaaggcctgcctaacgaaaccggcgtttctagaatttctgaagcgcaggcaggtgtgctctcccgatcgtgtaaccctatatggcctgatggttaaacctatccagagatttccacaatttatactactcctgcaggacatgctaaaaaataccccgcgaggccaccccgatagactgagcctgcaactggctctgacagagctggagactctggcagagaaacttaacgagcagaaaagactcgccgaccaggtggccgagattcagcagctgaccaagtcagtgtcagaccggtccagtctcaataagctcctgacgtctggccagcgccaactactgctctgtgagacattgacagagaccgtatacggtgaccgcggtcaactaattaagtctaaagaaagaagagtgttcttactgaatgacatgctcgtgtgcgcaaacattaattttaaaggccaattggagatatcctctcttgtcccactcggcccaaaatacgtggtcaagtggaacaccgcactcccccaggtgcaggtggtcgaggttggacaagatggggggacatatgacaaggacaatgtgcttatccagcattccggcgcaaaaaaagcctctgctagtggacaggcacagaataaggtctacctggggccccccagactttttcaggagcttcaggatctgcagaaggacttagcagtcgtggaacagatcactctgctgattagcactctgcatggtacgtatcagaatctgaatatgaccgtggcccaggactggtgcttggccctccagcgtctgatgcgtgtgaaggaggaggagattcattccgccaacaagtgcaggctgcgcctgctcttgcccgggaagccagataaatctggacggcctatcagcttcatggtcgttttcattacgcctaaccccctgagcaaaatctcatgggttaacaggctccacttggcgaaaattgggctacgggaagagaaccagcccggttggctgtgcccagatgaggacaaaaagagcaaagctccattttggtgtcctatccttgcttgttgtatcccagccttttcaagtagggctctcagcctacagttgggcgcccttgtgcattccccagtgaattgtcctctcttagggttctctgcagtaagcactagtctcccacagggatatttatgggtgggcggcggccaagagggggcaggtggacaggttgagatttttagcctgaacaggccgtccccccggaccgtcaaatctttccccctggcagccccagtgttatgcatggagtacatccccgagctcgaggaggaggccgaaagcagagacgaatctcccacagtagctgacccatcagcgaccgtgcatccaactatctgcctgggattgcaggatggcagcatcctgctgtactcctccgtggacacaggaacacagtgtctcgtgagctgccggtctccgggcctgcagcccgttctgtgtcttcggcactctcctttccatctgctagctggcctgcaggacgggactttggcggcgtaccctagaactagtggaggggtcctgtgggacctggagtcgccacccgtctgcctgacagtagggccgggcccggttagaacactactcagtctggaagatgcagtctgggcctcgtgcgggccatgggttactgtgctcgaggccaccaccctgcagccgcagcaatccttcgaggctcatcaagatgaagccgtgtcagtaactcatatggtgaaagcagggtcaggagtttggatggcttttagtagcggaacaagcatccgtctgttccacactgaaacgctggaacacctacaggagataaacatcgccacacggaccacgtttcttctgccaggccagaagcacctttgcgtgacaagccttttaatctgccagggtctgctgtgggtggggacagatcagggcgtgatagtgctgctcccagtgcccaggttagaaggcatccccaaaataacaggaaaaggaatggtaagcttgaacggtcactgtggcccagtggcctttctggctgtggccacatctatcttagcccctgatatccttagatccgatcaggaggaggccgagggcccacgagcagaggaagacaagccagatggacaggctcacgaacctatgccagatagccacgtgggacgggaacttacgcgcaagaagggcattctgctgcagtaccggctcaggtctacggcccatctgcccggccccctgctgtccatgagggagcccgccccagcagacggcgccgctcttgaacatagtgaggaggacggatccatttacgagatggcattctttctgaaggccaaaaacacaaagcctcacaattgcctggctagccccgttagtctcgtttgggccctagctggactgcagggatcgcacaccccacttctcgagggatgcgtgagagtatcagtgtgtgagtgcgtaggttggtgcgtaaatatctataaatag

SEQ ID NO: 203393 - DNA, 4578 bp, synthetic construct
  misc_feature 1..4578: note = Description of Artificial Sequence: Synthetic coding sequence
  source 1..4578: mol_type = other DNA
atgagcggcacccagagcaccatcaccgaccggttccccctgaagaaaccgatccgtcatggcagcatcctcaatagagagtcccccactgataagaagcaaaaagtagagcgaatcgctagccacgactttgaccccaccgggctcgtgcagcggtgcgtgatcatccaaaaggatgacaacgggttcggactgacagtctccggagataatcccgtcttcgttcagagcgtgaaggaggacggcgccgctatgcgtgcaggcgtacagactggcgatagaattattaaggttaacggcactctcgttacccatagcaaccacctggaagtggtgaagctcatcaaaagcggtagttacgtggcactgaccgttcaggggcgccccccaggctcaccgcagattccacttgctgatagcgaggtcgagccgtctgttattgggcatatgagcccaattatgacaagtccccattctcccggtgccagcggtaacatggaacggatcacaagtcccgtgctgatgggtgaagagaacaatgtcgtgcataaccagaaggtagagatccttaggaaaatgctgcagaaagagcaggagagacttcaacttcttcaggaagactataataggacaccagcccaacgcttgctgaaggagatccaagaagctaagaagcatatcccccagctgcaggagcagctgtccaaagctactggatcagcccaagatggagccgtcgtgacaccatctcgccccttgggcgatactttgaccgtatcagaagcggaaactgaccctggcgatgtgctgggtaggaccgattgtagctctggggacgctagtagacccagctccgacaatgctgactcccctaagagcggtcccaaggaaaggatttatctggaggaaaacccagagaagtctgaaacaatccaggataccgatacccagagcctggtgggaagcccaagcacgaggatcgctccacacattattggagctgaggatgatgacttcggtacagagcatgagcagatcaatggtcagtgtagttgtttccagagcatcgagcttttaaaaagtaggcctgcgcacctcgctgtgtttcttcatcacgtcgtgagccaattcgatcccgccacattgttatgctatctatacagtgatttgtataaacatacaaactcaaaggagaccaggagaatttttttggaatttcaccagttttttctggaccgcagcgcccacctcaaagtgagcgtgcccgatgagatgtcagccgacctcgagaaacgtcgccccgagttaatcccagaggacctgcaccgacactatattcagacgatgcaggaacgggttcacccggaagtgcagcggcacctggaggacttccgccagaagagaagcatgggactgacgctggcagagagtgagctcacaaaactagacgctgagcgtgacaaagacagactgaccctggagaaagaaaggacctgtgcagaacagattgtggccaagattgaggaggtgcttatgaccgctcaggccgtcgaagaggataaaagctcaactatgcaatacgtgatactgatgtatatgaagcacctaggagtaaaagtgaaagaacctagaaaccttgaacataagcggggtcgtatcgggtttctgcccaaaatcaagcagtccatgaagaaggataaagagggagaggaaaagggcaagcgcaggggcttccctagtattctgggtccgccaaggcgtccttcccgccatgacaactcagcaatcgggagggccatggagctgcagaaggctaggcaccctaaacaccttagtacgccttctagcgtaagtccagaaccgcaggacagtgcaaaactcaggcagtccggcctagctaacgaaggcaccgacgctggctacttgccagctaactcaatgagttcagtggccagcggcgcttctttcagccaagaaggaggcaaggaaaatgatactggtagtaagcaggtaggagagaccagcgcacctggagacacattggacgggacaccaaggactcttaacaccgtgttcgacttcccaccacctccactggatcaagtccaagaagaggaatgcgaggtcgagcgggtaaccgagcacggaaccccgaaaccgtttcgtaagttcgattccgtggcgtttggggagtcacagtctgaagatgaacaattcgaaaacgacctggagacagatcctcccaactggcagcagcttgtgtctcgggaagtccttctgggcctgaaaccatgcgaaatcaaaaggcaggaggtaattaacgagttgttctacaccgagcgcgcccatgtgaggacccttaaggtcttagaccaggtgttttatcagagagtctcccgcgagggaattctgtccccctccgaattacgcaaaatcttctccaacctcgaggacatcctgcagctgcacattggcctgaatgagcaaatgaaagctgtacgaaaaaggaacgaaaccagtgtcatagatcagataggtgaggacttgctgacctggttctccggcccaggcgaagaaaagctgaagcatgccgctgccactttctgcagtaatcagccctttgcgctcgagatgattaagagtaggcagaagaaagatagccggttccaaacatttgtacaggacgcagaatcaaacccactgtgtcgacgattgcagctgaaggatataatcccaactcagatgcaaagacttaccaaataccctctgctcctggataacattgcaaagtacactgaatggcccacggaaagagagaaagtcaaaaaagcagccgaccattgccggcagattctaaactacgtgaaccaggccgtgaaggaagcagagaacaaacagaggctggaggattaccagcggaggttagacacatcctcacttaaactgtctgaataccctaacgtcgaagagctgcgcaacttggacctgaccaaaaggaaaatgattcacgagggcccgctagtgtggaaggttaatagggataagacaatcgacctctacactctgctgctggaggatatacttgtcctcctacagaaacaggacgacaggttagtgctccgctgtcactcaaagatcctggctagcaccgcagactccaagcacactttttcccctgttatcaagctgagtactgtgctagtgaggcaggttgctacagacaacaaggccctcttcgtgatcagtatgagcgataatggtgctcagatttatgaactcgttgcccagaccgtgtcagaaaagactgtgtggcaagacctcatatgtagaatggccgcctccgtcaaagagcaatctacaaagcctatccctctcccgcagtccacacctggggaaggagataacgatgaagaagacccgtcgaaactcaaagaagaacagcatggcatcagcgttactggcttgcagtcaccggatagagatctcggtctggaatcaactctgatatccagcaagccccagagtcattctctaagcacatccggtaaatcagaagtgcgagacctttttgtcgccgagaggcagttcgccaaggagcaacatactgatggcaccttgaaagaggtaggcgaagactaccagatcgctattccggacagtcatttgccagtcagcgaagagcgctgggctctcgacgcccttcgcaacctgggccttctgaaacaactgctggtgcagcagctcgggctgaccgaaaaatcagtgcaagaggactggcagcacttcccgagatacagaacggcctctcagggacctcagactgattccgtgattcagaattccgagaatattaaggcctaccatagtggggagggacacatgccattccgcacaggtaccggcgacatcgctacttgctactcaccccgcactagtaccgagtctttcgctcccagggactccgtaggccttgccccacaggacagccaggcttccaacattcttgttatggaccacatgatcatgacgcctgagatgcctacaatggagccggaggggggccttgacgacagtggtgaacatttctttgatgcgcgggaagcccactccgacgagaacccctctgaaggggatggggcagttaataaggaggaaaaggacgtcaacttgaggatatcaggcaactatttaatcctggacggctacgacccagtgcaggagtcttccacggacgaagaagtagcttcgtcactaacactgcagcctatgaccgggatacccgcagtggaatctacacaccagcagcagcacagtcctcagaatacacacagcgatggcgcaatctccccatttacaccggaatttttagttcagcaacgctggggcgcgatggaatactcatgctttgagatccagagccccagtagttgcgccgattcacaatcccaaataatggaatatatccacaaaatcgaggccgatctggagcatctaaagaaagtggaggagagctatactatcctgtgtcagcgcctggccggctcagcacttaccgataagcattccgacaagtcctag

SEQ ID NO: 203394 - DNA, 4635 bp, synthetic construct
  misc_feature 1..4635: note = Description of Artificial Sequence: Synthetic coding sequence
  source 1..4635: mol_type = other DNA
atgagcggcacccagagcaccatcaccgaccggttccccctgaagaagcctattaggcacggatccatccttaatagggagagcccgacggacaagaagcaaaaagtggagcggatcgctagtcatgatttcgatcctacggactcctcctcaaaaaaaactaaaagctcatcagaggaatcacggagtgagatctacggcctggtgcagcggtgcgtcattatccaaaaagacgataacggattcggactcacggtcagcggcgataacccggtattcgtccagagtgtgaaggaggatggtgctgctatgagagcaggcgtccagactggggacagaatcatcaaagtgaacggcactttagtaacccattctaatcacctggaggttgtgaagctgatcaaaagtggaagttacgtagcgctgacagttcagggcaggccaccaggcagtcctcaaattccattggcggattccgaagttgagccatcggttattgggcacatgagtcctataatgacctccccccatagtcctggagcaagtggtaacatggagcgcattaccagtccggtgcttatgggtgaagagaataacgtcgtgcacaatcagaaagtggaaattctgcgtaagatgctccagaaggagcaggagagactacagctgcttcaggaggactataacagaactcccgcccaacgactattaaaagagatacaagaggccaagaagcatatacctcagttacaggagcagctctccaaggcaaccggctcagcacaggacggggccgtcgtgacgcccagtaggccactgggggataccttaacagttagcgaagccgagacagacccgggcgacgtgctggggcgcacagactgctccagtggtgatgcctcaaggcctagctctgacaatgcagattctcccaagtctggcccgaaggaacgaatttacctggaggagaatccagaaaagtctgaaacaatccaggacaccgatacccagagtctggtaggcagcccttccaccaggatcgctccccatattatcggcgctgaagacgacgacttcggcacagagcatgagcagatcaatggccagtgtagttgctttcaatcaatcgagcttttgaaatcaagacctgcccacctagctgtgttcctgcaccatgttgtcagccagtttgacccagccactctactctgttatctttactctgacctgtataaacacactaattctaaggaaaccaggcggatcttccttgagttccaccagttcttcctcgaccgatctgcccatttgaaggtgtccgtgcccgacgagatgtccgcggatctagagaaacgcagacccgaactcattcctgaggatctccaccgccactatattcagacaatgcaggagagggtccacccagaagttcagaggcacttggaggatttcagacagaagagatcaatggggctgacattggcagaaagcgagctaaccaaattggatgcagagagagacaaggatcggcttaccttggagaaagagagaacctgcgccgaacagatcgttgctaaaattgaagaggtgttgatgacagctcaagctgttgaggaggacaaaagcagcacgatgcagtacgtgattctaatgtacatgaagcacctaggggtgaaagtcaaggaacctaggaacctggaacacaagagaggccgaatcggatttctgcctaaaattaagcagtccatgaagaaggataaagaaggggaagagaagggaaagaggaggggattcccctccatcttaggacctccccgtcgcccaagccgccacgataactctgccattggccgcgctatggaattgcagaaggcccgacaccccaaacacctgagcaccccgtcatccgtttcgccagagccccaggactcagctaagcttcgccaaagcgggctggcgaatgaaggtaccgatgccggttacctgcctgctaattctatgtcctccgtcgcatcaggcgcatccttcagccaagaaggcggcaaggagaacgacacaggaagcaaacaggtgggcgaaacatcggctccgggagataccctagacggtacaccgcggacactaaacacagtgtttgatttcccccctcctcctctggatcaggttcaagaggaggagtgcgaggtcgaacgcgtgactgaacacggcacgcctaagccattccgaaagtttgattctgtagcgttcggagagtcacagagtgaggacgaacagttcgagaacgatctcgagaccgatcctccgaattggcaacagctggtctccagagaagttctgttaggactcaagccctgcgaaatcaagcgccaggaggtgataaacgagctcttttataccgagcgtgcccatgtgcgaactctcaaggtgttagaccaggttttctaccagagagtatcacgagaaggtatcctttcaccgtccgagcttcggaagattttcagcaacctcgaagatatattacagttacatattgggctgaatgagcagatgaaggcggttcgtaagaggaacgaaacaagtgtgatcgatcaaattggagaggacctgctgacctggttttctggacccggggaagaaaagctcaagcatgcggccgctacattttgtagcaatcagcctttcgcattggagatgatcaaatctcgccaaaagaaggattctcgcttccagactttcgtccaggatgccgaatcaaacccattatgtcggagactgcagttgaaggacattattcccacacaaatgcagaggctcactaagtatcctcttctgctcgacaacatagctaagtacacggagtggcctaccgagagggagaaggtgaaaaaggcagcagaccattgtaggcagatactgaactatgtcaaccaggctgtgaaggaagcggagaacaagcagcgtctggaagactaccagcgcagattggacacaagtagcctcaaactgtccgaataccctaatgtggaggagctgcggaacctggatctcacaaagcgcaaaatgatccacgagggaccgctggtgtggaaggtgaaccgcgataagactattgatctctatacccttctgctggaggacatcctcgtgctgctgcagaaacaggatgaccggctggttctgaggtgtcattccaaaattcttgctagcaccgccgattctaagcatacctttagcccagtgatcaaattaagtaccgtgctggttcggcaggtggcaacggataataaagccctgttcgtgatctcaatgtcggataatggagcgcagatctacgaactcgtcgcgcagaccgtatccgaaaaaaccgtttggcaggacttaatatgtaggatggccgcgagtgtgaaagagcaatccaccaaaccaatacccctaccccagtccacccctggtgagggtgacaacgatgaagaggaccccagtaaactgaaggaagagcagcatggaatttccgtcaccggactgcagagccccgacagagacctcggcctggagtccacccttatatcaagcaaacctcaatcccattcactgtcgacctccggcaagagcgaggtcagggatcttttcgttgctgagcggcagttcgccaaggagcaacatacagacggtacactgaaggaggtgggagaggattatcaaatcgcaattccagatagccatcttccagtgtccgaggagagatgggctctggatgccctaaggaacttgggtctacttaaacagctgttagtacagcaactcgggctgaccgagaaaagtgtacaagaggactggcagcacttccctcgctatagaacagctagtcaggggccccagaccgactcggtgatccagaattccgaaaatatcaaggcctatcattctggggagggacatatgccttttaggacgggtactggtgacattgccacctgctattctccaagaacttccactgagtcttttgccccacgggacagtgttggactagctccccaagactctcaagcttctaacatcctggtgatggatcatatgattatgacacctgagatgcctaccatggagccagaaggagggttagacgatagtggggagcattttttcgacgccagggaggcccactcagatgaaaatcccagtgagggcgatggagcggtgaacaaggaagagaaagacgttaacctgcgcattagcgggaactacctgatcctagatggatatgaccctgtgcaagaatcgagcacagacgaggaggtggcctctagccttacactgcagccaatgactggcattcctgcggtcgagtctactcaccagcagcagcactctccccagaacacccatagcgacggcgctatctcgccattcactcctgagttcctggtccagcaaagatggggtgctatggagtacagctgcttcgagatacagagcccctcctcttgcgctgacagccagtcccagatcatggaatatattcataagattgaagccgatttagagcacctgaagaaggtggaagaatcctatactatcctgtgtcaacgcctcgctggtagcgctctgacagacaagcacagcgataagtcttag

SEQ ID NO: 203395 - DNA, 2409 bp, synthetic construct
  misc_feature 1..2409: note = Description of Artificial Sequence: Synthetic coding sequence
  source 1..2409: mol_type = other DNA
atggactgcggcccccccgccaccctgcagccccacctgaccggcccgcccgggactgcccaccatcctgtggctgtctgccagcaggaatctctttcgttcgcagaattaccagccctgaagccgccgagcccggtgtgcctggacctgtttcctgtagcccctgaggaactccgtgcccctggtagccggtggagtttggggacgcccgcaccacttcaaggactgctttggccactgtcccctggtgggagcgatactgaaataacctccggcggaatgcgcccttctcgggccggaagttggccacattgtcctggcgcgcaacctcctgctctggagggcccttggtcacctaggcatactcagcctcagcgtcgcgcctcccacgggtcggaaaaaaaaagtgcctggcgaaagatgagggtatatcagagagaggaagtgccagggtgtcctgaggcccatgctgtattcctagaacccggtcaagtagtacaggagcaggcattgtcaacggaggaaccacgtgtcgaactgtccggatcaacccgtgtgtcgctggaggggccagaaaggcggaggtttagtgctagcgaactaatgacccgcttacattcatcacttcgccttggacgtaattcagccgcccgggccctgattagcgggagtgggaccggagcagctcgcgagggcaaggcttctggcatggaggcccgtagcgtcgaaatgtctggcgaccgggtgagcagacctgccccaggagactctcgcgagggagactggagcgagcccagattagatacccaggaggaacctcctttggggtctcgctctaccaatgagcgcaggcagtcgaggttccttctcaacagcgttctctaccaggagtacagtgatgtcgcgagtgccagagagctccggaggcaacagcgggaagaagaaggtcccggcgacgaagcagagggagctgaggaaggtcccgggccccctcgtgcaaacctttcaccaagctcgtcctttcgtgcacagcgttcagcccgtggttctaccttttccttgtggcaggacatccctgatgtgcggggctcaggcgtgctggctaccctgtccttgagggattgcaagcttcaagaagctaaatttgaacttatcacatcggaggcatcctatatacactcactgagcgttgctgtgggccacttcctgggctccgccgagctctcagagtgcctcggggcgcaagataagcaatggttattttccaaactccccgaagtcaaatctactagcgagcggttcctgcaggatctggaacagaggctcgaggctgatgtcctcagattcagtgtttgtgatgttgtgttggaccactgccctgccttccgtagagtataccttccctacgtaactaaccaagcataccaggagcgcacctaccagcgcctgctcctggaaaatccacgattccccgggatactcgcaaggctcgaagagtccccagtgtgccagaggctgcctctgacttcctttttaattctgccatttcagcgtataacaaggctgaaaatgctcgtcgaaaacattctgaaacgaactgcccaaggaagcgaggatgaagacatggccaccaaagcattcaacgccctgaaggaactggtacaggaatgtaacgcttctgtgcagtccatgaagagaaccgaggagcttatccatctcagcaagaaaatacacttcgaaggaaaaatttttccactcatctcccaggcaaggtggctggttcgacatggcgagctggtggaactagctcctctgccggctgcgccccccgctaagcttaagcttagtagtaaggccgtgtacttgcatctgttcaacgactgtctgctcctatcacgcaggaaagagcttggaaagtttgccgtctttgtgcatgccaagatggcagaactccaggtgcgggacttgagcctgaaactgcagggcatccctggccacgtgttccttttacaacttctgcacgggcagcacatgaagcatcagttcctgctcagagcccgaaccgagtccgaaaaacaacggtggatctcagccttgtgtccctccagtcctcaggaagataaggaggttatcagcgagggggaagattgccctcaggtccagtgtgttcgaacttacaaagccctgcacccggacgagctcactctcgagaagaccgatatactgagtgttcgcacatggacgtccgatggctggcttgaaggagtgagactggcagatggggagaaggggtgggtgccccaggcctacgtggaagaaatcagtagcctctctgccaggctgagaaacctccgggaaaacaagcgtgttacaagtgcgactagcaaactaggggaggctccggtgtag

SEQ ID NO: 203396 - DNA, 1575 bp, synthetic construct
  misc_feature 1..1575: note = Description of Artificial Sequence: Synthetic coding sequence
  source 1..1575: mol_type = other DNA
atggactgcggcccccccgccaccctgcagccccacctgaccggcccaccaggcacagcacatcacccagtggcggtgtgccaacaggaatccctgagcttcgctgagcttccagccttgaagccgccttcccctgtttgcctcgacctgtttcccgtcgcaccggaagaactgcgggcaccgggctcacggtggagcctaggcacacctgcacctctgcagggattgctgtggcctttatcccccggaggatccgatactgagatcacctctggtggaatgaggccctcaagagccggcagttggcctcactgtcctggagctcagccgccagcccttgaaggaccctggtcacctcgccatactcagccgcagagacgggcctctcatgggagtgaaaaaaaatcggcctggcggaagatgcgtgtttaccagagagaggaggttccagggtgccctgaagctcatgctgtattcctggaaccaggccaggtggtgcaagaacaggctctcagtactgaggagccacgtgtcgagctcagcggctctacccgcgtgtctttggaaggtcctgaaaggcgacggttctccgcttccgaactgatgacacgactccactctagcctgcggctgggaaggaattccgctgcccgcgcgctgatcagtggctctgggaccggagccgcccgagaaggaaaggctagcgggatggaagcacggagtgttgagatgtctggggacagagtctccaggccagctcctggagactcccgagagggcgattggagcgagccccgcctcgacacgcaggaggagcctcccctggggagccggtctaccaacgagagacggcagagcaggtttctcttgaattccgtcctgtaccaggaatacagcgatgtagcctctgcacgtgaactgcgccggcagcagagagaagaagaagggccaggagatgaggccgaaggtgccgaagaggggcccgggccccctagggccaatctgtcaccttccagcagttttcgggcacaaagatccgcaagaggctcgaccttttctctatggcaggacattccagacgttcgcggatctggagtgctagcaacgctgagcctacgggactgtaagctccaggaggccaagttcgaattaatcaccagcgaagcatcatacatccattcattgagcgtggccgtgggacactttttgggaagtgcagagttaagtgaatgccttggtgcccaggataagcagtggctctttagcaagctgcccgaagtaaaatctacttccgagagattcctgcaggatctagaacaacgcctggaagccgatgtgctgagattctctgtttgcgatgtagtgctggaccactgtccagcctttagacgtgtttacctgccctacgtcacaaatcaggcataccaagagaggacatatcaaaggctgttactggagaatcctagattccccggaattctggctaggctggaggagtcgcccgtgtgccaacggctccctctgacaagtttcttgatcttgcagcccccagggggccaaggcggacaccagtag

SEQ ID NO: 203397 - DNA, 1509 bp, synthetic construct
  misc_feature 1..1509: note = Description of Artificial Sequence: Synthetic coding sequence
  source 1..1509: mol_type = other DNA
atggactgcggcccccccgccaccctgcagccccacctgaccggccctccagggacagcacaccaccccgtggccgtgtgtcaacaagagtcgttgagcttcgctgaattacccgctttgaagcctccaagccctgtgtgtctggacttattccctgtggcccccgaggaactgcgtgcacccggcagccgctggtctctgggtactccggccccgctccagggtttgttgtggcccctgtccccaggaggatctgataccgagattacaagtggcggtatgagaccttcaagagccgggtcctggcctcattgtcccggcgctcagccccccgctctcgagggcccctggtcacctagacacactcagccgcagcgcagagcttcgcatggttccgaaaaaaagagcgcctggcgaaaaatgcgcgtgtaccagcgcgaagaagtgcccgggtgtccagaagcccatgctgtgttcctcgagcctggccaagttgtgcaggaacaagcattgagtaccgaagagccccgagtggaacttagcgggtctactagggtgtctctggaaggaccagaacggcgacgcttctcagcctccgagctcatgactcggctgcatagcagccttcgactaggaaggaactcagccgctagagccctcatatcagggagcggcacaggagcggctcgtgagggaaaggcttcaggaatggaggcacgtagcgttgagatgagtggtgaccgggtgtcacgcccagcccccggagatagtcgggagggcgactggtccgagcctcgcctggacacccaagaagagccacccttgggaagcagatcaacaaatgagaggaggcagagcaggttcttgcttaactcagttctctatcaagaatattcagatgtggcttcagctcgtgaactacgacgacaacagcgggaggaagagggccctggcgatgaagcggagggagctgaggagggacccggcccgcctcgagccaacctttcaccctcctccagcttccgcgctcagagaagcgctcgcggttcgacgttctccctgtggcaagacattccagatgttcgagggtcaggggtcctcgccactctgagtttgcgggactgcaaacttcaggaagccaagtttgagctgataacatccgaagcctcctatatccatagcctctctgtcgccgttggccatttcctcggatcagctgagctcagcgagtgcttgggcgcccaggataagcagtggttgttcagtaaactgccagaggtgaagtccacgtctgaaagattcctacaggatctggagcagcgtctggaagccgacgtcttgcgcttttctgtatgcgatgtggtgctggatcattgccctgccttcaggcgggtgtacctgccttacgtgaccaaccaggcttatcaggaaaggacctatcagcggctcctgcgagaaaacaagagggtgacatctgctacctctaaactcggggaggcacctgtgtag

SEQ ID NO: 203398 - DNA, 504 bp, synthetic construct
  misc_feature 1..504: note = Description of Artificial Sequence: Synthetic coding sequence
  source 1..504: mol_type = other DNA
gagcggctggcccagttccccgccgccggccggggcagccccggccctccaggcgcaagactgggggttggacttgagaaagggagagggagagaagtgtggaggcctggagtgtggggctgtgaggcccgtgcctctgaggttaactggtcgtgcccatttgatcccgtttgcgctctcccacaggccaaatttgagctcatcacaagcgaggcatcatatattcactcactgtccgtggctgttggtcattttctgggctccgcagaactttcagaatgcctcggcgcccaggataaacagtggctcttttctaagctcccagaggtgaaatctacaagcgagaggttcttacaggatctagagcagcgcctggaagccgacgtcctccgcttttctgtctgcgatgtggtgcttgaccattgcccagctttccggcgagtatacttgccttatgtcactaaccaagcctatcaagagaggacataccaacgactgctctag

SEQ ID NO: 203399 - DNA, 924 bp, synthetic construct
  misc_feature 1..924: note = Description of Artificial Sequence: Synthetic coding sequence
  source 1..924: mol_type = other DNA
tgacgggaccggggccaggagcggctggcccagttccccgccgccggacgtggaagccccggcccccccggggctagactcggggtgggccttgagaagggccggggacgggaggtatggcgcccaggtgtgtgggggtgtgaagcacgtgcatcagaggtgaactggagttgtcctttcgatcctgtgtgcgctttaccgcaggcgaagtttgagctaatcacatctgaagcttcctacatccacagtctgtctgtcgccgttgggcatttccttggttcagctgaattatcagaatgtctcggtgcccaggacaagcagtggctcttttccaaattacccgaggtaaagtcaacatccgagcggtttctgcaggacctcgaacagcggctggaagccgatgtactgagattctctgtctgcgatgtggtgctcgatcactgtccagcattccgacgagtgtatctgccctatgtcacaaaccaggcttatcaagaacggacctatcagagacttctacttgagaaccctcgcttcccaggtatcctcgcgcgactggaggagagcccagtgtgccagagattaccacttacctccttcctgatccttcccttccaaaggataacccggttgaaaatgctggtggagaacatcctgaagcgcactgcccagggctccgaggatgaggacatggcaaccaaagctttcaacgccttaaaggagctggtgcaggaatgcaatgcatctgtgcaaagtatgaagcggactgaggaactgatccacttatcgaaaaaaatacattttgaagggaagattttcccactcatcagtcaagctcgttggctggtgcgacatggggaactagtggagctggccccactgcctgcagctcctccagcaaaattaaagctgagctctaagtag

SEQ ID NO: 203400 - DNA, 1581 bp, synthetic construct
  misc_feature 1..1581: note = Description of Artificial Sequence: Synthetic coding sequence
  source 1..1581: mol_type = other DNA
atggtggccaaggactaccccttctacctgaccgtgaagcgggccaattgtagtttggagctaccacctgcttctggacctgcaaaggacgccgaggagccttcaaacaagagggttaagccactctcaagagtcacgagcctggccaacttgatcccccctgtgaaagcaacccctctcaaaagatttagtcagacccttcaaaggagcatcagtttcagaagcgaaagtagacccgacattttggcacccagaccctggtctcgaaacgcagcaccttcatcaaccaagcgccgggatagcaagctttggtccgaaacctttgacgtttgtgtcaatcagatgttgacatcgaaggagattaaacgacaggaggccatcttcgagttgtcacaaggcgaggaggaccttattgaagatctgaagctggccaaaaaagcctatcatgaccccatgctgaaactgtcgatcatgactgagcaggagctgaatcagatctttggaaccctggatagcctaatccctctgcatgaagaacttctctcccagctgcgcgacgtgcgaaaacccgatggtagcactgagcatgtcgggcccatcctggtcggctggctaccctgtctgagctcatatgatagctactgctctaaccaggtggcagccaaggcgctgctggaccataagaagcaggatcacagggtgcaagacttcctccagagatgcctcgaaagtcccttctcacgcaaactcgacctgtggaatttcctggacatacccagaagccgcctggtgaagtatcctctgctactgagggagattctcagacatacacccaacgacaaccccgatcagcaacacctcgaggaagcgattaatatcatccaaggaatcgtagccgaaataaatactaaaacgggcgagagcgagtgccggtactataaagaacggctgctgtatttagaggaaggacagaaagattctcttattgacagctctcgcgtgctatgttgccatggcgagctcaaaaataatcgcggcgtgaaactccatgtctttctcttccaggaggtgcttgtcattactcgtgccgtgacccacaacgagcagctgtgctatcagctttaccggcagcccatccccgtgaaagatcttctcctggaagacttgcaggatggcgaggttcggctcggagggtcactccgcggggctttttcaaacaacgagaggatcaagaatttctttcgcgtgtcctttaaaaatggatctcagtctcaaactcacagtcttcaggctaacgacaccttcaacaaacaacagtggctgaactgcatacgtcaggctaaagagacggtcctctgtgctgcaggacaggcgggtgtcttagacagtgagggttcttttttaaaccctactacaggctccagagaactgcagggcgagacgaaactggagcagatggaccagtctgactccgaatctgattgttcaatggatacatcagaagtgagcctggattgcgagagaatggaacagactgatagtagctgcgggaattctcggcacggagaaagtaatgtatag

SEQ ID NO: 203401 - DNA, 1677 bp, synthetic construct
  misc_feature 1..1677: note = Description of Artificial Sequence: Synthetic coding sequence
  source 1..1677: mol_type = other DNA
atggacagcagcaccgccatgaaccagtgcagctgccggggcatggaggaaaacaaggagaggcctaagcggcagcggcagaacaacttcccaatgttcccttctccgaaggcatggaacttcagagggcggaagcggaaacaatcgacccaggacgaggatgcagttagtctgtgcagcctggatatttccgagccaagcaataaaagggttaagcccctgtctcgggtcacaagtttggccaatctgatcccccccgtcaaagccacgcctctgaagcgcttttcacagactctgcaacgcagtatatcgtttcgatcagaatctaggccggatatactggcacctcgcccctggagtaggaacgccgccccgagcagtacaaagcgtcgcgattcgaagttgtggagcgagacatttgatgtctgcgttaaccagatgcttacctctaaagagataaaaagacaagaggccatttttgaactgtctcagggtgaggaagacctgatagaggacttaaaactggccaagaaggcgtatcatgacccaatgctgaagctcagcattatgaccgaacaggagctgaatcaaatctttgggaccttggacagtctgatccctctgcatgaggagcttctctctcagctacgggacgtcagaaaacccgacggatccaccgaacatgtgggaccaatactggtggggtggctgccttgcctgagtagttacgactcttactgctccaaccaggtcgcagccaaggccctgctggatcataagaaacaggatcatagagtccaggacttcctgcagcgctgtctggaaagtcctttttccagaaagctggatctatggaactttcttgacatccccaggagccgtctggtgaagtacccattgctgcttagggaaattctccggcataccccaaatgacaatccagatcagcaacatcttgaggaggccattaacatcatccaggggatcgtggcggagatcaatactaaaaccggagagtccgagtgtcgctactacaaagaaagactattgtacctggaagagggacagaaagacagcttgattgatagcagccgtgtcctgtgctgccacggtgagctgaagaataatcgtggggtcaagctgcatgtattcctcttccaggaagtcctcgtgatcacacgagctgttacacataacgagcagttgtgttatcagctgtataggcagcccataccagtaaaggacctgcttctagaggacctccaggacggagaagttagactgggcggttctcttcgaggcgccttttctaacaatgaacgtataaagaacttcttcagggtttcttttaagaacggtagtcagtctcagacgcacagtctccaggccaacgacaccttcaataaacaacaatggctgaattgcatcagacaagcaaaggagaccgtcctgtgtgccgcaggacaggctggcgtcctcgatagcgaaggatctttcctgaatccgaccacaggaagccgggagctgcaaggcgaaacaaagcttgaacaaatggaccagagtgacagtgagtcggactgctccatggacacaagtgaggttagtctggactgtgaaaggatggagcagactgattcgtcatgtggaaactctagacacggggagtctaatgtgtag

SEQ ID NO: 203402 - DNA, 1599 bp, synthetic construct
  misc_feature 1..1599: note = Description of Artificial Sequence: Synthetic coding sequence
  source 1..1599: mol_type = other DNA
atgatcgaggtgtgccaccacaactggctgctgtggctgtgccccagtaaattcggtatcttcatgtgctgtctggcatccactaccggccaaatggagctgcgccgtaccagggagcccagcaataaacgcgtgaagccgctgtctcgagtgacgtctctggccaatcttataccccctgtaaaggctacccctctcaagcggttctcgcagacactgcagcggtcaatctctttccgcagcgagagtaggcctgatattctcgcccccagaccctggtcgcgcaatgcagccccaagctcgactaaaagacgcgacagcaagctgtggagcgagacctttgacgtgtgcgtgaatcagatgcttaccagtaaagagatcaaacgtcaggaggccattttcgagttgtcgcagggcgaggaagatttgatagaagacttgaagctggctaaaaaagcgtaccatgatcctatgctaaagttgtcaataatgacagagcaagagctgaaccagatttttggaactttagatagcctgattccactccatgaggagcttttgtctcaactccgtgacgtgcgcaaaccggatgggagcactgagcatgtcggacccatcctggtaggttggttgccctgtctgtcatcatacgattcatactgtagtaatcaggtagccgccaaggcattactggaccacaagaagcaggaccaccgcgtgcaagactttttgcagcggtgcctcgaaagtcccttttcacgaaaacttgatttgtggaactttctcgacatcccaagatcaaggctggtgaaataccctctgcttctgagagagatcctgagacacacacctaacgacaatcccgaccagcagcacctggaagaagcgattaatatcatccaggggattgttgctgaaatcaatactaagacgggcgagagcgagtgcaggtactataaggagcgtctcctctatctcgaggagggccaaaaagactctcttattgactcttcccgcgtactatgctgccacggcgagttgaaaaacaaccgaggcgttaagctgcacgtctttttgttccaggaggtgttggtgatcacacgcgcagttacccacaatgaacagctttgttatcagctttatcgccagcctatcccagtgaaggaccttctgctggaggatctgcaggacggtgaggttcggcttggcggtagcctgcgaggcgcattctcaaacaacgagaggatcaaaaacttctttagagtctcttttaagaacggaagccagtcccagacccattccctacaggctaatgatacctttaacaaacagcagtggcttaactgtattaggcaggctaaggagacagttctctgcgcagctggtcaggctggcgtcctcgactccgaggggtcgtttctcaatcctacaaccggctcccgggagcttcaaggtgagacaaagctcgagcagatggatcagtcagactcagagtccgactgcagcatggatacatcagaggtgtccctcgattgcgaacggatggagcagaccgacagtagctgcggaaactcaagacatggagagagcaatgtgtag

SEQ ID NO: 203403 - DNA, 2073 bp, synthetic construct
  misc_feature 1..2073: note = Description of Artificial Sequence: Synthetic coding sequence
  source 1..2073: mol_type = other DNA
atgccctgggaggagcccgccggcgagaagcccagctgcagccactctcagaaggcctttcacatggaacctgcgcagaaaccctgcttcaccactgatatggtgacatgggccctgttgtgtatcagcgccgagacagtgcggggggaggcacccagtcagccccggggtattccgcatagatctccagtgagcgtggatgatttatggctcgaaaaaacgcaaaggaaaaagttgcaaaaacaggcgcatgtggagcgtcggctacatataggggcagtccataaagatggagtgaaatgctggcgtaagacgattattactagccccgaatcccttaacctcccccggcgctcccaccccctttcacaatccgctcctactggtctcaatcacatggggtggccagagcatacgcccgggacagctatgccagacggcgctcttgataccgcagtgtgtgctgatgaggtaggatccgaggaggacctctatgacgaccttcattcgtccagtcaccactattcacatccaggaggcgggggggagcagcttgctatcaatgaattgatctcagatgggtccgtagtgtgtgccgaggccctctgggatcatgtgactatggatgaccaggagctcggctttaaagcgggtgacgttatcgaagttatggatgctacaaaccgtgagtggtggtggggccgggtggcagatggtgaaggatggtttcctgcgtctttcgtccggttgcgggttaaccaggatgagccagctgatgatgatgcccccttagccggtaattcaggcgcagaagacgggggagctgaagcacaaagttccaaagatcagatgcggacaaacgtgatcaacgaaatcctctccacagagcgcgactacatcaagcacctgcgcgacatttgcgaaggttacgttaggcagtgccgcaaacgtgctgatatgttcagcgaggaacagctcagaactatctttgggaatatcgaagatatttacagatgtcagaaagctttcgtgaaagccctagaacagcgctttaatagggagcggccacatctcagtgaattgggggcttgttttcttgagcatcaggcggacttccagatctattctgaatattgcaacaaccatcccaatgcttgcgttgagctctcgcgcctaacaaaattgtccaagtacgtctatttctttgaggcctgcagactcttgcagaagatgatcgacatcagcctggacggatttttgttaacccccgtccaaaagatttgcaagtatcccttgcagcttgcagaattacttaagtacactcacccccagcatcgggactttaaagatgtggaagccgctcttcacgcgatgaaaaatgtcgctcagttgattaacgagcggaaacgcaggctggagaatattgataagatcgctcaatggcagtcctcaatcgaggactgggagggagaagacctgctggtcaggtctagcgagctgatctactcaggcgagcttacccgtgttacccagccgcaggccaagagccagcagcgaatgttttttctatttgatcaccaactcatttattgcaagaaggatctcctgaggcgcgacgtcctatattacaagggacggctggatatggatggcctggaagtggtggacctggaagatggcaaggatcgagacctgcacgttagcatcaaaaacgctttccgcctccaccggggagctaccggtgacagccacctgttgtgtacaaggaaacctgaacagaagcagcgctggcttaaggcattcgcccgcgagcgagaacaagtgcagctggaccaggagactgggtttagtattactgagctccaacgtaaacaggcaatgcttaacgctagcaaacagcaggtgaccggaaagcctaaggccgtcggaagaccgtgttatctgacgcgccagaagcaccctgcattgccctcgaatcgtccacaacaacaggttctggtgctcgctgaacctcgtcgtaaaccgtccacgttctggcattctatcagccgactcgctccattccgcaaatag

SEQ ID NO: 203404 - DNA, 1860 bp, synthetic construct
  misc_feature 1..1860: note = Description of Artificial Sequence: Synthetic coding sequence
  source 1..1860: mol_type = other DNA
atgcggcccgacggccagcaggccctggacgccgtggtgcggagcttcgattgtcatagtgaggccgctctacgccaaagaaacgacgtgatctattgttccctacctcgaacagcccagggaatagtccagagagaggaccagctggaggtgctggtttccctcagggaggtttggggtagacggagagggagagacggtacttgcaccggcgcaatgcccgatggggctctcgataccgcagtctgcgccgacgaggtcggcagtgaggaggacctatacgacgatctccattcttcctctcatcactactcacaccctggtggcggaggagaacagttggccatcaatgagctaatttctgacggctcagtggtgtgcgccgaggcgttgtgggaccacgtgactatggatgatcaagagcttggttttaaggccggcgacgtaatcgaagtgatggacgctaccaacagagagtggtggtggggtagagtggctgacggggaaggatggtttcccgccagttttgtgcggctgcgcgtcaaccaagacgaaccggccgacgacgatgcccccctcgcgggcaactcaggggccgaggatggaggagctgaggcgcagagttctaaggaccagatgaggacgaacgtcattaatgagatcttatcgactgagcgtgattacataaaacacctgcgggatatttgcgaggggtacgtgagacagtgtagaaaaagagccgacatgtttagcgaggagcagctgagaactatctttgggaatatagaggatatctatcgatgtcagaaagcttttgtgaaggcactggaacagaggttcaaccgcgaacggccacacttgagcgaactcggggcgtgcttcctcgagcaccaggcggacttccaaatctacagcgaatactgcaacaaccacccaaacgcatgcgtggaattatcacggctgaccaaactttcgaagtatgtttatttcttcgaggcctgtcgcctcctccagaaaatgatcgatatttccttagatggtttcttgttaacacctgtgcaaaagatatgtaaatatcctctgcagctggccgagcttctgaaatacactcaccctcaacacagggattttaaagatgttgaggcagcccttcatgccatgaaaaacgtagcccagcttattaacgagagaaaacgcagactggagaacattgacaagatcgcgcagtggcagagcagtattgaagattgggagggggaggacctcttggttcgttcttctgagttaatctacagcggcgagctgactcgcgttacacagccccaggccaagtcccagcagagaatgttcttcctgttcgaccatcagctgatttattgcaaaaaggacctgctcaggcgggatgtcctctactacaaggggagactcgatatggacggcctggaggtggtagatctcgaagatggcaaggatcgagacctacacgtgagcattaagaatgccttccgcctccatagaggggcaaccggcgattcacacctactctgtacacgcaaacccgaacaaaagcagcgctggctaaaagcatttgctcgcgaaagggagcaagtgcagctcgaccaagaaacagggttcagcattaccgagctgcagcggaaacaggctatgctgaacgcatccaaacagcaggtaacaggaaagcccaaggcagtcggccgtccatgctacctcacaagacagaaacatccggctcttccaagtaaccgccctcagcagcaggtcctggtgcttgccgagcctagacgaaaaccgtctacgttctggcacagcatatcgcggttagctcctttccgcaaatag

SEQ ID NO: 203405 - DNA, 2013 bp, synthetic construct
  misc_feature 1..2013: note = Description of Artificial Sequence: Synthetic coding sequence
  source 1..2013: mol_type = other DNA
atgccctgggaggagcccgccggcgagaagcccagctgcagccactctcagaaagccttccacatggagcccgcacaaaaaccgtgcttcacaacggacatggtgacctgggccttattatgcattagtgcagagaccgttaggggagaagctccttctcagccccgcggcatcccccaccgatcgccagtgagcgtggacgacctctggttagagaaaacacaaagaaaaaagctgcagaagcaggctcacgtggagagaaggcttcacattggcgccgtgcacaaggacggggtcaaatgttggcgaaagactattatcacttcaccagagtcacttaatttgccgagacggagtcatccattatcccagtctgctcctactggcctaaaccatatggggtggcctgagcatacccccggaaccgccatgccagatggtgcccttgataccgcagtttgcgcagatgaggtcgggagtgaggaagacctctacgatgacctccattctagctctcatcactattcccatccggggggggggggcgaacaacttgcaataaatgagctgatcagcgatggcagcgtggtttgcgccgaggcactgtgggaccacgtgacaatggatgaccaagagctggggtttaaggctggcgacgtgatagaggttatggacgcaacaaatagggaatggtggtggggaagggtagccgatggagagggttggttccccgcgagcttcgtacggctcagagtcaaccaggatgaacctgcagacgatgatgctcctctcgctggcaattccggagctgaggatggaggtgccgaggcccagagtagcaaggaccagatgcggactaatgtgattaatgaaatcctatccaccgaacgggattacataaaacatttgcgggacatttgcgaaggctacgtccgtcagtgcaggaaaagggcagacatgttctcagaggagcagttgcgtaccatttttggtaatatagaggacatatataggtgtcagaaagcctttgttaaggcgttggaacagcgtttcaacagagagagacctcatctgtccgaactgggggcatgcttcctcgaacaccaggctgactttcagatctattccgaatattgtaataatcacccaaacgcctgcgtcgaattaagccgcctgaccaaactttctaagtacgtgtactttttcgaagcctgccgtcttttgcaaaaaatgatcgatatttcgctcgatggcttcctgctaactcccgtgcaaaaaatttgcaagtaccccttacaactcgccgagcttcttaaatatactcacccacaacatagagatttcaaggatgttgaggcggccttacacgccatgaaaaacgtcgcacaactcattaacgaaagaaagagaaggttagaaaatatcgataaaatcgctcaatggcagagttcaatcgaggactgggaaggcgaggatctgctcgtccggagcagcgaacttatctattccggtgaacttactcgtgtgacgcaaccgcaggcgaagagccaacagcgcatgtttttcttgttcgaccaccagcttatatactgcaaaaaggacctgcttcgtcgggacgtcttatactataagggacgactggatatggacgggttagaggttgtagatctagaagatgggaaagatagagatctgcacgtcagtattaagaacgcattcaggttgcaccggggcgccacaggcgacagccacttgttatgtacccgaaaaccagagcagaagcagcgttggctcaaagcgttcgcaagggagcgcgaacaggtgcagctggatcaggagacaggcttttcaattaccgagctgcagcgcaaacaggctatgctgaatgcatcaaagcagcaggtcacaggcaaacctaaagggcggcgcacagcggctccgcccccccgcttgcccgggccttatccggccgacattattccttttagcgaaccgcaaagccaagcttcttag

SEQ ID NO: 203406 - DNA, 1893 bp, synthetic construct
  misc_feature 1..1893: note = Description of Artificial Sequence: Synthetic coding sequence
  source 1..1893: mol_type = other DNA
atgccctgggaggagcccgccggcgagaagcccagctgcagccacagccagaaagcctttcacatggaaccggcccaaaagccctgcttcacaactgatatggttacatgggcactcctctgcatatccgctgaaactgtacgtggggaggcgccatcacagcctcgcggtattccacaccgatctccggtgagtgtcgatgacctgtggttagaaaaaacacagcgaaaaaaactccagaaacaggcccacgtggagcggaggctacacatcggagcggtccacaaggatggcgtgaaatgctggaggaagacaataatcacctcaccagagtctctcaacttgcccaggcgctcccatcctctgtctcagagcgctcctaccggactgaaccatatggggtggcccgagcataccccaggcaccgccatgccagacggggctctggatacagctgtgtgtgctgacgaggttggaagtgaggaggatctgtacgacgatcttcactcgtcttctcaccactactctcaccccggcgggggcggtgaacagctggcaatcaacgagctgatcagcgacggttctgtggtgtgtgccgaggccctctgggaccacgtcaccatggatgaccaggagcttggttttaaggccggtgacgtaatcgaagtgatggatgcaacaaaccgagaatggtggtgggggcgagtcgccgatggcgaaggatggtttccagcatcctttgtccggttaagagttaatcaggacgaaccggcagacgatgacgccccactggccggaaattctggagccgaagatgggggcgcggaggcccagtcttccaaagaccaaatgaggaccaatgtcattaacgaaatcctgtcaaccgaacgcgactacatcaagcacctgagggacatctgtgagcaggcagacttccagatctattctgagtactgcaataatcaccctaatgcatgtgtggagctgtccagactaaccaagctgtctaaatatgtctacttctttgaagcctgtagattgctgcaaaagatgatagatatctccctggacggctttctgctcacacccgtccagaaaatttgtaagtatcctctacagctggcagagctgctgaaatatacccatccgcagcatagggacttcaaagacgtagaggccgcactccatgctatgaagaacgtggcacagttgatcaatgagcgtaaaagacgtctcgagaacatcgataagatcgcacagtggcaatcctccatcgaggactgggagggggaggatctgctggtgcgatcttccgagctgatatacagcggggagctgacaagggtgacccaaccgcaggctaaatcccagcagcggatgttctttcttttcgatcatcagctgatctattgcaaaaaggatcttctacgaagagacgtgctctattacaagggacggctggacatggatggcttggaagtggttgacctggaggacgggaaagaccgcgacctacatgtttcgatcaagaatgcctttagactgcacagaggagcaactggcgactcccacctcctttgtactcgcaagcctgaacaaaagcaaaggtggctcaaagctttcgctcgggagagggaacaagtgcagctagatcaggagaccggatttagtataaccgagctgcaaagaaaacaagccatgctgaacgcttctaagcaacaggtgactggcaaaccaaaggccgtcgggaggccgtgttatcttacgcggcagaagcaccctgctttgccctcgaataggcctcagcagcaagtcctggtcctcgctgagcctaggcgcaagccttccaccttctggcatagcatttcgagattggcgccattcagaaaatag

SEQ ID NO: 203407 - DNA, 579 bp, synthetic construct
  misc_feature 1..579: note = Description of Artificial Sequence: Synthetic coding sequence
  source 1..579: mol_type = other DNA
atgccctgggaggagcccgccggcgagaagcccagctgcagccactctcagaaggcatttcatatggaaccagcccagaaaccctgttttaccaccgacatggtgacctgggctctcctctgtatctcagcggagaccgtgaggggcgaagcccctagccagcctagaggcatcccgcaccgatctccagtgtctgttgatgatctatggttggaaaagacgcaacgaaagaagcttcagaaacaagcacacgtggagcgacggcttcatatcggcgcagtccacaaagacggagttaagtgctggcggaagacaattatcacatcaccagaaagcctgaatctgccccgtaggagccatcctctgtctcagtccgccccgacgggactcaatcacatgggttggcctgagcacactccaggcactgccgtgggacgtccttgctacctcacgaggcagaagcaccctgccctccctagtaacagaccacagcagcaggtgctggttctcgcggagccccgcaggaaaccatcaaccttctggcattctatctcacgcctcgccccctttaggaaatag

SEQ ID NO: 203408 - DNA, 2013 bp, synthetic construct
  misc_feature 1..2013: note = Description of Artificial Sequence: Synthetic coding sequence
  source 1..2013: mol_type = other DNA
atgccctgggaggagcccgccggcgagaagcccagctgcagccactcacaaaaagccttccacatggagccagctcaaaagccatgtttcaccactgacatggtaacttgggccttgctttgtatttctgccgagacggtgagaggagaagccccgagccagcctagaggtataccgcaccgttcccctgtgagcgtggatgatctttggcttgagaaaacccaaaggaaaaaactgcagaagcaggcacacgtcgagagaaggctgcatatcggagccgtgcacaaggacggggttaaatgctggcggaaaactataatcacgtctcccgagagcctcaacctgcctcgccgttcacaccccttaagccagagcgcacctacggggctgaatcatatggggtggcctgaacacactcctggaactgcaatgccagatggcgctcttgatacagccgtgtgcgcagatgaagtggggagtgaagaagatctttatgatgatctgcattcctcctctcaccattattcccaccctggtggcggcggggaacagctggcaataaatgaactgatcagcgatgggagcgttgtgtgtgcggaggcactatgggaccatgtgaccatggatgatcaggagcttggttttaaggcaggagacgtgatcgaagtgatggatgccacaaatcgggaatggtggtgggggagagttgcagatggcgaggggtggtttccggcttctttcgtgagactgagggtgaatcaagatgaaccagccgacgatgacgcacccttagcgggcaactccggcgctgaagacgggggcgccgaggcccagtcatccaaagaccagatgcgtacaaacgtcatcaatgagattctttctactgaaagagattacatcaagcacttacgcgacatctgcgaaggctacgtcagacaatgtaggaaacgggcggacatgttctccgaagagcagctgaggaccattttcggaaatatcgaagatatctacagatgtcaaaaggctttcgtaaaggcactagagcagcgcttcaatagggagcgtccccacttaagcgagttaggggcctgtttcttggagcaccaagcagactttcaaatctatagtgagtactgcaacaaccacccaaacgcatgcgtcgaattgtcccggcttaccaaactgagcaaatatgtttattttttcgaagcttgtcgtctgctgcagaagatgatcgatatttcactagatggcttcctcctgacacctgtacagaagatctgcaagtacccgctccagcttgcagaactcttaaagtatacccatccccagcatcgggactttaaggatgtggaagcagctctgcacgcaatgaaaaacgtggcccagcttatcaacgagcggaagaggagactggaaaacatcgataaaatcgcccagtggcagtcgtcaattgaggattgggagggggaagacctgctggtgcggtctagtgaactcatctactctggggagctgacccgtgtcacacaaccccaggccaagtcccagcagaggatgttctttctctttgaccaccagcttatttactgcaagaaggatcttctgaggcgcgatgtgctgtattataaaggtcggttggacatggacggtctagaggttgtagacctcgaggacggtaaggatagagacctccatgtgtccataaagaacgctttcaggctgcaccgcggggcaaccggcgacagccacctactctgcactcgtaaacctgagcaaaaacagcggtggttaaaagcctttgcaagggaaagagagcaagtacagctcgatcaggagactggtttcagcattacggagctgcagaggaagcaggccatgttgaatgctagtaagcagcaggtcacaggaaagccgaaggggagacggacagctgcaccacccccccggctgcctgggccctaccctgccgatatcattcctttctccgaacctcaatcccaggctagctag

SEQ ID NO: 203409 - DNA, 4794 bp, synthetic construct
  misc_feature 1..4794: note = Description of Artificial Sequence: Synthetic coding sequence
  source 1..4794: mol_type = other DNA
atggaggccgaggaggcccagcggggcgccagcccccccatcagcgcaatagaggagtttagcattattcctgaagcgcccatgcggagttcccaggtgagtgcactgggtctggaagctcaagaggatgaagatccatcttacaagtggcgtgaggagcaccggctgtctgcaacacagcaatccgaactccgcgacgtatgcgattacgccatcgagacaatgccttccttcccaaaggaagggtcagccgatgtggagccaaaccaggaatccctagttgcagaagcatgtgacactccagagcattgggaggcagtgccccagagcctggcgggcaggcaagctagaaccctggctccccctgagctttgggcctgcccaatacaatcagaacacttggatatggcgcctttttctagcgacctggggtctgaggaggaagaggtggaattttggcctggcctcacttcccttactctgggtagcggacaggcggaagaggaggaggaaacctcatcagataactccggccagacccgttattacagcccttgcgaggaacatcccgcagagacgaaccaaaatgagggatctgagagcggcaccatcaggcagggtgaagaactaccacctgaggagttgcaagagagtcaagggctgctccacccccaggaagtacaagtcttggaagagcaggggcagcaagaggccggtttcaggggggagggaacactgagagaagacgtgtgcgcggatggcctacttggagaagagcaaatgatagagcaggtgaacgacgagaaaggtgagcaaaagcagaagcaggaacaggtccaggacgtgatgctcggacggcagggtgagcgcatgggtctgacaggagagccggagggactaaacgacggggagtgggaacaagaagacatggagcgaaaggcccaagggcaaggcgggcctgagcagggagaggaacgaaagcgcgagctgcaggtgcccgaagaaaatcgagctgacagtcaggatgagaagagccagacgttcctcgggaagagcgaggaagtgaccgggaaacaggaagaccacggaattaaagagaaaggggtgcccgttagtggccaggaggctaaagagcccgagtcttgggacgggggtagattgggggctgtcgggcgagcaagatcacgggaagaggaaaatgagcatcacggcccttcaatgccagccctcattgcacccgaagactccccacactgtgacctgttcccaggagcctcttatctgatgacccagataccaggcacacagactgaatctagggcagaagagctgtcacccgcagccttatccccttccctcgagcccatcaggtgcagccaccaaccaatcagtctgcttggatctttcctgacagaagagtccccagataaggaaattgaccaaaactcacagcaggaggagtccagactgcgcaaaggcacagtttcgtctcagggcaccgaagtcgtgttcgcctcagcaagcgtgacacctccacgcactccagactccgccccaccctccccagcagaagcatatcctatcacgcccgcctcagtgagcgcacgacctcccgttgcttttccacgcagggagacctcctgcgcagcccgcgctccagagacggcttccgccccattaagcatggacgacccaagtccatgcggtacctctgaaatgtgccccgccgcactgtatggattcccttctactgggacgtcccctccccgcccccccgccaacagtaccggcaccgtgcaacacctcaggagcgatagcttcccagggtcgcataggaccgagcagactccagatctggtgggcatgttgctctcatacagccacagcgagcttcctcaacgcccgccgaagccagcaatttacagctctgtcacaccacgtcgggaccggagaagtggccgggactattccaccgtgtctgcttctcccactgcattgtctactctgaagcaggattcccaggagtccattagcaatctggaacgtccttcatctcccccttcaattcagccatgggtttctcctcataatcccgccttcgccacggaatctccagcatatggttccagtccgtcttttgtttccatggaggatgtaagaatacatgagcccttgcctccacccccgcctcagcgaagagacacccacccctcagtcgtggaaacagacggacatgctagggtggtggtgcctaccctgaaacaacactcccacccgccacctctggccttagggagcggattgcacgcaccgcataaagggcctcttccgcaggctagcgacccagcagtggcccggcagcataggccgctgccttcaacccctgatagcagccatcacgcacaggctacaccgcggtggcggtataataagccgcttccaccaaccccagacttgccacaacctcacctaccccctattagcgctcctggctcctcgcgtatctacaggcccttaccgcccttgcccatcatagaccctcccacagagcctccacccctaccccccaaatccaggggccgctctcggagcactcggggaggacacatgaactccggcggtcatgcgaaaacccgcccagcatgtcaggactggaccgtcccactgcctgcttccgctggcaggacatcatggcctcctgcgaccgcacgctctaccgagagctttacaagtaccagccgcagcaaatctgaagtcagtcccggaatggcttttagtaatatgacaaactttctctgcccctctagccctacaacaccctggacaccggagcttcagggtccaacctctaaggacgaggctggggtgagcgagcatccagaagcgcctgctagggaacccctccgacgcacaaccccgcagcagggcgcatcaggacccggacgctctcccgtcggacaggccaggcagccagagaaaccctcccacctgcacctagagaaggcatcgagctggcctcacaggagggattctggtcgcccaccaggagactcttctgggcaagcggttgctccatccgagggcgcaaataagcataagggatggtctaggcaggggttgaggagaccctccatactccccgaggggtcctctgactctagaggtccagctgtagaaaagcatcctggccctagcgatacggtagtattcagggagaaaaaacctaaagaggttatgggagggttttctcgccgctgtagcaagcttattaattccagccaacttctttaccaagagtactctgacgtcgtcctcaataaagagattcagtctcagcagaggttggaatcactaagtgagaccccagggccttcctcaccaagacagccgagaaaggcactggtgagttccgaatcttatcttcagcgactatctatggcatcgagcgggagcctctggcaggagattccggttgtgcggaattctacggtgttattatccatgacccatgaagaccagaaactgcaggaggtcaagtttgaattaattgtaagcgaagcctcttacctgaggagcctgaacatcgctgttgaccatttccagttgagcacaagtttgcgagccactctgtcgaatcaggagcaccagtggctgttttcgcgactacaggacgtgagggacgtatccgccacttttctctccgatttggaggaaaatttcgagaataatatcttctcattccaggtgtgtgacgtagtgttaaatcatgctcccgattttcgcagagtctatctaccatatgtgactaaccagacctatcaggaacggaccttccagtcacttatgaactcaaatagtaattttagggaggtcctagagaagctcgaaagcgatccagtgtgtcagcggctgtcgctcaaaagctttttaatcttgcccttccagcggataactcgtctgaaactgctcttgcagaatatcctgaaacgaactcagccgggatcctctgaagaagctgaagctaccaaggcccaccacgctctggagcaacttatccgggactgtaacaataacgttcagtccatgcgaagaactgaagagctcatttatctcagtcagaagattgaattcgagtgcaaaattttccctctcattagccaatctaggtggcttgtgaagtctggtgaattgacagcactggaattttctgctagccccggactgagaaggaagcttaatactcggccagtgcacctgcacttatttaatgattgtctgctcctcagtcgcccacgcgagggtagtcgtttcctagtcttcgatcatgcgcctttctcctccattaggggagaaaagtgcgagatgaagctacatggtccgcataagaacctgttccgcttgtttcttcggcagaacacacagggcgcgcaggccgagtttctattccggacagaaacgcagtcagagaaattaaggtggatttccgcacttgctatgcctagggaagagctggatctcctggaatgctacaactcccctcaggttcagtgcctgcgggcctacaagcctcgagagaacgacgaattggctctcgagaaggccgatgtggtaatggttacacagcagtcctccgatggctggttggaaggggtgagactgtcagacggggaacggggctggtttcccgtgcagcaggtggaattcattagtaaccccgaagtgcgggcccaaaatctcaaggaagcgcacagagtgaagacagccaaattgcagcttgtggagcagcaggcctag

SEQ ID NO: 203410 - DNA, 1197 bp, synthetic construct
  misc_feature 1..1197: note = Description of Artificial Sequence: Synthetic coding sequence
  source 1..1197: mol_type = other DNA
atggccagcagcggcagcctgtggcaggagatccccgtggtgcggaactcaactgttctcttgtcaatgacccatgaagaccagaaacttcaagaagtgaaatttgagttgattgtatctgaggctagctacctgcgctccctaaatatcgccgttgatcactttcaactaagtacttctttgagggcaacactcagtaaccaggaacatcagtggttattctcacgcctgcaggatgtcagagacgtgtctgcaacctttctcagtgacctggaagaaaactttgaaaataacatattttcatttcaagtttgcgacgtcgttctgaaccatgccccagacttcaggcgagtgtacttaccctacgtgaccaatcagacataccaagaaaggaccttccagtcactcatgaattcaaactcaaacttccgcgaggtgctagagaagttagaatcagatccagtgtgccagcgcctttccctgaagagcttcctcatcttgcccttccaacgcataacacgacttaagctgcttctgcaaaacatcctgaagaggacccaacccggctcttccgaagaagcagaagcgaccaaggcccatcacgctctggagcagttaatccgggactgcaacaacaatgtgcagtccatgcgcaggacagaggaactcatatacctgtcacaaaaaattgaattcgagtgtaaaatcttccccctaatttctcaaagccgatggctggtcaaatcaggtgagttaactgccctcgaattctcggcgtcccccgggctgcgcagaaaactcaataccagaccagtacacctgcacctgttcaacgattgcctcctgctctcgcgacctcgggagtctgagaaattacgttggatttccgcgctagctatgccaagagaggaactcgacctactcgagtgctataactccccccaagtgcaatgcctgcgagcttacaaacctcgagagaacgatgaactcgccctagagaaggcagacgtggttatggtaactcagcagtcttccgatggctggttagagggggtacgcctctcagatggagagagggggtggtttcctgtgcagcaggtcgagttcattagcaacccagaggtccgggcacagaatctcaaggaggcgcaccgagtgaaaactgctaagctgcagctggtcgaacagcaggcatag

SEQ ID NO: 203411 - DNA, 1560 bp, synthetic construct
  misc_feature 1..1560: note = Description of Artificial Sequence: Synthetic coding sequence
  source 1..1560: mol_type = other DNA
atgggcggcttcagccggcggtgcagcaagctgatcaacagcagccagctgctgtaccaagagtactctgacgtggtcttaaacaaagagattcagtcccagcagagactggaaagcctttccgagacacccggcccgtccagccctaggcagccacgcaaggccctggtgagctcagagtcctacctccagcgactctcaatggcctcgagtgggtccttgtggcaagaaatacccgttgttaggaactccacagtgctgctgtccatgacccatgaggaccagaaacttcaagaggtgaagttcgaattaattgtatccgaagccagctacctcagatccctgaacatcgcggtggatcatttccagttgtcaacttctttgcgggctaccttgtctaatcaggagcaccaatggctgttctcacgactgcaggacgtccgggatgtgtctgcaacctttcttagcgatctcgaggaaaactttgagaacaatattttctccttccaagtgtgcgatgtggtactaaatcacgcaccagacttcaggcgcgtctaccttccatacgttactaatcagacctaccaagagcgcacatttcagagcctgatgaatagcaacagtaacttccgcgaagtcctcgagaagttggagtccgatccagtgtgtcagaggttgagcctgaaatcctttctgatcctgccatttcaaaggatcaccagactgaagcttcttctgcagaacatactcaagcgaactcagccaggaagttccgaagaagctgaagccactaaggcccaccatgcactcgaacagctcataagagattgcaacaacaacgtccagtctatgcgacgcacagaggagctgatttatctttcccagaagattgagtttgagtgcaagatttttcccttgattagccagtccagatggctcgtcaaatcgggcgagctgaccgcattggagttctccgccagcccagggcttcgccgaaagttaaacacacggcctgtacatttgcacctgttcaacgattgcctactgctgtcaagaccgcgggaaggaagtcgatttcttgttttcgatcacgccccattctcaagcatccggggagagaagtgcgagatgaaattgcacggcccccataagaatcttttccgtctgttcctgcgtcagaatacacagggggcccaggccgagtttttgtttaggacagaaacacagagtgagaagctgagatggatttctgccctggcgatgccaagagaggagttggatctgctggaatgttacaattctccgcaagtccaatgtctcagagcgtataagcctcgggagaatgatgagctggctctagagaaagccgatgtcgtcatggtgacccaacaaagctcagatggatggctggaaggggttagactctccgacggggaacgtggctggttccccgtacaacaggtggagttcatatctaatcctgaggtcagagctcagaacttaaaagaggcacacagagtgaagactgctaagctgcagttagttgaacagcaggcttag

SEQ ID NO: 203412 - DNA, 2394 bp, synthetic construct
  misc_feature 1..2394: note = Description of Artificial Sequence: Synthetic coding sequence
  source 1..2394: mol_type = other DNA
tgagtggtggtgcccaccctgaagcagcacagccaccccccccccctcgctctcgggtcaggactacatgcccctcataagggccctctaccccaggcgagtgatccggctgtcgcacgccagcaccggccattgcccagtacaccagattcaagccatcacgcccaggcaacaccccgctggagatataacaagccactgccccctacgccagatctccctcagccccatcttccacctatttctgcacccgggtccagccgcatatatagacctctcccacccctaccaatcatcgacccgcccaccgagcctcccccccttcctcccaaatctcgcggacgatccagaagcacacgggggggccatatgaattccggcgggcacgccaagacaaggcccgcctgtcaagattggaccgttccactgcctgcatcggctggaaggacttcttggccccctgctactgcccgctccactgaaagttttacttcgacatccagaagcaagtccgaggtctcccccggaatggcgttttccaatatgactaattttctgtgcccttcatcaccaaccaccccgtggacaccagagctgcaaggccccaccagcaaggacgaggccggcgtgagcgagcaccctgaagcccccgccagagagcccctgcgaaggacaacaccccagcagggagcgtccgggcctggccgctctccagtgggacaagcaaggcagcctgaaaaaccatcccacctgcacctggaaaaggcatcttcatggccacatcggcgggactccgggcgccctcccggagatagcagcgggcaggccgtcgccccgagcgagggcgctaacaagcacaagggctggagccgccagggcctaaggcgaccaagcattctcccagaagggagctctgatagtagagggccggctgtggagaagcatccgggtccaagcgacacggtagtcttcagggaaaaaaaacctaaggaagtcatgggaggcttttccaggcggtgttctaaactcatcaatagctctcagttgctctaccaggagtactcagacgtagtccttaataaggaaatacaaagccagcaaagattagaatccctttccgaaactccaggaccgagttctcccaggcagcctaggaaggcgctcgtgtccagcgaaagctatcttcagaggttgagtatggcctccagcggatctttatggcaggagatccctgtggtgcgcaatagcactgtgctgctgagtatgacgcacgaagatcaaaagctgcaggaggtgaagttcgaattaatagtttccgaggcgagttatcttcggtctctgaacatagctgtggaccattttcaactcagcacatccctgcgcgccaccctgtcaaatcaagagcatcagtggctgttttccagactccaggacgtaagagatgtgagtgcaacctttctttcagacttggaagaaaattttgagaacaatatcttcagcttccaggtctgcgacgtggtcctgaatcacgctcccgatttccgacgggtctatctgccatatgtcacaaaccagacttatcaggaacgaacatttcaatccctgatgaatagcaattcaaacttcagggaggtgctagaaaagttagagtccgatcccgtctgccagcgcctcagccttaaatcctttttaatcctgcctttccagcggataactcggttaaaattgctattgcagaatattctgaaaaggactcaaccggggagttccgaagaggccgaagctacgaaggcgcaccatgctctggagcagctgattcgggactgtaataataatgtccagtccatgaggagaactgaagaactaatttatctgagccagaagattgagtttgagtgcaaaattttcccactcattagccaaagcagatggctcgtaaagtccggagagctcactgctctggaattttccgcctccccaggccttcgacgcaaactcaatacacggccagtgcacttgcatctttttaatgactgtctcctcctgtcacgtcctagagagagcgaaaaactacggtggattagcgccctggccatgcccagggaggaattagacttgttggagtgctataattcaccacaggtccaatgtctccgtgcatacaagccacgagagaatgatgagctggccctcgagaaggctgacgtcgtgatggttacccagcagtcaagcgatgggtggctagaaggtgtcaggctgagtgacggcgagcgcggctggttccctgtccagcaagtggaattcatctcgaatcctgaagtcagggctcaaaacctgaaggaagcgcaccgggttaagactgctaagcttcagctcgtcgagcagcaggcctag

SEQ ID NO: 203413 - DNA, 2958 bp, synthetic construct
  misc_feature 1..2958: note = Description of Artificial Sequence: Synthetic coding sequence
  source 1..2958: mol_type = other DNA
atgagccggatcgagagcctgacccgggcccggatcgaccggagccgcgagcttgcctcaaagaccagggagaaggaaaaaatgaaggaggctaaggacgcgcgatacaccaacggtcacctgttcacaaccatctcagtgtccgggatgacaatgtgttatgcttgtaataaaagtatcacggccaaggaggccctgatctgtcctacttgcaatgtgactattcacaaccgctgcaaagacaccctagccaactgcacaaaagtgaagcagaaacagcagaaggccgcccttctcaagaataacactgccctacagagcgtgtcacttaggagcaagaccacaattagggagaggcccagctccgctatttatcctagtgactcttttcgtcaatctctgcttgggtcacgccgggggaggagctctttgtcactcgcgaagtcagtcagcacaacgaatatcgccgggcactttaatgacgaatctcctttgggcctacgaagaattctatcccagagtaccgacagcctcaatatgcgaaaccggactctcagcgtcgagtccctgattgatgaagaagtaatctatagcgagcttatgtccgatttcgaaatggacgagaaggactttgccgcagacagctggagtctcgccgtcgactctagcttcctgcaacaacataaaaaagaggtgatgaagcagcaggatgttatctacgaactgatccagacggagcttcaccatgtccgaacactaaaaattatgactagattatttcgcaccggcatgctagaggagctgcacctcgagcccggagtggtacaagggctgttcccatgtgttgacgagctttctgacatccatacaaggttcctgtctcaactactggagcggcgccgtcaagccttgtgtcctggatcaacgcgtaattttgttatccaccgtctgggggacctattaatcagtcagttttccgggccatcggccgaacagatgtgcaagacatatagcgagttctgtagtcgacactcgaaggccctcaagctctataaagagctgtatgctcgcgataaaaggttccagcagttcattaggaaagtgacaaggcccgccgtcttgaaacggcatggcgtacaggaatgtattcttctggtaacacagaggattacgaagtatcctttgctaataagccggatcctgcagcactctcatggtattgaagaggagcgccaggatctgactaccgccctaggattggtgaaagagctgctttccaatgttgacgagggaatctaccaacttgagaaaggtgccaggctgcaagaaatttacaaccgaatggaccccagagcacagaccccagtccctgggaaaggaccattcgggagagaggagctgctacgtagaaagttaattcacgatggatgcctactctggaaaacagccaccggccgcttcaaggacgtgctggtgctcctgatgactgacgtgctagtgtttttgcaggaaaaagaccaaaaatacatcttccccactctggacaagccgtcagtggtgagtcttcaaaacttgattgtcagagatatcgctaatcaggagaagggaatgttcctaatttcagccgccccacctgaaatgtacgaagtgcataccgccagtagggacgacagaagtacttggataagggtgatccaacagtctgtgcggacatgtccctctagggaggacttccctctgattgagacagaggacgaagcatacctgcggaggatcaagatggagctgcagcaaaaagatagggctctggtggaacttttgagagaaaaggttgggttgtttgccgagatgacccatttccaggccgaggaggacggagggagtgggatggccctgccgacacttcccaggggattgttccggtcggagagcctcgaaagtcccagaggcgaaagactgctgcaagacgccatccgagaagtggagggcctaaaggatcttctggtcggtcctggcgtcgagctacttctgacccctcgggagccagcactccctctagaacctgatagtggcgggaatacttcccctggggtaacagccaatggtgaggccagaacatttaacggttctatcgagctgtgtcgcgccgattcggattcttcccagcgggacagaaacggcaaccagctgcgttcgccacaggaggaagctctccaacgactagtcaatctgtatggtcttctccatggcctgcaggcagccgtggcacagcaggacacactgatggaagcacgcttcccagagggtcctgaaaggagggagaaactatgccgggccaacagccgggatggagaggccggtagggccggagccgccccagtagctccagagaagcaggccaccgagttggcactgctccagaggcagcatgccctgctgcaggaagagttgcgcagatgtagaagactgggcgaagagagggcaactgaggcaggatccctggaagctcgactcagagaaagtgagcaggctagagcccttttggaaagggaagctgaagaggctcggaggcagctagctgccctcgggcagacggaaccactgcccgccgaagccccatgggcccgtcggcctgtggatccacgccgcaggtcactccccgccggcgatgctctgtacttaagctttaacccacctcagcctagtaggggaactgaccgcctggacctccctgtcacgacgcgcagcgttcacaggaacttcgaagaccgggaacggcaagaactgggaagtccagaagaacgactgcaagatagtagtgacccggatacggggtcagaagaagaggggagcagccggctatcgcccccgcatagcccccgagacttcacccgcatgcaagacatacccgaggagactgagtcacgcgacggagaagctgtcgccagtgaaagctag

SEQ ID NO: 203414 - DNA, 2877 bp, synthetic construct
  misc_feature 1..2877: note = Description of Artificial Sequence: Synthetic coding sequence
  source 1..2877: mol_type = other DNA
atgaaggaggccaaggacgcccggtacaccaacggccacctgttcactaccatctccgtgtctgggatgacaatgtgctacgcgtgtaataagtcaatcaccgcaaaggaggccttaatatgtcccacctgtaacgtaaccatacacaatcggtgtaaagacacactagccaattgcaccaaagttaaacagaagcaacagaaagccgctcttctgaagaataacactgcgctccagtcagtctctttgaggagtaagacaacgatcagggaacgcccttcgtctgccatttatccatcggacagcttccggcaatccctcttaggatcccggcggggccgctcgtctctgtccctcgccaaatcagtgtcaactacgaatatagctggtcattttaacgacgagagccctctgggattacgaagaatcctgtctcagagtacggattctttgaatatgaggaaccgcacactcagcgtggagtctttgatcgacgaagaggtcatctactcggagctgatgagtgatttcgagatggacgaaaaggacttcgctgcggactcctggtctctcgctgtggattcctcatttctacagcagcataagaaggaggtcatgaaacagcaggacgtgatctatgagcttatccagaccgagttgcaccacgtgaggactctcaaaattatgactagactctttcgaaccggaatgttagaagaacttcatctcgagcctggagtcgtccaaggcttgtttccctgcgtggacgaactgtctgatatccatactcgcttcctctcccagctgctagagcgcaggcgtcaggctctttgccccggctctacaagaaatttcgtgatccatcgcctgggcgatttacttattagccaattctcagggccttccgccgagcagatgtgtaagacttactctgagttttgctcaagacattctaaagccttgaagctgtacaaagaactgtacgctagagacaagcgttttcagcaatttataaggaaagttacacgacctgcggtactcaaaaggcacggggttcaggaatgcattctccttgtaacacagcggatcacaaaatatccattgctgatctcgcgcattctacagcacagtcacggcattgaggaggagcgccaggacttaacaacagcccttggtctggtgaaagagctgctgtcgaatgtggacgaaggcatttatcaactggagaagggggcacggttgcaagaaatctataacaggatggacccccgggcgcagactccagttcccggcaaggggccctttggtagagaagagctgctccgccgaaagctgatacatgatggctgcctcctttggaagacggctaccgggagatttaaggatgtcttagtgctattgatgacagacgttctggtcttccttcaggaaaaagaccaaaaatatattttccccacactagacaaaccttccgttgtgtctcttcagaatctaattgtccgggacattgccaaccaggaaaaaggcatgttcctgatttcagcagccccccccgaaatgtacgaggtacataccgcctctagagacgaccgcagcacttggattcgggtaattcagcagagtgtgcggacttgccctagtagagaggactttccgctcatcgaaacagaggatgaggcctacctgagaaggataaaaatggagctgcagcagaaggaccgggccctcgtggaactgcttcgggagaaggtcggactatttgctgagatgacacacttccaggcagaagaagacgggggctcagggatggccttaccaactctcccacgggggttatttagatctgagtcactagaatccccgaggggagaacggttgttacaagatgcaatacgagaggtggaggggttgaaggacctactggtgggccctggcgtagagctcctgctgacaccaagggagccggcccttcccctggagcccgactcgggcggtaacaccagccccggagtcactgctaatggagaagcccgaacatttaacgggtctattgagttgtgtagggccgacagcgattcttcccagcgggaccggaatggaaatcagcttaggtctcctcaggaagaagccctgcagagactggtcaacctgtatggattgctccacggactgcaagccgccgttgcccaacaagacactttgatggaagcccggtttcccgagggcccagaacgacgggagaagctgtgtcgcgctaactccagagacggggaggccggcagagctggagctgctccagtagctcctgagaaacaggcaacggagctcgcccttctgcagaggcagcacgctttgctacaggaagagttgcggcgttgtcgacggctgggcgaggaacgggctaccgaggccggtagcctggaggcccggttgcgggagtctgagcaggccagggcactgctggaacgggaagccgaagaagccagacgccagctcgctgccctggggcaaacagagcctctgccagcagaggccccgtgggctcgccggcccgtggacccccgccgccgctcactgcctgcaggcgatgctttgtatctttccttcaacccaccccagccctctagagggaccgatcggcttgatcttcctgtgacaacaagatccgtacaccggaactttgaggatcgcgagaggcaggaactcggcagccctgaagagcggctacaggacagctcagatcccgatacaggatcagaggaggagggctcaagcaggctgtcccctccccattccccccgcgactttacccgtatgcaagatattccagaagagaccgagtcaagggacggggaagccgtggcctctgaaagttag

SEQ ID NO: 203415 - DNA, 2961 bp, synthetic construct
  misc_feature 1..2961: note = Description of Artificial Sequence: Synthetic coding sequence
  source 1..2961: mol_type = other DNA
atgagccggatcgagagcctgacccgggcccggatcgaccggagcagagagctcgcttccaagactagagaaaaagaaaagatgaaggaagctaaggatgcccgatatacgaacggccacctctttaccactatctccgtgtctggcatgacgatgtgctacgcttgcaacaaaagtatcacagcaaaggaagctctgatctgccccacgtgcaatgttactatccacaaccgatgtaaggatactctagcaaactgcacaaaggtgaagcagaaacagcagaaagctgcgctcttgaagaataatactgcattacagagtgtctctctgcgaagtaaaacgaccattagggaacgaccttcatcagcgatttaccccagcgactcctttcggcagagcctgctgggctcgagacgaggaaggagttctttgtccctggccaaatctgtgtctaccacaaatatagcaggtcatttcaacgacgaatcgcctctaggactccggagaatcctcagtcagtctacggactcactcaacatgaggaacagaactctctcagtggaatcgctcattgacgaggccgaagtgatttacagcgaacttatgtctgattttgagatggatgagaaagatttcgccgctgatagttggtccctggcagtggactcttccttcctgcagcagcacaagaaggaggtcatgaagcagcaggacgtaatatatgagttgatccagaccgagctgcaccacgtgagaaccctcaaaatcatgactagactgttccggacaggtatgcttgaagagttacaccttgagcccggcgtagtgcagggtctgtttccatgcgtggacgaactctctgacattcacacccgattcctttctcagttactggagcggagacggcaggcgttgtgccctggatctacaagaaacttcgtgattcacagactgggggatctcctgatctcccagttctccggacctagtgccgagcaaatgtgcaagacttattcagaattttgctcccgccacagtaaggccctcaagctgtacaaagagttgtatgctcgcgacaaacgttttcagcagttcatcaggaaggtaacaagaccagccgtgttgaaacgccacggggttcaggaatgcatactgttggtgactcaaaggattaccaagtaccctctgctcattagccggatcctgcagcactcccatggtattgaggaggagcgccaagacctgacaacggcacttggcctcgtgaaggaactattgtctaacgtggacgaagggatatatcaattggagaagggggctagattacaagagatttacaatcggatggatccccgcgcacagacaccagtgccaggtaaaggaccctttggtcgtgaggaattgcttagacgcaaattaatacacgacggatgcctcctatggaaaactgcgaccggtcggttcaaggatgtcctggtgcttcttatgactgatgtgttggtctttctccaggagaaggatcagaaatacatttttccaacgcttgataagccaagcgttgttagtctgcagaacctgatagtcagagatatcgccaaccaggaaaaaggaatgttcttgatctccgccgcccctcccgaaatgtacgaggtgcacacagcgagcagagatgatcgcagcacctggattcgtgtgatccagcagagcgtgaggacgtgtccttctcgggaagactttcccttgatcgaaacggaggatgaagcttacctccgccgaatcaaaatggaactacagcagaaagaccgagctctcgtggaactgctgagagaaaaggtcggcttgttcgcggaaatgacccacttccaggcagaagaagacggaggcagcgggatggctctgccaacactgcctcggggcctgtttcgctcagagtctctagaaagtccccgcggtgagcggctgttgcaggacgcaatcagagaggttgaaggcctgaaagatctcctagtggggcccggagtggagctcctgctaactccacgcgaaccagctctccctctcgaacccgatagcgggggtaatacctctccaggagtgaccgcaaacggagaagcaagaacattcaatggttccatcgagctgtgtcgggccgactccgactcatcacaaagggatcgcaatggcaaccagctcaggtctccacaggaggaagcgctccagagactcgtaaatctgtatggtctcctgcacggtcttcaggccgcggtggcccagcaggatacccttatggaggctaggttcccggaaggtcctgaacgcagggagaagctgtgccgtgccaattcccgtgatggggaagcaggccgcgctggggctgcacctgtggcacccgagaagcaggccactgagctggctctgctacagcgtcagcacgcgctgctgcaggaggagctacggagatgtaggaggctgggggaagagcgagctaccgaagcaggttccctggaagcccgtctcagagaatccgaacaagctagagctctgctcgagcgtgaagcagaggaagcaagaaggcagttggcagccctgggccagacagaacctctacccgctgaggctccctgggctcggagaccagtcgaccctcggagacgctctctgcccgctggtgacgcactgtatctcagctttaatcctccgcagcccagccgcgggaccgatcggctagacctccctgttactacccgatctgtgcaccgtaactttgaggatcgagaacgtcaggaactaggttcccccgaggagcggctccaggatagttccgatcccgataccggctccgaggaggaaggatcatccagactctcacctccccactcacctcgggattttactcggatgcaggatatccctgaggagactgaaagccgggatggcgaagcagtcgcatctgaaagctag

SEQ ID NO: 203416 - DNA, 2964 bp, synthetic construct
  misc_feature 1..2964: note = Description of Artificial Sequence: Synthetic coding sequence
  source 1..2964: mol_type = other DNA
atgtgctgctgctgcggctgctgccccctgctggcccacctggagcagggaagcctgagggaacgaaccagggaaaaggagaaaatgaaggaagctaaggatgcgcggtataccaacggacatctgtttactacgattagcgtgagtggaatgaccatgtgctatgcatgcaataaatcaattacagctaaggaagctctgatatgtcccacctgtaacgtcaccatccataatagatgtaaagacactctagctaattgcacaaaagtgaaacagaagcagcagaaagcagctctgctgaagaataataccgctctccagagcgtgagtctgcggtcaaagaccacaattagagaacggcccagcagcgccatctacccatctgattctttcaggcagtctctgctcgggagccgtcgaggtcgctcctcactgtcactcgctaaatccgtaagtacgaccaacattgccgggcattttaatgacgagtccccactgggactgcgtcgaattctatctcagagcaccgactctctgaacatgagaaaccgtacgctcagcgtagagagccttatagacgaggctgaagttatttattccgagctgatgtctgacttcgagatggatgaaaaggactttgcagccgactcctggtctctggccgttgacagcagttttctacagcagcacaaaaaagaagtaatgaagcaacaagatgtgatatacgaattgatccaaacggagctgcaccacgtgcggacactgaagattatgacccgcttattcaggactgggatgctagaagaactgcacttggaaccgggggttgttcagggcctgttcccatgtgttgacgaactctccgatatccatacacgatttctctcccagcttttagagagacgacggcaagccctgtgccctggctcgacaagaaactttgtgatccaccgcttgggcgaccttcttataagccaattttcagggcccagtgctgagcagatgtgtaaaacctactctgagttttgcagtaggcactctaaagctttaaagctgtataaagagctgtacgcccgagataagcgattccagcagttcatcagaaaagtgacaagacctgctgtgcttaagcggcatggcgtacaagagtgtattttactcgttacacagcgaattaccaaataccctctactgatttccagaattttgcagcactctcacggtatcgaggaagaaagacaggacttgactactgccctcggcctcgtgaaggagctgctatccaatgtggatgaaggaatatatcagctcgagaaaggggcccggctccaagagatctacaatcgaatggacccccgggcccagacacctgtgcctggcaagggtccctttggcagagaagaattgctccgccgtaagctcatccatgatggctgtctactatggaagacggctacagggcggttcaaggacgtgttggtgctgctgatgaccgatgtgctcgtgttccttcaagagaaggaccagaagtatattttccctactctggataaaccttcagtggtctccctgcaaaatctcattgtgcgcgatatcgcaaatcaggaaaagggaatgtttctgatctctgctgccccgcctgaaatgtatgaagtacatactgctagccgggatgatcggtcaacttggatcagagtgattcagcagagtgtcagaacgtgcccaagccgcgaagatttccccctcatcgagactgaggacgaggcctacttaaggcggatcaagatggaactgcagcaaaaagatagagctctggttgagctgctccgggaaaaggtgggcttgttcgccgagatgacacacttccaagccgaggaggacggcgggtctggcatggccctgcccacacttcctcgcggcctgttcagatccgagtccctagaaagccccagaggcgagagactactgcaggacgccatcagggaggtggagggcctaaaggatttgcttgtcgggcccggggtggagctcctcctcactccccgggagcccgccctcccattggagcccgactcaggagggaatacaagcccgggtgtgacagcgaatggggaggcaagaacattcaatggctcaattgagctctgtcgcgccgactccgactcgagccaacgggaccggaatggcaaccagctaaggtctccacaggaggaggccctccaacggttagtaaatttgtatgggctgctgcatgggttacaggccgccgttgcccagcaagacacactgatggaagcccgctttcccgaaggacccgagcgaagagagaaactctgccgagcaaattctcgggatggagaggctggacgggctggcgccgcacccgtagcccctgagaagcaggccactgagttggcactcctgcagaggcagcatgctttgttgcaggaggagctgcgcaggtgtagacgactcggagaggagcgagccacagaagcgggcagcctggaagcaaggttgcgcgaatcggaacaggcacgggcccttctcgagagagaagcagaggaggcacgaagacagctggccgcactgggccagacggagcctctgccagccgaggctccctgggcccgcaggcccgtggaccctaggcgaagatccctgcccgctggagacgccctatacctaagtttcaatccgcctcagccaagcagggggactgaccgactcgacctgccagtgaccactcggtctgtccataggaactttgaagaccgggagcgccaggaactgggcagcccagaggaacggctgcaggacagcagtgaccccgatactggctctgaggaggagggctccagtcgcctgtctcctccacacagcccccgtgattttacaagaatgcaagatattccggaagagactgaatcacgcgatggggaagcagtagcgtctgaatcatag

SEQ ID NO: 203417 - DNA, 2877 bp, synthetic construct
  misc_feature 1..2877: note = Description of Artificial Sequence: Synthetic coding sequence
  source 1..2877: mol_type = other DNA
atgaaggaggccaaggacgcccggtacaccaacggccacctgttcaccaccatttcagtgagcggtatgactatgtgctatgcatgtaataaaagcataactgcaaaagaggctttgatttgtcctacttgcaatgtcaccattcataatcggtgtaaggacacgctggcaaattgtaccaaggtgaagcagaagcaacagaaggcagctcttctgaagaacaataccgccctccagtcagtgtctctccggtctaagactacgatccgcgagcgcccaagcagcgctatttatccatctgatagttttaggcagagcctattggggagtcgtagaggtagaagctccctgtccctggcgaaatcagtctctaccacaaatattgctggccactttaacgatgagtcccctctgggattacggcggattctgtcccagtctaccgactcactgaacatgcgaaaccggactctgtctgttgaatcccttattgacgaagaggttatttacagcgaactcatgtcagactttgagatggatgagaaagattttgcggctgacagctggagtctggcagtggattcttcatttctgcagcagcacaagaaggaggtaatgaagcagcaagatgtcatatacgaacttatccagaccgaactccatcatgtgcgcactttgaaaatcatgaccaggctgtttaggaccggtatgctggaggaacttcacctagagccaggggttgtacaggggttgtttccctgtgtagacgagctgtctgatattcatacaagatttctcagccagctgctcgaacggagacggcaggctctgtgccctggatccactcgaaattttgtgatacaccgtctgggtgacctgttgattagccagttttctggccctagtgctgaacagatgtgtaagacctattctgagttttgcagccgacacagtaaagctctgaaactatataaggagctttatgctcgcgataagcgcttccaacaatttatcagaaaggtgacaaggcccgccgtgttgaagagacatggggtccaagagtgcatcctcctggtgacacagaggataactaaataccccctactgatcagtcggattctgcaacactcgcatggaatcgaagaggagcgacaagacctaaccaccgcgcttggccttgtgaaagagcttctctccaatgtagatgaaggtatttaccaattggagaagggcgcgcgactccaagagatttacaaccgcatggatcctcgggcccagactccagtgcccggaaaaggcccgttcggcagagaggagctccttaggaggaagctgatacacgatggctgcttgctctggaaaactgctaccggtaggttcaaggacgtgctggtgctgctgatgacagacgtactggtgttcttgcaagagaaggaccaaaagtatattttcccaaccctggacaaaccttctgtggtctccctgcaaaatctgatcgttagagacatcgccaatcaagagaagggtatgttcttaatttctgcggcccccccagagatgtacgaggtacataccgcatcccgagatgacagaagtacatggatacgtgtgatccagcaatcagttaggacatgcccgtctagggaggattttccactgatagagactgaggacgaagcttacctgcggcgcatcaaaatggagctgcagcaaaaagacagagcactggtggaactgctgagggagaaagtcggactgtttgcagagatgacccactttcaggcagaggaagatggtggttcgggcatggctcttcctacattgcctagggggctgttccgaagcgagtcattggaaagccccagaggcgagcgcttacttcaggacgcaattagggaagtggaggggctgaaggatcttcttgtcggccccggcgttgaacttttactcacgcctagggagccagccctgccactggaaccagactcaggtggaaacacatctccgggcgtgacggccaacggtgaagccaggacctttaatggcagcatagagctatgtcgggccgacagcgactcctcccagcgggataggaatggcaatcagctccgatctcctcaggaggaggccctgcagcgtcttgttaacctgtatggcctgttgcacggactccaagccgccgtcgcccagcaggatactcttatggaagcccggttccctgaaggacccgagagaagagaaaaactttgtagagctaactcacgcgacggagaggctggacgggccggcgccgcccccgtcgcccctgagaagcaagcgactgagctggccctgttgcagcgtcaacacgcccttctccaagaggaactgcgccgctgtaggcggctcggggaggagcgggccactgaagcgggttccctggaggctaggctgagggagtcagaacaggccagggctttactggaacgcgaagcggaggaggcgaggcgacagcttgccgccctaggccagactgagcccttacccgccgaagcgccgtgggcaagacgacctgtcgacccacgccggcgaagtctgcccgccggcgatgctctgtacttgagcttcaatccacctcagccttccagaggtacagaccgcctggacttgcctgtgacaacgagaagcgtgcaccggaactttgaagaccgcgaacggcaagaactgggatccccagaagagagactgcaggatagtagcgacccagacacaggtagtgaagaagagggcagctcaagactaagtcccccgcattccccaagagacttcacccggatgcaggatatacctgaagaaactgaaagtcgcgatggtgaggctgtggcttctgagagttag

SEQ ID NO: 203418 - DNA, 1548 bp, synthetic construct
  misc_feature 1..1548: note = Description of Artificial Sequence: Synthetic coding sequence
  source 1..1548: mol_type = other DNA
atgctgagcaagagcgtgcccgtgagcggcatcaactgcctgctggatcgtagcgataccgatgggaacgtgtcccagagcagcgcgatcgacttgcgcaagcggtgtagccagttagagggccactcggggacgagagtagggtcctctctgcgtcagacattttcgttcctgagcggcatgaccggcaaagccaagactcgggaaaaagagaaaatgaaggaggcaaaagacgctcgttacaccaatggccacctgttcactaccataagcgtttccggcatgacaatgtgctatgcgtgcaataaatcaatcaccgcaaaggaggctctcatttgtccaacttgtaacgttacgatccacaatcgctgcaaggacaccctggccaactgcaccaaggtgaagcagaagcaacagaaggccgcactgcttaagaacaacaccgcactgcaaagcgtatctttacgctccaagaccaccatccgggaaagaccatcctccgcgatttatccgagtgattcctttcggcagagcctgctcggttctaggagaggacgcagtagcctgtccctcgcaaaaagtgtgagcaccaccaatatcgccggacatttcaatgatgagagtcctctcggccttaggaggattctgagccagagtaccgactctctgaacatgcgcaaccggacactcagcgtagaaagcttaatcgacgaggccgaggtgatctattctgagctgatgtccgatttcgaaatggatgaaaaagacttcgcagcagactcttggtctctggctgtggatagctcttttctgcagcagcacaaaaaagaggtgatgaaacagcaagatgtaatctatgagctgatccagaccgagctgcaccacgtccgcactcttaagataatgactaggctgtttcgaaccggcatgctcgaggaactacacctggagcccggcgtcgtgcaaggattgtttccctgtgtggatgagctatccgatattcatacccgatttctgtcacaacttctggagcgacgtcgacaggctctatgtcctgggagtaccagaaactttgtgatccaccggcttggggaccttctgatcagtcagtttagtgggccatccgccgaacagatgtgcaagacttattccgagttctgctcgcggcattcgaaggccctaaaactctataaggaactctatgctagagacaaacgctttcagcaattcataaggaaagtgactcggccagcggtcttaaagcgccacggcgtacaggaatgcatcctgctcgtgacccagcgaataactaaataccctctactaatcagcaggattctgcagcacagtcacggcatcgaagaagaacgacaggacctgaccactgctctgggcttggtgaaggaactcttaagcaacgtggatgagggaatctaccagttagagaaaggtgctcgccttcaggagatttacaacctccttctcttgttttcgctgagtccgagctttatggaggcactgggggacaatctggccagctggagctag

SEQ ID NO: 203419 - DNA, 1332 bp, synthetic construct
  misc_feature 1..1332: note = Description of Artificial Sequence: Synthetic coding sequence
  source 1..1332: mol_type = other DNA
atgaaggaggccaaggacgcccggtacaccaacggccacctgttcacaacgatatccgtttccgggatgaccatgtgttatgcctgcaacaaatccatcactgccaaagaagcactgatctgtcctacttgcaacgtgacgatccacaacagatgtaaggatacgctggccaattgcactaaggtgaagcagaaacagcagaaggccgctcttctgaaaaacaatactgccttgcagtcagtgagcctgcgttcgaagaccactatcagagaaagaccctcctcagccatttacccgtctgacagcttcagacagtcgctgctggggagcagaaggggtcgaagtagcctcagtcttgcaaagagcgtaagtacgaccaatatcgccggacacttcaatgacgaatcacctctgggcctgcgccgaattttgagccagagcactgacagcctgaatatgaggaacagaacattaagcgtggaaagcttgatcgacgaagccgaggtgatttactctgagctgatgagtgatttcgagatggatgaaaaggacttcgcagcagatagctggtccctggccgttgacagttcctttctgcagcaacataagaaagaagtgatgaaacaacaggatgttatatatgagttaatacaaacagaactccaccatgttcgaacgcttaaaatcatgactcgactgttccgaaccgggatgctggaggagctgcatttagaaccgggcgtggtacagggactcttcccctgtgtagacgagctctcggacatccatacacgctttttgtcgcagctcttagagagaagaaggcaggcattgtgtcctggttcaactcgaaactttgtaatccaccgcctcggcgatctgctcatcagccagttctccggcccgtccgctgagcagatgtgtaaaacatattcagaattctgctctcgtcactccaaagcactgaaactgtataaggaactgtatgcccgcgataagcgtttccaacagtttattcgcaaggtcacacggccggccgtgctcaaacgacatggagttcaggagtgcatcttgttggtgactcaacggattactaaatatcccctcctcatcagcaggatactgcagcactcacacgggattgaagaggaacgccaggacctgactacagccctgggactggtcaaagaactgctgtctaacgtcgacgaaggcatataccaattggaaaagggggctaggcttcaggagatatacaatctgctgctcctgtttagcttaagtccaagcttcatggaggctttgggagacaatctggcttcctggtcttag

SEQ ID NO: 203420 - DNA, 4167 bp, synthetic construct
  misc_feature 1..4167: note = Description of Artificial Sequence: Synthetic coding sequence
  source 1..4167: mol_type = other DNA
atgagccggcccccccccaccggcaagatgcccggcgcccccgagaccgcccctggggacggagccggggcgtcccgacagaggaaactcgaggctctcattagggacccccgttcccctattaacgtggagagcttgctggacggcctgaattcactggttcttgatttagactttcccgccctgcgcaagaacaaaaatattgataacttcctgaatagatacgaaaagattgtgaagaaaattcgtgggctgcagatgaaggccgaggattacgacgtggtgaaggtaatcggccgaggtgcatttggcgaggtccaactagtgagacacaaggcgagccagaaagtctatgccatgaagcttttgtctaagtttgagatgattaaacgatcagacagcgcctttttctgggaggagcgggacataatggcgttcgccaattccccgtgggtggtgcagctgttctacgcctttcaggacgataggtacctgtatatggtgatggagtatatgccagggggcgacctggttaatctgatgagcaactacgacgtccccgagaagtgggcaaagttttacaccgccgaagtagtgcttgcacttgatgctattcactcaatgggcctcattcaccgcgatgtgaagccggataacatgctgcttgataaacacggccacctcaagctcgcagattttggtacctgtatgaaaatggacgaaacgggaatggttcactgcgatacagctgtgggcactccggactacatcagccctgaggtcctcaagagtcagggaggtgacggcttctacgggcgcgagtgcgactggtggtcggtgggcgtgtttctgtatgaaatgctggtcggggatacgccattctacgcagatagcctcgttggcacatacagcaagatcatggaccataagaacagtctgtgcttcccggaggacgctgaaatttctaaacacgccaaaaacttgatttgcgcctttctgactgaccgcgaggtccgtttaggtcggaacggagtggaagagatcagacagcaccccttcttcaagaacgatcagtggcactgggacaatattcgggaaaccgcagcacccgtggtgccagagctctctagtgacatcgactcctcaaactttgatgatatcgaggacgacaagggtgatgtggagacgtttcccattcctaaggcatttgtcggaaaccagctgccattcattggcttcacttattaccgcgagaacctgctgctatccgacagcccttcatgccgggagaccgactccatccagtcccgtaaaaacgaggagagccaagaaattcagaaaaaattgtacacactcgaggaacatttgtctaatgagatgcaggcaaaagaggaattggagcagaaatgtaagagcgtgaatactagactggagaaaacagcaaaggaattggaagaggagattacattgagaaagtcagttgaaagtgccttgcgacagctggagcgcgaaaaagccctactgcagcacaaaaacgcagagtatcaacgcaaggccgaccacgaagcagacaagaagagaaacctggagaatgatgtgaatagtttgaaggaccagctggaggacctaaaaaagcgtaatcagaactcccagattagcactgaaaaggtgaaccagctgcagcggcagttagacgaaaccaacgccttgctcaggacggagtcagacaccgccgcaagactcagaaaaacccaggcagagtccagcaaacaaatacagcagttggaatctaacaatcgcgatctccaggacaagaactgcctgctggaaaccgccaagcttaagttggagaaggagtttatcaacctacagtccgcccttgagagtgaacggagggaccgaacccacggcagcgagattatcaacgacctccagggacgcatctgcggtcttgaagaggatctgaaaaatgggaaaattctgctggccaaggtcgagctggagaagcgacaactccaggaaaggtttactgacctggagaaagagaaatcaaacatggaaatcgatatgacgtatcagctcaaagttatccaacaaagcttggagcaggaagaggccgagcacaaagctaccaaggcacgactagcagataagaataagatctatgaatctatcgaagaggctaaaagtgaagcaatgaaggagatggagaaaaaactgctagaggagagaacccttaaacagaaggtcgaaaacttactgttagaggccgagaagaggtgcagtttgctcgactgcgacttgaagcagtctcagcaaaagattaacgaactgctgaagcagaaagacgttttgaacgaagatgtgcgcaacttaactcttaaaattgagcaggagacccagaaacggtgcctgacgcagaacgatctgaagatgcagacccagcaagtgaatacattaaagatgtccgaaaagcaactaaagcaagagaataaccacctaatggaaatgaaaatgaatctcgagaaacagaatgcggagctacgtaaagaaagacaggatgcagacggccagatgaaggagttacaggatcagctggaggctgaacagtatttttctacgttgtacaagacccaggtaagagagctgaaagaagagtgtgaggaaaagacgaagctgggaaaggagttgcagcagaagaagcaggagttacaggatgagcgggattcactggccgcacagttggagattactctcacaaaggctgattctgagcagcttgcccgctcgattgccgaggaacaatattcagacctggaaaaggaaaaaattatgaaagagttagagatcaaagagatgatggcccgccataaacaagagctgactgagaaggacgccaccatcgcatccctcgaggaaacaaaccggacgctaacctccgacgtcgctaatttagcgaacgaaaaggaggaactcaacaataagctgaaagatgtccaagaacaactcagccggctgaaggacgaggaaatttctgctgctgccatcaaggcacagtttgaaaagcagcttctcacggagcgaactctcaagactcaggccgtgaataaactggccgagatcatgaaccgtaaggaacctgtaaagcgcggtaacgacactgacgtacggcgaaaggagaaggagaaccgtaaacttcacatggagcttaaaagcgagagagagaaactgacccaacagatgattaagtaccagaaagagttaaacgagatgcaggctcagatcgcggaggaatctcaaattagaattgagctgcagatgacgctagactctaaggacagcgatattgaacagctgaggtcccagctacaggcactccatatcggcctggattcgagctccattgggagcggcccaggcgatgccgaggccgatgacgggtttccagagagtagattggagggctggttatcactgccagtgagaaacaacacaaagaaattcgggtgggtcaagaagtatgtgattgtaagttcgaagaagattttgttttacgacagtgaacaagacaaagaacagtccaatccttacatggtcctggacattgacaagctgttccacgtgagaccggtgacccagaccgatgtttatagggcggacgcaaaagaaatccccaggatatttcaaatactctacgcaaatgagggtgaaagtaagaaggaacaagagtttccagttgagccagtgggtgagaagagcaactatatttgccataaagggcacgagtttatcccaacactataccacttcccaaccaactgcgaagcctgcatgaaaccattgtggcatatgtttaagcccccccctgcgctggagtgccgccgatgccacatcaagtgtcataaggaccatatggacaaaaaagaggaaataatcgcaccctgtaaggtttactacgacatctctactgccaaaaacctgttgctgttagccaacagtaccgaggaacagcagaagtgggtgagccgcctcgtgaagaagataccgaaaaaacctccagccccggacccatttgctcgctcgagtcctcgcacatctatgaagattcagcagaaccaaagtatccggaggcctagccgacaattagcgcccaacaaaccgtcatag

SEQ ID NO: 203421 - DNA, 2241 bp, synthetic construct
  misc_feature 1..2241: note = Description of Artificial Sequence: Synthetic coding sequence
  source 1..2241: mol_type = other DNA
atgatctacaaggtggagtgcggcctggaggaggacctgaagaacggaaagatcctacttgccaaggtggagctcgaaaaacggcaactccaagagcggttcacagatctggagaaggaaaaatctaacatggagattgacatgacataccagctgaaagtcatccagcaatccttggagcaagaggaagctgaacataaagcaacgaaagcacggctagcagataaaaacaagatttatgagagcatcgaagaagcaaagagcgaggcaatgaaagagatggaaaagaaactcctggaggagcgtaccctgaagcagaaggtagaaaatctgctgctggaggccgagaagagatgctctttgctggattgcgacttaaagcaatcacagcagaaaatcaacgagctccttaagcagaaagacgtgctgaacgaggacgtgcgaaacttgactctgaagattgagcaggaaactcagaagcgatgcctcacacagaatgacctcaagatgcagactcaacaggtgaacacactgaaaatgtccgaaaagcagctgaagcaggagaataatcacctaatggaaatgaagatgaacttggagaaacagaacgcagagctgcgcaaagagcgacaggatgcagatggccagatgaaagaactccaggaccagctagaggcagaacagtacttttccactctttacaaaacccaggtcagggaactcaaggaggaatgcgaggagaagacaaagctgggaaaagaactccagcagaagaaacaagagctccaggatgagcgagattcgctcgccgcccaacttgagattacattgaccaaggctgacagtgaacagctcgcaagatcaatagccgaggagcagtactccgatctggaaaaggagaagattatgaaagaactggagattaaagaaatgatggccagacacaagcaggagctcaccgagaaagacgccacaatagcctcccttgaagaaactaatcggacattgacttcagatgtcgcaaatctggccaacgagaaagaggagttaaacaacaagctcaaggacgtgcaggagcagctgtctagattaaaggacgaggagatcagcgctgcggcaattaaggcacagttcgaaaagcaacttctgaccgagcgaaccctaaaaacgcaggccgtgaacaaattagccgagatcatgaatcgtaaggagcccgttaagagagggaacgacacagacgtgcgacgaaaggaaaaggaaaaccggaagctgcacatggagctgaagtcagagagggaaaagctgacccagcaaatgatcaaatatcagaaggagttaaatgaaatgcaggcccagatcgccgaagagtctcagatcaggatagaactgcagatgactctggattccaaagatagcgatattgagcaactgcggagccagttgcaggcactgcacatcggtttggattctagttctatagggagcggcccgggcgacgctgaggctgatgatggattccctgagtccagactggaggggtggctgtctttacccgtaaggaataatacaaaaaaattcggttgggtgaagaaatatgtgatcgtgagttcaaaaaaaatcctattttacgactccgaacaggacaaagaacagagtaacccgtacatggttctcgacatcgataagctatttcacgtgcgccccgtcactcagacagatgtgtatagagcagacgctaaggaaatacccaggatttttcagatcctgtacgcaaacgagggggagtcaaaaaaggaacaggagttccctgtagagcccgtgggagaaaagagtaactacatctgtcataagggccatgagttcattccgactttgtatcactttcctactaattgtgaggcatgcatgaagccgctgtggcacatgtttaaacctccacctgcgctcgaatgccgccgatgccacatcaaatgccataaagaccatatggacaaaaaagaggagatcatcgccccatgcaaagtctactatgacatctccactgccaagaacctcctgctccttgccaactctaccgaggaacagcaaaagtgggtcagccggctggtgaagaaaattccaaagaaacctccggcccctgacccgttcgctcgttcctcacctcgaacctccatgaagattcagcaaaaccaaagcatccgcaggcctagccgccagctcgccccaaataaaccttcctag

SEQ ID NO: 203422 - DNA, 3438 bp, synthetic construct
  misc_feature 1..3438: note = Description of Artificial Sequence: Synthetic coding sequence
  source 1..3438: mol_type = other DNA
atggtgcactgcgacaccgccgtgggcacccccgactacatcagcccggaagtgctcaaatcccaagggggcgacggcttctatggtagggagtgcgactggtggtctgttggagtctttctgtacgagatgttggtcggagacactccattctatgcggactctcttgttggaacctatagtaagatcatggaccacaagaactccctctgctttcctgaggacgcagagatctctaaacacgctaagaacctcatttgtgccttcctgaccgaccgggaggtgcggctcggccgtaacggcgtcgaggagatccgacaacatccattctttaaaaatgaccagtggcattgggacaacatccgagaaaccgcggcccccgtggtaccggaactgagctctgatattgatagcagtaacttcgacgatattgaggatgataagggtgacgtcgagacgtttcccatacctaaggcatttgtaggcaatcagctccctttcatagggtttacctattatagagaaaacctcctgctctcggattccccaagctgccgagagaccgattccattcagtccaggaagaatgaggaatcccaggaaatccagaagaaactctataccttagaagaacatttgagcaatgaaatgcaggctaaagaggagctggaacagaagtgtaaatcagtcaatacacgtttggaaaagactgctaaggaactcgaagaagaaataacccttaggaaatcggtcgagtccgctctgcgtcagctggaacgcgagaaggctctactgcagcataaaaacgccgaatatcagcgtaaagcagaccatgaggccgacaagaagagaaacctggagaacgacgttaactcccttaaggatcagcttgaggatctcaaaaagagaaaccaaaatagtcagataagcacagagaaggtcaatcagctgcagcgacaactagatgagactaatgctttattgcgtaccgaatccgacactgcagctaggcttaggaaaactcaagctgaatcctcaaagcagatccaacaacttgaatcaaataatcgagacctgcaggataagaattgcttactggagactgccaaactcaaactagagaaggagttcattaatctacagagtgcattggaatcagagcgaagagatcgaacacacggaagcgagataatcaatgatttacaggggcggatctgcggtctggaagaggatctgaaaaacggtaagatactgctcgcgaaggtagagttggaaaaacgccagctgcaagaaagattcaccgacttggaaaaggaaaaaagtaacatggaaattgacatgacttatcaactgaaagtaatccagcagagtcttgaacaggaggaggctgagcataaagctacgaaagcccgattagcggataagaataagatctacgaatccatagaagaggctaaatctgaggcaatgaaggaaatggagaagaagcttctagaggagaggaccttgaagcagaaggttgagaatctgctgctagaagccgagaaaagatgttccctcctggattgtgacttgaagcagtctcagcagaaaatcaatgaactgctgaagcagaaagatgtgctgaatgaggatgttaggaacctaaccctgaagatcgaacaggagacccagaagcgatgtctaacacagaatgacctgaagatgcagacacaacaggtgaatacgctgaagatgagtgagaagcaactgaagcaggaaaacaatcatttaatggagatgaaaatgaatctcgagaaacaaaatgcagaactgcgtaaagagagacaggatgctgacggacagatgaaggaactgcaagaccaacttgaagctgagcagtactttagtaccttatacaaaacacaagttagagaactgaaggaagaatgtgaagaaaaaacaaaattgggaaaagagctgcagcagaagaagcaggaactacaggatgagcgggatagcctggccgcacagctggagatcaccctgacaaaggcggattccgaacagcttgcacgaagtatcgccgaggaacagtattccgatctggaaaaggagaagatcatgaaagaactggaaattaaagagatgatggctagacacaagcaagaactaacggagaaagacgctacaatcgctagtctagaggaaaccaatcgcacactgacatccgatgtagcaaacctggccaatgagaaagaagagttgaacaataagcttaaagatgtgcaggagcagttatcaaggttgaaggatgaagaaatttctgcagctgcaataaaggcacagttcgagaagcagctgctcactgaacgcaccttgaaaacacaggcagttaataagcttgctgaaattatgaaccgtaaggagccggtgaagcgcggtaacgatacagacgtgaggagaaaggaaaaggagaatcgaaaactgcacatggagttgaagagtgagcgggaaaagcttacacagcagatgatcaaataccaaaaggagttaaatgagatgcaggcccagatcgccgaggagagtcagatccgaatcgaactgcagatgactttggacagcaaggactctgacattgagcaactcaggagtcaactccaagcattgcacatagggctggacagctccagtattggcagcggaccgggtgacgcagaagctgacgacggattcccggaatccagactggagggctggctttccctgccggtccgcaataatacaaaaaaatttggctgggtcaagaaatacgtgattgtgagctccaaaaaaattcttttctacgacagcgaacaggataaggagcagtccaatccttatatggtgttggatatagacaaattgtttcatgtaaggccggtcacccagactgacgtttatcgagcggatgccaaggagatcccccgaatatttcagattctgtacgcgaacgagggggaatcaaagaaggagcaggagtttcctgtggaacccgttggagagaagagtaattatatatgccataaagggcatgagttcatccctacactgtatcacttcccaacgaactgtgaggcttgcatgaagcccttatggcatatgtttaaaccgccccctgcactggagtgcaggcggtgtcacatcaaatgtcacaaggaccacatggataaaaaggaagaaatcattgctccatgcaaggtgtattatgacatttctacagctaagaacctgctcttgctcgccaactccacggaggagcagcagaagtgggtatccaggttggtgaagaagatcccgaagaagccaccagcacccgatccattcgcccgatccagtcccagaacatcaatgaaaatccaacagaatcagagcataagaagacccagcaggcaactggctcccaacaaaccatcatag

SEQ ID NO: 203423 - DNA, 2568 bp, synthetic construct
  misc_feature 1..2568: note = Description of Artificial Sequence: Synthetic coding sequence
  source 1..2568: mol_type = other DNA
atgagcgaggcccggcgggacagcaccagcagcctgcagcggaagaaacctccttggctgaagctagacatcccctctgctgtccccctgactgccgaggaaccatcttttctccagcctctgaggcgtcaggctttcctgcgcagtgtatccatgcctgctgagacagcccacatcagttctccccaccacgaactgcggcggcccgtgctgcagcgacagaccagtatcactcagaccatcaggaggggaaccgctgattggtttggcgtgtcaaaagacagcgacagtacccagaaatggcagagaaagtccatcaggcactgttctcaacggtacgggaaactgaaaccacaggtgctgagggagctggacttgccgtcccaggataatgtctcgctcacttcaacggagacacctccccctttgtatgtggggccttgccaactcggcatgcagaagattattgatcctctagcaagaggtcgcgccttcagggtcgccgacgatacagctgaggggctcagtgcgccccatacgccagttacacctggcgccgcaagcctctgttcattttctagctccagatccggtttccatcggctgccaaggcgcagaaagagagagagtgtcgctaagatgtcatttagggctgctgccgcactaatgaaaggcaggtccgtgcgagatgggacctttcggcgggctcagcgtcgatccttcactcccgcatctttcctggaggaggataccacagattttcctgatgagctcgacacctcgttcttcgctcgcgaaggaatactgcatgaagagctcagcacataccctgacgaagtgtttgagtctccttcagaagccgcattgaaagactgggaaaaagcccctgaacaggccgaccttaccggtggtgcactggatagatctgagttagagcgtagccatctgatgcttccacttgagagggggtggcgaaagcaaaaagaaggcgcagctgccccccagccaaaggtgagactaagacaggaagtggtgagtacagcagggcccaggcgtggacaaagaattgccgtaccggtgcgcaagctgttcgcaagggagaagcgaccctacggactaggcatggttgggaggctgaccaataggacttatcgcaagagaatcgactctttcgtgaagaggcaaatcgaggacatggacgaccatagaccttttttcacctactggttgacattcgttcactcgcttgtaacgattctggccgtttgcatctatggaatcgcaccagtgggcttttcgcagcatgaaacagtcgacagcgtgctgagaaaccgaggagtgtacgagaacgtgaagtatgtccaacaggaaaatttctggattggtccgagttctgaggcgctgattcatctcggggccaagttttctccctgtatgcgtcaggatccgcaggtccactcatttatcaggagcgcacgggaaagggagaaacactctgcatgctgtgtcaggaatgacagatctggctgtgtgcaaaccagtgaggaagagtgttcctcgacgttagctgtctgggtgaaatggcctatccaccccagcgccccggaacttgctggccacaaacgtcagttcggctcggtgtgccaccaggacccgcgcgtttgcgatgagccttcctccgaagatccacatgagtggcccgaggacatcacaaagtggcctatttgcacaaagaatagcgccggaaatcataccaaccacccacatatggattgcgtgatcaccggccgaccatgctgcatcggcactaaagggagatgcgagatcacctcccgtgaatattgtgatttcatgcgcggctatttccacgaggaggccaccctctgttctcaggtccattgtatggacgacgtttgtggcctgctgccctttcttaacccagaggttccggaccaattttaccgtctgtggctttcattgttcctgcatgccggaatcttgcattgccttgtcagtatctgtttccaaatgacagtactgagggaccttgagaagctggctgggtggcaccggattgccattatttatctcctgtctggtgtcaccggaaatcttgcgagcgccatttttctgccctacagggctgaagtgggtccggccggatcacagtttggcatcttggcgtgcctgtttgtagagctgtttcaatcctggcagatcctcgctaggccatggagagccttctttaaacttctggctgtggtgctgtttctattcacctttgggctcttgccatggatcgacaactttgcccatatctctggctttatttctggattatttctttctttcgctttcctgccttacatctctttcgggaaatttgacctttaccgaaagcggtgccagatcattatcttccaagtggtgttcctggggcttttagccgggttggtggttctgttttatgtttaccctgtgagatgcgagtggtgcgaattcctgacttgtatcccattcaccgacaaattttgtgagaagtatgaattggatgcacaactgcattag

SEQ ID NO: 203424 - DNA, 573 bp, synthetic construct
  misc_feature 1..573: note = Description of Artificial Sequence: Synthetic coding sequence
  source 1..573: mol_type = other DNA
atgagcgaggcccggcgggacagcaccagcagcctgcagcggaagaagcctccctggctcaagctggatatacctagtgcagttcccctcaccgcagaggagccctcctttctgcagcccctgaggcgccaggcctttctccgatctgtctccatgccagccgaaaccgcccacatctcctcaccacaccacgagctgcgcaggccagtgttacagagacagacatctatcacacagacaatacgctcatctcgtcaggtccgcttcggtagagtgcacaccttgccactcttgggcccacgggccgcgaggagagccttcccccagcggcagagtttgagctggtctctgctgcggggaactgctgattggtttggcgtctcgaaagattcagatagtacacagaagtggcaacgcaagtccattcgtcattgctcccagaggtacggaaaactcaagccccaggtgttacgggaactggatttacccagccaggataacgtgtctcttacaagtaccgagactcctccccctttatacgtcgggccctgccagctcggtatgcaaaaatag

SEQ ID NO: 203425 - DNA, 699 bp, synthetic construct
  misc_feature 1..699: note = Description of Artificial Sequence: Synthetic coding sequence
  source 1..699: mol_type = other DNA
tgacggccctgctgcatcggcaccaagggccggtgcgagatcacctcacgcgaatactgtgacttcatgcgcgggtatttccacgaagaggcaaccctctgttcccaggtgcactgtatggatgatgtctgcgggttgctgccttttctgaaccctgagatgaccgtgttacgcgatctggaaaagctggccggctggcacagaattgccatcatctatcttctgagtggggtgactggtaatttggcttccgcgatattcttgccctaccgtgccgaagtaggccccgctgggtcgcaattcggcatactggcctgcctgtttgtggagctgtttcagtcatggcagatcctggcacggccatggagagcattctttaagctgctggcagtggtgctgtttcttttcacattcggactgttgccgtggatcgacaattttgcccacatatctgggtttatcagcggtctgtttctctcatttgcgttcctgccctatatttcctttggcaaatttgacctctatagaaaacgctgtcagatcatcatctttcaggtagtcttcctgggactgctggctggtctcgtcgttctgttttatgtgtatccagtgaggtgtgagtggtgcgaatttctcacttgtattccctttaccgataaattctgtgaaaagtacgaactggacgctcagctgcattag

SEQ ID NO: 203426 - DNA, 492 bp, synthetic construct
  misc_feature 1..492: note = Description of Artificial Sequence: Synthetic coding sequence
  source 1..492: mol_type = other DNA
atgagcgaggcccggcgggacagcaccagcagcctgcagcggaagaagcctccctggctgaagttggatatccccagtgccgtccccctcacagctgaggaaccttccttcctccagccactcaggcggcaggcattcctgaggtcggtctccatgccagcagaaaccgcccacattagcagcccccaccatgaactgcggagacctgtgctgcagaggcaaacgagtatcacccagaccattcgcaggggaaccgctgactggttcggtgtgtctaaggactctgacagcacacagaaatggcagcgcaagagcattagacattgctcgcaacggtacgggaagctaaagccacaagtgctgagggagctggacctgccatcccaggataacgtctctctgacttctaccgaaactccccctccactgtacgtcggcccatgtcagctcggtatgcagaaaattattgatcccctcgcccgcgggcggtag

SEQ ID NO: 203427 - DNA, 1740 bp, synthetic construct
  misc_feature 1..1740: note = Description of Artificial Sequence: Synthetic coding sequence
  source 1..1740: mol_type = other DNA
atgagcgaggcccggcgggacagcaccagcagcctgcagcggaagaagcccccttggcttaaattagacataccatcagcagttcccctgacggctgaggagccgagctttctccagcctctgcgaagacaggcttttctcagaagcgtatccatgcccgcggaaacagctcacatttcatcaccacaccacgagctaagacgccctgtactgcaaagacagacgagcattacacagacgatccggcggggcaccgcagattggttcggggtgtccaaagactccgatagcacacagaagtggcagcgcaagtccatacgccactgctcgcaacggtatggaaagctgaagccacaggtcctgcgcgagctcgatttgcctagtcaagataacgtaagtctcacctccaccgagaccccgccccccttatatgttggaccctgccagctaggcatgcagaaaatcatagatccactggctcgtggaagggcctttagggtagccgatgacactgcggagggtcttagcgcccctcacacacctgtcacgcccggtgcagcaagcctgtgcagcttttccagctctagatccggcttccaccgcttacctcggcgacgcaagcgcgagagcgtcgcgaagatgagtttcagggctgccgctgctcttatgaaggggagaagcgtccgggacgggacatttaggcgggcacagaggagatctttcacccccgcttcctttctggaagaggacacgacggacttccccgatgagttggacacttctttttttgctagagagggaattctgcatgaagaactgtccacgtaccctgatgaagtcttcgagtcacccagtgaggccgccttgaaggattgggagaaagcacccgaacaggctgatctgaccggcggcgctctggatcggtccgaattagaaaggagtcatcttatgctgcctctcgaacgcggctggagaaaacagaaggaaggcgctgctgcccctcagcccaaagtgagactgaggcaagaggttgtgtccactgctggccctaggcggggtcagcgaattgcagtgcccgttagaaagttgttcgctcgcgaaaaacgaccgtacgggttaggcatggtcggaaggctcactaaccgtacttatcggaaaagaatcgattctttcgtgaaacgtcagattgaagacatggatgatcataggcccttcttcacatattggctgacctttgtccactcgctggtcaccatccttgccgtatgcatttatggcatcgctcccgtcggcttttcgcaacatgagaccgtggactccgtcctgaggaatcgcggcgtctacgagaatgtgaagtacgtgcaacaggagaatttctggatcggtcctagctcagtgaggaccggccttggagctgggccagccggggcaggtccggggggggcacgccgtgggcaggaggcgccagactgcgggcgcagtagccccagtcctgcaggtggcccccaccccccaggtcgtcaggtctttgcccttcacgcaccggggccggctggagctcagctgcactcacttggcgccagggccagagaggcactgcgccttctccgggctcagcgccaggtgggcctcagggctgacctgggcggaggggtattaggggctttccctaggccaggacttcccccgtcttctgcccggtgtagcctttttcgaccccagattgattccgccgaatag

SEQ ID NO: 203428 - DNA, 2571 bp, synthetic construct
  misc_feature 1..2571: note = Description of Artificial Sequence: Synthetic coding sequence
  source 1..2571: mol_type = other DNA
atggccagcgccgacaagaacggcggcagcgtgagcagcgtgagctcttcacgactccagtcaaggaaaccaccaaatctctcaataaccatcccaccacccgagaaggaaactcaggcacctggcgaacaagactccatgttgcccgaaggatttcagaaccggcgcctaaagaaatctcagccccgtacatgggcagcccacacaacagcttgtcctcccagcttcctgccgaaaagaaaaaatcccgcctatctgaaaagcgtgtccctccaagaacctcggagcaggtggcaagagagctccgaaaaacggccaggtttccgccgacaggccagccttagtcagtccatcagaaaaggagcagctcaatggtttggtgtatccggggactgggagggacagcggcaacagtggcagagacgtagcctacaccattgctctatgcgttacgggcgcctcaaggcaagctgtcaacgagacctggaactgcccagtcaggaagcgccatccttccaagggacagaaagccccaagccttgtaagatgccaaagattgtggatcccctggctcggggacgcgcatttcgccaccctgaagagatggatcggcctcacgccccacatccgccactaacaccaggggtgctctccttgacctccttcacgtccgtgagaagcggttacagtcatctgccacgccgcaagaggatgtcggtcgctcatatgtccctgcaggccgcggcggccctgctgaaaggccgaagtgtgctggatgctaccggccagcgctgccgcgtcgtgaaacgcagctttgcctttccgtccttcctggaagaagacgtggttgacggcgctgatactttcgatagctcctttttctccaaagaagaaatgtctagtatgccagacgacgtgtttgagtcacctcctctgagcgcctcctactttcgaggcattccacattccgcttctcctgtctcccctgacggagttcagatcccgctgaaggaatacgggcgcgcccctgtgcctgggcctagaagaggcaaacgtatcgctagcaaggtgaaacattttgctttcgacagaaagaagcgtcattacgggctcggagtcgttggcaactggttgaacaggtcgtaccggagatccatttcctctactgtgcagcggcagctggagtcctttgattctcaccgtccatacttcacttattggctcactttcgttcacgtaatcattacacttctggtaatttgcacatatggtatagctcccgtgggattcgcacagcacgtgacaacccaactcgttctccgaaataagggagtgtacgaatccgtgaaatatattcaacaagagaatttctgggtgggtcccagcagtatagatctcatccatctcggggcaaagtttagtccatgtattcggaaggacggccagatcgagcagctcgtgttaagagagcgcgatctggagcgcgatagtggttgctgtgtacagaatgatcacagcgggtgcattcagactcagcgtaaggattgctcagagaccttggccaccttcgtaaagtggcaggacgacactgggccccccatggacaagtctgacctaggccagaagagaacttcaggcgccgtctgtcaccaggatccgcgtacttgcgaggaacctgccagtagcggggctcacatctggccggacgatatcaccaagtggcctatctgcaccgagcaggccaggtccaaccatacgggcttcctgcacatggactgtgagatcaaaggtcgtccctgctgtatcggaacaaagggctcttgcgagattacaacccgcgagtactgtgaatttatgcacggatattttcatgaagaagctacgctctgctcccaggtgcactgtttggacaaggtatgcgggctgctgccattcctgaatccagaggtgcccgaccaattttaccggctgtggttaagtctgttcctccacgctggtgtcgttcattgcctggtgagcgtcgtcttccaaatgactattctccgcgatctggaaaaacttgccggctggcataggattgccataatttttatcctttccggcatcactggtaacctcgcttctgccatctttctcccttatcgtgctgaggttggcccagcaggctcccagtttgggctgctcgcctgtctcttcgttgagttattccagagctggcccctgctcgaaaggccttggaaggcttttcttaacctgagcgcaatcgtattatttctgtttatctgcgggctactgccatggattgataacatcgcccacattttcggatttctatccgggctcctcttagcttttgccttcctgccttatataaccttcggaaccagcgacaagtaccggaaaagggctctaatccttgtgtccttgctggcgtttgcaggactgtttgcagccctggtgctgtggctctacatctaccctattaactggccatggatcgaacatttgacttgttttccttttacctcacgattctgcgaaaaatacgagctcgaccaggtgctgcattag

SEQ ID NO: 203429 - DNA, 2484 bp, synthetic construct
  misc_feature 1..2484: note = Description of Artificial Sequence: Synthetic coding sequence
  source 1..2484: mol_type = other DNA
atggccagcgccgacaagaacggcggcagcgtgagcagcgtgagcagttcacgcctgcaaagtaggaagccgcccaacctgtccatcaccattcccccccccgaaaaagaaactcaggcccctggagaacaagatagtatgctgcctgagcggaagaatcccgcctacctaaaaagtgtttcactccaggagccacggagcaggtggcaggagtccagcgagaaaagacccggctttcgacgacaggctagcctgtcacagagtatcagaaagggagcagcacagtggtttggagtgagtggtgactgggaaggacagcgccagcagtggcagcggcggtcgctccatcattgttcgatgaggtacgggcgcctgaaagcttcctgccagcgggatctggaactcccctcacaggaggctccctccttccaggggacagagtcgccgaagccctgcaagatgccaaaaattgtggacccacttgctagagggcgcgctttcaggcaccctgaggaaatggatagaccccacgcacctcatccccctctcacccctggcgtgctgtcattaaccagctttactagcgtgaggagcggatatagccatctgccacgacgcaaacgcatgtccgtggcccatatgtccctgcaggctgctgccgctctgctcaaaggacggagtgtcctggacgccaccggtcagcggtgccgagtggttaaacgctccttcgctttccccagctttcttgaggaggatgttgttgatggtgcggatacttttgacagctctttcttttctaaggaggaaatgagctccatgccagacgatgtctttgagagtcccccattgtccgcgagttattttagagggattccccactctgcttcaccggtttcccctgatggagtccagattcccttaaaagaatatgggagagcacctgttccaggccccagaaggggcaaacggatagcttccaaggtaaagcactttgcgtttgatcgcaagaagaggcattatgggctcggcgtagtcggaaactggctgaacagatcctatcgccggtcaatatcttccactgtccagcgacagctcgagagctttgattcacacaggccatatttcacgtactggttgacattcgtccacgtaattatcacgttgctggtgatttgtacatatggaatcgctccagtgggattcgcccagcatgtgaccactcagctggtgctccgcaacaagggagtttacgagagtgtgaaatacatacagcaagagaatttctgggttggtccgagcagcatcgacctgatacacctgggtgctaaatttagcccctgtattcggaaagacggacaaatcgaacagcttgtactgagggagcgggacttagagagggactccggctgctgtgtccagaacgaccacagcggatgcatccagacacaaaggaaggattgcagcgagacactggcaaccttcgttaagtggcaggatgatacaggaccccccatggacaaatcagatctggggcagaaacggacttcaggtgcagtttgtcatcaggatcccagaacctgcgaggagcccgcatcatcgggcgcccacatttggccagacgacatcacaaaatggccaatctgtacagaacaggcgcgatcaaatcacacaggctttctgcacatggattgtgagatcaaaggtcgtccttgctgcatcgggactaaaggctcctgtgagattaccacccgcgagtattgtgagtttatgcacggatacttccatgaggaggcaacactgtgctcccaagtccattgcttggataaagtgtgtgggttgctgcctttcttgaatccagaagtacccgaccaattctatagactgtggctctctttgttccttcacgccggcgtcgtgcattgcctggtctcagtggtctttcagatgacaatcttgagggacttggagaaattggccggctggcacagaattgccataattttcattctgtccgggataacgggtaacctggcctcagcaatatttctgccttaccgggccgaagtgggccccgccgggagtcaatttggtttgctggcctgcctgtttgtggagctttttcaaagctggccactgcttgagagaccatggaaagcttttctgaatctgagtgccattgtgttgttcttatttatctgcggattgctcccttggattgataatatcgcccatatctttgggttcctatccggccttttgcttgcgttcgccttcttgccatacattacattcggcacttccgacaagtataggaaacgtgcccttattttagtgtcactgctggcatttgctggcctcttcgccgcattggtgttgtggctatacatctatcccatcaattggccctggatcgagcacctgacgtgtttccctttcaccagccgcttttgtgagaagtacgagttagatcaggtgctgcactag

SEQ ID NO: 203430 - DNA, 2151 bp, synthetic construct
  misc_feature 1..2151: note = Description of Artificial Sequence: Synthetic coding sequence
  source 1..2151: mol_type = other DNA
cccggcagcagccggagccggcaccccctgctgctgctgatctggtccctggggtccagccagggccctcaccgccagattcgaccgccgcctccctgtaggcacgctggtacacatgtgccctctcccctgccccatacacaggtccatagaaggaggcaggcctatgcccatttatcattggtctgcttccgccgaggtgctgcccagtggtttggggtgtcaggagattgggagggccagcgtcagcagtggcagaggaggtctctccatcattgcagcatgaggtatgggcgcctaaaagcttcttgtcagcgggacctggaactgccatctcaggaggcaccatcctttcagggtactgaaagccccaagccatgcaagatgcctaagattgtcgatcccctggcccgcggcagggcctttagacatcccgaagaaatggatcggccgcatgctccacatccccctctgacccccggcgtgctctccctcacttcgtttactagtgttagatctggctatagccacctaccacggcgtaagcgcatgtccgttgcgcacatgagtctccaggctgccgctgctctgttgaaggggaggagcgtattagatgcaaccggccagcgctgcagggtagtaaagaggtcctttgcctttccatccttcctcgaagaggatgttgtagatggcgccgatacctttgattctagcttctttagtaaggaggagatgtcctcaatgccagacgacgtgtttgaatctccacccctgtcggcttcgtactttcgaggcattccgcattccgcttcccccgtttcacccgacggagtacagattcctctgaaggagtacggacgggctcccgtcccaggtcctaggaggggaaagcggattgccagcaaggtcaaacatttcgccttcgaccgaaagaagcgtcattacggtctgggcgtggtgggtaactggctaaatcgaagttacaggcggagcattagttcaaccgtccaacggcagcttgaatcatttgattcacataggccttatttcacctactggctgacatttgtccacgtgatcattaccctcctggtaatctgcacgtacgggatcgcgcctgtggggttcgcccagcacgtaaccactcagcttgtactacggaataagggcgtgtacgaatccgtgaaatacatccagcaggagaacttttgggtgggtccttccagtattgatctcatccacttgggggctaaattctcaccgtgcattagaaaagatggccaaatagaacaactggttctgagagaacgtgatttagagcgagactctggatgctgcgtccaaaatgatcacagcgggtgtatacagacccaaagaaaggactgcagtgaaacccttgcgaccttcgttaaatggcaggacgatacggggccgcccatggataagtcagacttaggacaaaaaagaacatccggtgccgtatgtcaccaagaccctcgcacttgcgaagagccagcctcatctggcgctcacatatggcccgacgatatcacgaagtggcctatttgcaccgagcaggctcgctccaatcacaccggctttctccatatggattgcgagatcaaagggcgcccttgttgtattggaacaaaggggtcctgcgagatcactacacgagaatactgcgagtttatgcacggctattttcacgaggaggcaacgctgtgctctcaagtgcactgcttagacaaggtttgcggcctcctaccctttctgaatcccgaagttcccgatcagttttatcgcctctggttgagtctcttccttcacgcgggagtggttcattgccttgtgagtgtcgtgtttcagatgacaatccttcgcgacctggagaagctcgccggctggcatcgtatagccataattttcatcttgtctgggataactggcaacttggcctctgccatttttctaccttaccgagctgaggtgagaatgtggaggatgggtccgctgcctcacattggtggacagccctgctgctcttatagcactcacttggggagcgcacggggcactcgctgtccctcatgtaccgggcttcacagtgggggaaccgccaacctcggagcctactggctcgtaagctag

SEQ ID NO: 203431 - DNA, 639 bp, synthetic construct
  misc_feature 1..639: note = Description of Artificial Sequence: Synthetic coding sequence
  source 1..639: mol_type = other DNA
atggcccagaccgacaagcccacctgcatcccccccgagctgcccaaaatgttgaaagaattcgctaaggccgcaattagagtccaaccccaggatctcatacagtgggccgccgattacttcgaggcactgtcaagaggcgagacgcctcccgtgagagagcgctcagagcgagtagccctgtgtaatagagctgaactgacaccagaacttcttaagattctgcactcacaagttgcaggtcgcctgatcatcagggccgaggagctcgcacagatgtggaaagtcgttaatctgcccacagatctgttcaattccgtcatgaacgtcggaagattcacggaagaaatcgagtggctaaagtttcttgcattagcatgttccgcgctcggcgttacaataacgaaaacgcttaagatcgtttgcgaggtcctgagctgcgatcacaacggcggttccccaagaataccgttttccacctttcagtttctgtatacctacatcgctaaggtcgacggggagatctctgcctcacacgtcagtagaatgctaaactacatggaacaggaagtgattggaccggacggcattatcacagtcaacgacttcacgcagaatcctcgcgtgcagttggaatag

SEQ ID NO: 203432 - DNA, 639 bp, synthetic construct
  misc_feature 1..639: note = Description of Artificial Sequence: Synthetic coding sequence
  source 1..639: mol_type = other DNA
atggcccagaccgacaagcccacctgcatcccccccgagctgcccaagatgcttaaggagtttgctaaagctgccatccgcgtccagccacaggatctgatacagtgggctgccgactattttgaagccttatccagaggagagacccccccggtgcgtgagaggtctgaaagggtagctttatgcaaccgtgctgaactgactcctgaactacttaaaatccttcactcccaggtggccgggaggctgattattcgcgccgaagaactagcacagatgtggaaggtggtcaatctccccactgatctcttcaacagcgtcatgaatgtcggtcggttcacagaagaaattgaatggctgaagttcctggctctggcatgttctgccttgggagtcaccatcaccaaaacactgaaaatcgtttgcgaggtgcttagctgtgatcataacggggggagtccccgcatccctttcagtacattccaattcctttatacttacattgcaaaggtggatggggaaatcagcgccagtcacgtgtcacgcatgctgaattacatggagcaggaggttatcggaccagacgggattatcacggtcaacgattttacccaaaacccccgagtgcagcttgagtag

SEQ ID NO: 203433 - DNA, 351 bp, synthetic construct
  misc_feature 1..351: note = Description of Artificial Sequence: Synthetic coding sequence
  source 1..351: mol_type = other DNA
atggcccagaccgacaagcccacctgcatcccccccgagctgcccaaaatgctgaaggagtttgccaaggccgctatccgagtgcagccacaggacctcattcagtgggccgcggactattttgaagctctttctcgaggagaaaccccccctgtgcgtgaaaggagcgagagggtggcattatgcaacagagccgagcttacaccggagttattgaaaattctgcacagtcaagtggcgggacgcctaattattagagccgaggagctggcgcagatgtggaaggtggttaatctgccaacagacctgttcaactcagtgatgaacgtcgggcgcttcaccgaggaatag

SEQ ID NO: 203434 - DNA, 393 bp, synthetic construct
  misc_feature 1..393: note = Description of Artificial Sequence: Synthetic coding sequence
  source 1..393: mol_type = other DNA
atggcccagaccgacaagcccacctgcatcccccccgagctgcccaagatgttaaaagagtttgccaaggccgccataagggtgcagccacaggacctgattcaatgggcagcggactacttcgaagcgctcagcaggggcgaaacacctcccgtgcgcgagcgttccgagagagtggccctgtgcaatcgagcagaactcacgccagagcttctcaagattctccactcccaagtcgccgggagattgatcataagagccgaagaactggcccaaatgtggaaggtggttaacctgccaaccgacctgtttaactccgtcatgaacgtggggcggttcaccgaggagatcgagtggctcaagttcctagcactggcatgtagcgccctctag

SEQ ID NO: 203435 - DNA, 312 bp, synthetic construct
  misc_feature 1..312: note = Description of Artificial Sequence: Synthetic coding sequence
  source 1..312: mol_type = other DNA
atggcccagaccgacaagcccacctgcatcccccccgagctgcccaagatgttgaaagagtttgcgaaagcagctatcagggtacagccccaagaccttatccagtgggcagcagattactttgaggctctgagcaggggcgagacgcccccagtgcgggaacgctctgagcgtgtagcactttgtaacagagccgagctgacacccgagctcttgaaaatcctccactcccaagtcgcaggaagactgatcatccgggccgaagaactagcacagatgtggaaggtggttaatctaccaactgacctgtag

SEQ ID NO: 203436 - DNA, 234 bp, synthetic construct
  misc_feature 1..234: note = Description of Artificial Sequence: Synthetic coding sequence
  source 1..234: mol_type = other DNA
atggcccagaccgacaagcccacctgcatcccccccgagctgcccaaaatgctgaaggaattcgccaaggctgccattcgggtccaacctcaggacctcatacaatgggctgcggattacttcgaagccctgtcccgaggggagaccccacccgtccgggaacggtctgagcgggtggccctgtgcaaccgcgcagagctaacaccggagttgctgaagattctccacagctag

SEQ ID NO: 203437 - DNA, 693 bp, synthetic construct
  misc_feature 1..693: note = Description of Artificial Sequence: Synthetic coding sequence
  source 1..693: mol_type = other DNA
atgcccctgcccgacaccatgttctgcgcccagcagatccacatccctcccgagttacccgacattctgaaacagttcacaaaggcggccatcaggacacagccagcagacgtcttaagatggagtgctggctactttagcgccctgagccggggggatcccctgccggttaaagatcgcatggagatgcccaccgccactcagaagaccgacacggggttaacccagggcttgcttaaggtgctccacaagcaatgtcatcataagcgctacgtggaactgacagacctggagcaaaagtggaaaaatctttgtctacctaaggagaaatttaaagcactgctccaactggacccttgcgagaataaaattaaatggatcaactttttggcgctcggctgcagcatgctgggcggctcactcaatacggcgctgaaacacttgtgcgaaatccttacagacgacccagagggcggacctgcccgcataccattcaagacattctcatatgtgtaccggtacctagcaagactggatagcgacgtgtcacctctggaaactgagagctatctcgcaagtctgaaggagaacatcgacgcccgcaaaaacggtatgattggactgtccgacttttttttcccaaaacgaaagctcctagagtcaattgagaattctgaggacgtgggtcactag

SEQ ID NO: 203438 - DNA, 693 bp, synthetic construct
  misc_feature 1..693: note = Description of Artificial Sequence: Synthetic coding sequence
  source 1..693: mol_type = other DNA
atgcccctgcccgacaccatgttctgcgcccagcagatccacatcccacccgagttgcctgatatcctgaagcagtttactaaggccgctattagaacgcaaccagcagatgttctgcggtggagtgcagggtatttttctgctctctcgcggggtgacccccttcccgttaaagacagaatggaaatgcccacagccacccaaaagaccgataccggcctcacacaggggcttctgaaggtgttgcataaacagtgtcatcataaacgttacgtggaattaaccgatcttgaacagaagtggaaaaacttgtgcctccccaaggaaaagtttaaggctctactgcagctggatccatgtgagaataaaatcaagtggattaacttcctggccctgggctgttccatgcttggaggcagtctgaacacggctctgaaacatttatgtgagattctaacagacgaccctgaggggggacccgcacgcatcccatttaaaactttcagctatgtctacagatacctggcccgtctcgatagcgatgtgagcccgcttgagactgagtcgtacctggcctctctgaaggagaacatcgatgctcggaagaacggcatgatcgggctgagcgattttttctttcctaagagaaagcttcttgaaagcatagagaactcagaggacgtgggccactag

SEQ ID NO: 203439 - DNA, 2091 bp, synthetic construct
  misc_feature 1..2091: note = Description of Artificial Sequence: Synthetic coding sequence
  source 1..2091: mol_type = other DNA
atggacgccgacatggactacgagcggcccaacgtggagaccatcaaatgcgtggtggtgggggacaatgccgtcggcaagaccagactgatttgtgcccgggcatgtaataccaccttgacccaatatcagttattggcgacacacgtgcctactgtgtgggccattgaccagtatcgtgtgtgccaggaggtgctggaaagatcgcgagatgttgtggatgaagttagcgtgagtctccggctttgggacacctttggggaccatcataaagacagaaggttcgcgtatggcagaagtgacgttgtggtgttgtgtttctccatcgcaaaccccaatagccttaatcatgtcaagagtatgtggtaccctgagatcaaacatttctgcccacgaacacccgtcatcctggtaggttgccagctggacctgaggtacgcggatttggaggctgttaaccgcgctcgcaggcctttagctcgacctatcaagaggggggacattttgcccccggagaaaggtcgagaggtggccaaggaacttggccttccatactacgaaacttcggttttcgaccaattcggcatcaaggacgtctttgacaacgctatccgagctgctctgatatcccggcgccacctgcagttttggaagagtcacctcaaaaaggttcagaagcctctgctacaagctcccttcctgccccccaaggcccccccgcctgtcattaaaatcccagagtgcccctccatgggaaccaacgaggccgcctgtctgctggacaacccactgtgcgcggacgttctattcattctgcaggaccaggaacatattttcgcgcaccggatatatctcgctacctcctcttcaaaattctacgatttgtttttgatggaatgcgaggaaagcccaaatgggtccgaaggtgcatgcgagaaggaaaagcagtccagggacttccagggacgaatattatctgtcgacccagaggaagagagggaggaggggccacctcggatccctcaggccgaccagtggaaaagctcaaacaaatctctggtagaggcccttgggcttgaagctgagggtgctgtcccggagacacagaccctgaccgggtggtctaaaggatttataggaatgcaccgcgaaatgcaggtcaatccaatcagcaagcggatggggccaatgactgtcgtgaggatggacgcctccgtgcaaccagggccttttcggacactactgcagtttttatacactgggcagcttgacgaaaaagagaaagacctggtaggactggcccagattgcagaggtgctggaaatgtttgatctgaggatgatggtcgaaaatattatgaataaggaagcgttcatgaatcaggagatcactaaagcgttccacgtgagaaaggccaatcggatcaaagagtgcctgtctaaaggcacattcagcgacgtaacctttaaacttgatgacggggctatttcagctcataagccactgctgatttgcagttgtgagtggatggcggcaatgtttggggggagttttgtagaatcggctaacagtgaggtgtatttgccgaacatcaacaagatctcaatgcaggctgtgcttgactacttgtatacgaagcagctcagcccaaatctggatttagaccctctggagttgatagcactcgcaaatagattctgcctgccacatctggtcgccctggctgaacaacacgccgtccaggaactgacgaaggctgccactagtggggttgggatagatggcgaagtactctcctacctagaattagcgcagtttcacaatgctcatcagctggccgcatggtgcctgcatcatatttgtaccaattacaactcagtgtgcagcaaatttaggaaggaaatcaaatccaagagtgccgacaaccaagaatacttcgaaaggcatagatggccccccgtatggtacctgaaggaggaggaccattatcaaagagtcaagcgagagagggagaaggaagatatcgcattgaacaagcatcgcagtcggcgtaagtggtgcttctggaattcttcaccagctgtggcatag

SEQ ID NO: 203440 - DNA, 2091 bp, synthetic construct
  misc_feature 1..2091: note = Description of Artificial Sequence: Synthetic coding sequence
  source 1..2091: mol_type = other DNA
atggacgccgacatggactacgagcggcccaacgtggagaccatcaaatgcgtggttgtcggcgacaacgccgtcggaaagactcggctgatttgcgcccgtgcttgcaacactacccttactcagtaccagttgttggcaacccatgtgcccaccgtttgggccattgaccagtatcgggtgtgccaggaggtgctggaacgctcaagggatgtcgtagacgaggtaagcgttagcttgcgactttgggacacatttggcgatcaccacaaggataggcggtttgcgtacggccggtccgacgtcgtggtactttgcttttcgattgccaatcctaacagtctgaaccacgtcaaatctatgtggtaccctgagatcaagcacttctgtcctcgcaccccagtcattctggtcggctgtcagctggatctgcgatatgctgatttagaagccgtaaaccgcgcacggcgacccctggctcgaccaatcaaaagaggggacatcctgccacccgaaaagggacgagaggtcgccaaggaactgggcctgccttattacgagacttctgtctttgatcaattcggcatcaaggatgtgtttgacaacgccataagggccgccttgatctctcgacgacatttgcagttctggaaaagccatttgaagaaggtccagaagcctcttttacaggccccttttctgcctcccaaagccccacctcccgttataaaaatccctgagtgccctagcatgggtaccaatgaagccgcttgcctcctagacaatccattgtgcgcagacgttctattcatcctccaggaccaggaacacatctttgcgcaccggatatatttggccacctccagctcaaagttttatgatttattcttgatggagtgtgaggagagcccgaatgggtccgagggtgcttgcgagaaggaaaaacagagcagggattttcagggccgaatcctgtcagtggatcccgaagaggaaagagaggaaggaccacctaggataccccaggccgaccaatggaagtcttctaataagtcactcgtggaagctttgggacttgaggcggagggagccgtgcctgagacccagacactgaccgggtggagtaaggggttcataggaatgcacagggagatgcaggtcaatcccatatcaaagaggatgggtccgatgactgtggtaagaatggatgcaagcgtacaacccggtccctttaggactctgctgcagttcctctacaccggacaactcgacgagaaggagaaagatctggtcggtcttgctcaaatcgcagaggtccttgaaatgttcgatctccgtatgatggtcgaaaacatcatgaacaaggaggccttcatgaaccaggagattacaaaggctttccatgtgcggaaggcgaacagaatcaaggaatgcctctccaaaggaactttctctgatgtgacttttaaattagacgatggagctatctctgcgcacaagccactgctcatctgctcatgtgagtggatggccgccatgtttggcggctcctttgtcgagtctgcaaattccgaagtctacctgccaaatatcaacaagatcagcatgcaggcagtcttagactacctttacactaagcagctctcacctaatctcgatctagatcctttggagttgattgcccttgccaaccgtttttgcctacctcacctagtcgccctggccgagcagcatgccgttcaggaactgacaaaggctgcaaccagcggagtgggaattgacggcgaggtcttatcataccttgagctggcgcagttccacaacgcccaccagttagcggcctggtgcctgcaccatatctgtacaaactataactcagtctgttcaaagtttcgcaaagagatcaaaagcaaatccgccgataatcaggagtacttcgaacgtcaccgttggccgccagtgtggtatctgaaggaggaggaccactatcagcgggtgaagagagagcgggaaaaggaagatattgctttgaacaagcaccgcagtcgaaggaaatggtgtttttggaactcctcccctgccgtcgcatag

SEQ ID NO: 203441 - DNA, 300 bp, synthetic construct
  misc_feature 1..300: note = Description of Artificial Sequence: Synthetic coding sequence
  source 1..300: mol_type = other DNA
atggacgccgacatggactacgagcggcccaacgtggagaccatcaagtgcgttgtggtcggcgataacgcagtaggaaagactcgccttatatgtgcgcgggcttgcaatacaacgctgactcagtaccagctgctggctacccatgtgcctacagtgtgggccatagaccaataccgggtttgtcaggaagtccttgagcgctctcgggacgtggtagacgaggtcagtgtcagcctgcggctttgggacacctttggggaccatcacaaggaccgcagatttgcttatgggcgatag

SEQ ID NO: 203442 - DNA, 2184 bp, synthetic construct
  misc_feature 1..2184: note = Description of Artificial Sequence: Synthetic coding sequence
  source 1..2184: mol_type = other DNA
atggacagcgacatggactacgagcggcccaacgtggagaccatcaagtgcgtcgttgttggagataacgccgtgggtaaaacccggctaatctgcgcccgcgcatgcaatgccacgcttactcagtaccaactgcttgcaacacacgttccaacagtgtgggccatcgaccagtatcgagtctgtcaggaagtattagagcggagccgggacgttgtcgatgacgtatcagtgtccctccgcctttgggacacttttggtgaccatcataaggacaggcgctttgcgtatggacgctccgacgtcgtggttctttgcttcagtatcgccaaccctaactctctccaccacgttaagaccatgtggtacccagaaatcaagcatttttgtccccgagctcccgtgatactggtgggatgccaattggatttgcggtacgcagatcttgaagccgtaaatagagcaaggcgtcctctagcaaggccaatcaagcccaatgaaatcttgccacccgaaaaaggtcgggaggtggccaaggagctggggatcccatactatgagacatcagtcgtggctcagttcggaattaaagacgtgtttgataacgccattcgggccgcgctaatctcccgccggcaccttcagttctggaagtcccatttacggaatgttcaacgccccctccttcaagcgccttttctgcctcctaaaccgccccctcctattatcgtagtgcctgaccctccaagtagtagcgaagagtgcccagcacatctgttggaggatccactgtgtgctgacgtcatcctggtcctgcaggagcgtgttcggatcttcgcccacaagatctacctgtccacctcctctagcaagttttacgatctgtttctcatggacctcagcgagggcgaactgggtggcccatctgagcctggcggcacacatccagaagatcaccaggggcactctgaccagcatcaccaccatcaccaccaccatcacggaagggatttcttgctccgcgcggctagttttgatgtgtgtgaatccgtcgatgaggctggaggcagcgggcctgccggtctgcgagcttctacgtccgacggtatcctcaggggcaatggcaccggatatctgcccggacgaggtcgggtcctgagtagctggtcgcgggcgtttgtatccatccaggaggaaatggccgaagatccattaacgtacaagagccgcctgatggtggttgtcaagatggacagctcaatccagccaggaccgtttagagctgtgttaaagtacctctacacaggtgagctcgatgagaatgagcgggatcttatgcacattgcacacatcgctgaattactggaggtgtttgacctgaggatgatggtggctaacattttgaataacgaggctttcatgaatcaggagattacaaaggccttccacgttcggcggacaaaccgggtgaaggagtgtctggctaagggcacatttagcgatgtcacatttattcttgacgatggcacaatcagcgcccataagcctctgttgatttcgagctgtgactggatggcagccatgttcggcggccctttcgtcgagtcttcaactcgtgaggtcgtgttcccgtatacatcaaaatcctgcatgcgtgcagtgttagagtacctctataccggcatgttcacatccagtccggacttggacgatatgaagctcattatcctcgctaatcgattgtgtctaccccatttggtcgccctaacggagcagtacactgtgacagggttgatggaggctactcagatgatggtggacattgatggcgatgtactggtcttcctcgaactggcacagtttcactgtgcctaccagctcgccgattggtgccttcaccacatctgcacaaactacaataacgtatgcaggaaatttccgagggatatgaaggccatgtcccctgaaaatcaggaatatttcgaaaagcatcgttggcctcctgtctggtacctgaaggaggaagaccattaccagagggctaggaaggaacgtgaaaaagaggattacctgcatttaaagagacagcccaagcgcaggtggctgttctggaacagtccttcgtcccccagcagctcggccgccagttcctccagtccatcaagtagctccgctgttgtttag

SEQ ID NO: 203443 - DNA, 2250 bp, synthetic construct
  misc_feature 1..2250: note = Description of Artificial Sequence: Synthetic coding sequence
  source 1..2250: mol_type = other DNA
atgcaggcctggcggaagggccccgacggcccccagaagaccagctctgattcaatgtcccggcttatggattctgacatggattatgagaggcctaacgtggaaactattaagtgcgtcgtggttggcgataatgcagtgggcaaaactcggctcatctgcgccagagcttgcaatgcaacgttgacacagtaccagcttctggcaactcacgtgccaactgtatgggctatcgaccagtaccgggtctgtcaggaggtgctggaaagaagcagagacgtcgtggacgatgtcagtgtgagcttaaggctgtgggacacgtttggtgaccatcataaggatagacgcttcgcatatggtcgcagtgatgtggtggtgctgtgtttctccattgccaatcccaactcgctgcaccatgttaagaccatgtggtacccggaaatcaagcacttctgccctcgcgctccagtcatccttgtgggctgtcagctcgatctgagatacgcagatttagaggccgtgaacagagcccggcgaccgctggcacgacccattaagcctaacgaaattctgccgcccgagaaagggagggaggtggcgaaggagctgggaattccttattatgagacgtctgtggtggcccagttcggtataaaagacgttttcgacaacgccattcgcgccgctcttatttcgcgtagacatttacaattctggaaatcccatcttcgcaatgtccagcgcccgcttttgcaagcaccttttctccccccaaagccaccgccccccatcatagttgtgcccgatcccccttcgagcagtgaagaatgcccagctcatctgctggaggacccactgtgcgccgacgtgatcttagtgctgcaggaacgggtcaggatcttcgctcacaaaatctatctaagcacctcctccagcaagttctatgacttgttcctgatggacctgtcagaaggtgaattgggcggcccctcagaaccaggggggacccatccagaagaccatcagggccattccgatcaacaccaccaccatcatcatcaccatcacggccgtgactttctcctgcgcgcagcatcctttgacgtgtgcgagtcggtggacgaggccgggggcagcggacctgccggactccgcgctagcacatcggatggcatcctaagaggaaacggcacaggctatctccctggaaggggccgagtcctgagctcttggtcccgggctttcgtttccatccaagaagaaatggccgaagacccactgacatacaagtctcgtctaatggtcgtggtcaaaatggattcgagcattcagcctggcccattccgagcagttctgaaatatttgtacaccggagagttggacgagaatgaacgggacttaatgcatatcgcacacatcgccgaactgctggaggtgttcgacctgcgtatgatggtggctaatattctgaacaacgaagcattcatgaatcaggagatcaccaaagcatttcacgtccgcaggacaaaccgcgtaaaagagtgccttgccaaaggaacgtttagcgacgtgacatttatcttggatgacggtactatttctgctcacaagcctttattaatatcctcatgcgattggatggccgcaatgttcggtgggcctttcgtcgaatcgtccacaagagaagtggtgttcccctacacgtctaagtcctgtatgagagcagtgttagagtacctctacaccggaatgttcaccagctctcctgacctcgacgacatgaagctcattatactagccaaccgcctctgtctaccacatctcgtcgctctgaccgagcagtatacagtaactggactgatggaagctactcagatgatggtcgacattgacggggacgtgttagtgttcctggagctggctcagtttcactgcgcgtaccagctggctgactggtgccttcaccatatttgcactaattataacaatgtatgccggaagtttccccgtgatatgaaagcgatgtctcccgagaatcaggaatactttgagaagcatagatggccgccggtctggtacctgaaggaagaggatcactaccagcgtgcaaggaaagagcgggaaaaggaggattacctgcatttgaagcgccaacctaagagaagatggctgttctggaattccccaagtagccccagttcttccgccgcaagctcttctagtccatcaagctcttcggcagttgtgtag

SEQ ID NO: 203444 - DNA, 2205 bp, synthetic construct
  misc_feature 1..2205: note = Description of Artificial Sequence: Synthetic coding sequence
  source 1..2205: mol_type = other DNA
atgaaggcccggagccggctgatggacagcgacatggactacgagcgtcctaatgttgagaccatcaaatgcgtggtcgttggagataacgctgtggggaaaacccggctgatttgcgctagggcttgcaatgcaacactcacccagtaccagctcctggcaacccacgtgcccactgtgtgggccatcgatcagtaccgggtctgccaggaggtgctggaacgctctagagacgtagttgatgatgttagcgtgtccctgcggctgtgggacacttttggtgaccatcacaaagatcgtcgcttcgcatatggacgatccgacgttgtagtactatgttttagtatcgccaacccaaactctctgcaccacgtaaagacaatgtggtacccagaaatcaaacacttttgcccaagagctcccgtcatcttggtcgggtgtcagctcgatttgcgctacgcagacttggaggccgtgaaccgcgcacgcaggccactggccagaccgattaaacccaatgagattctgccacctgagaaggggcgagaggttgccaaggaattggggatcccttattacgaaacaagcgtcgtggctcagttcgggattaaggatgtattcgacaacgctatccgggccgccctgatttcccgtcggcatctgcagttctggaagtctcatcttcggaatgtgcagcggcccctccttcaagcaccttttctgccccccaagcctccccctcccatcatcgtcgttccggaccctccgtccagttctgaggagtgcccagcacatttattagaagaccccctctgcgcggacgtgatactggtcctgcaggaaagagtacgcatctttgctcataagatttatttatccacctcctcttctaagttttatgatctctttctcatggatctgtctgagggggagctgggggggccctctgaacccggcgggacacaccctgaggaccaccagggccactccgatcagcaccatcatcaccaccatcaccaccacgggagggactttttgctgcgagcggcttccttcgacgtttgtgagagcgtggacgaagcagggggatccggcccagctggtctaagagccagcacctctgatgggatcctgcgcggtaatggcacggggtatctgcccggccgcgggcgggttctcagctcatggtcgcgtgccttcgtgagcatacaggaagaaatggcggaagacccactgacttacaagtctcgcttaatggtggtagtcaagatggacagcagcattcagcccggcccctttagggccgtactcaagtacctgtacaccggtgaactcgatgaaaatgaaagagacctgatgcatatcgcacacatcgccgaactacttgaagtgtttgacctgcggatgatggtagccaacatactgaacaatgaggcatttatgaatcaggagatcaccaaggccttccatgttcggaggaccaacagagttaaggaatgtttggccaagggtacatttagtgatgttacattcatacttgatgacgggactatctcagcacacaaaccgcttttgatctctagttgcgactggatggctgccatgttcggggggcccttcgtcgaatcctccactcgggaggtagtttttccatacacctccaagagttgtatgcgcgccgttttagagtacctgtataccggcatgttcacatcctcaccagacctggatgacatgaagctgatcattctcgccaatcggttgtgtttgcctcatctggtggccttgacagaacagtataccgttacaggactaatggaagccacccaaatgatggtcgatattgatggagacgtccttgttttcctagagctggcccagttccactgcgcctaccaactagctgattggtgtctgcatcacatatgtactaactataataatgtgtgccggaaattccccagagacatgaaagccatgtcccccgagaatcaggaatactttgagaagcacagatggccccccgtctggtatcttaaggaagaggaccattaccagagagccaggaaggagagagagaaggaagactatctgcatctcaaaagacagcccaagagaagatggctgttttggaactctccctcttcgcccagcagcagcgccgcctctagcagctcgccttcaagttcgtcagcagttgtgtag

SEQ ID NO: 203445 - DNA, 1836 bp, synthetic construct
  misc_feature 1..1836: note = Description of Artificial Sequence: Synthetic coding sequence
  source 1..1836: mol_type = other DNA
atgagcatccacatcgtggccctgggcaacgagggcgacaccttccaccaggataacaggccgtccggactgattcgaacttatttgggcagatcccccctggttagtggcgacgagtctagcctgcttctgaatgccgcgagtactgttgcacgcccagtattcaccgaataccaagcttctgctttcgggaacgtgaaactcgtggtacatgattgtcccgtgtgggacatcttcgactccgattggtatacttcccgaaatctaatcggaggagccgatatcatcgttattaagtataacgtaaacgacaagttctcttttcacgaagtcaaggataattacataccagttatcaaaagggctctcaatagcgtgccagtaattatcgctgccgtggggacacggcagaacgaggagcttccttgtacttgccctctgtgtacgtcagaccggggaagttgcgtctctacaacagagggtatccagcttgcaaaggagctgggtgcgacatacctggaactgcactccctggatgacttctatatagggaaatatttcggtggtgttctggagtattttatgattcaagctcttaaccagaagacttccgagaaaatgaagaaacgtaaaatgagtaattcattccatggaatccggcccccacaattagaacaacccgaaaagatgccagtcctgaaagctgaggccagccactacaactccgacctgaacaacttgctcttctgctgccagtgcgtggatgtggttttttacaaccccaacttaaaaaaagtggtggaggctcacaagattgttttgtgtgcagtttctcatgtgttcatgctgctgttcaacgtgaaatcccccacggacatccaggattccagcattatcagaaccacgcaggacctatttgccataaatcgggacactgcttttccaggggcgtcccatgagagcagcggcaacccacctcttcgagtcatagtgaaagatgctctgttctgtagctgtctttcagatatccttcggtttatttattcaggggcattccaatgggaagagttagaagaagacattcgcaagaaactcaaggactctggcgacgtcagcaacgtcatcgaaaaggtgaagtgcatcctgaaaactcccggaaagattaactgtctgagaaactgcaagacataccaagcccgcaagcccctgtggttctataacacatccctcaagtttttccttaataagccaatgcttgccgatgttgtgtttgagatacaggggactaccgtgccggcccaccgtgccattcttgtggctcggtgtgaagtcatggccgcgatgtttaacggaaactatatggaagcaaagagtgttcttattcctgtgtacggcgtgagcaaagaaacttttctgtctttcttggaatatctgtacacagattcctgttgcccagctggcatattccaggcgatgtgcctgctcatctgcgcggagatgtatcaggtttcccgactgcagcatatttgtgaacttttcataattacccagttacaatcaatgccgtctagggagctggcttcaatgaatttagacatagtggatctgttgaagaaagcgaagtttcaccactcagattgcctgtccacatggctgctgcacttcatagccactaattacctaatcttttcgcagaagcctgagttccaggacttgtctgtggaggagaggagttttgtggagaagcacaggtggccgtcaaatatgtatctgaagcaacttgccgaataccgcaaatacattcattcgcggaagtgccggtgtcttgttatgtag

SEQ ID NO: 203446 - DNA, 354 bp, synthetic construct
  misc_feature 1..354: note = Description of Artificial Sequence: Synthetic coding sequence
  source 1..354: mol_type = other DNA
tgagagatgtaccaggtgagccggctgcagcacatctgcgagctgttcatcattactcagttacagtcaatgccctcacgggaacttgccagcatgaatttggacatcgttgaccttcttaagaaggctaagttccatcattcagactgcctgagcacctggctgctgcatttcatcgcaaccaactatctgattttcagccagaagcccgagttccaggacctgtccgtcgaagagcgctctttcgtcgaaaaacatagatggcccagcaacatgtacctcaagcagctcgccgagtacaggaagtacatccattctcggaaatgccgctgtttggtaatcaagcgccattag

SEQ ID NO: 203447 - DNA, 1692 bp, synthetic construct
  misc_feature 1..1692: note = Description of Artificial Sequence: Synthetic coding sequence
  source 1..1692: mol_type = other DNA
atgttcagccggaaccaccggagccgggtgaccgtggcccggggctccgctctggaaatggagtttaaacggggtagattccggctgagcttgttttccgacctgcccgaagatacggaactgcaacgaaagctggatcatgaaattagaatgagggaaggagcctgtaagctgctggcagcgtgcagccagagagaacaggctttagaggctacaaagtctttactggtctgtaattcccgcatcctctcttacatgggcgaactccagcggagaaaggaggcacaggttctggggaaaacttctcggcgtcccagtgatagtggtcctcctgccgaacgcagtccgtgcagggggagagtatgtataagtgacctccgcattccactgatgtggaaagatactgagtattttaagaacaagggtgacctacaccggtgggctgttttcctcttattacagctcggagaacacatacaggacactgaaatgattttggtggataggactttaaccgatatttctttccagagtaatgttctgttcgcagaagcagggccggattttgaattgcggctggagctctacggggcttgcgtggaggaagagggggcactgaccgggggacccaaacggctcgcaactaaactgtcctcctcgctgggaagatcaagcggcagaagggtccgcgcttcacttgacagcgcaggcgggtccggttcgagtcccatattactgcccactcctgtggtgggagggcctcgctatcacctgctggcacacaccacgctgacactggccgccgtgcaggatggtttcaggacccacgacttaaccttggcgagccatgaagagaatcccgcatggctgcccctgtacgggagtgtgtgctgcagattagcagctcaaccattgtgcatgacacagccgactgcctctggcaccctgcgagtgcagcaggccggggagatgcagaattgggcccaagtccacggggtcctgaaaggtaccaatctgttctgttatcgacaaccagaggacgccgatactggagaagagccgttgctcacgattgctgtaaacaaagaaacgcgggttcgagcgggtgagctggaccaagctctgggccgaccatttacactcagcatttctaatcagtacggggatgacgaggtgacacataccctgcagactgaatcccgagaggccctccaatcttggatggaggctctgtggcaactgttttttgacatgagccagtggaaacagtgctgcgatgaaatcatgaagatcgaaactccagcaccgcgcaagcctcctcaggccctagctaaacagggcagcctctaccacgaaatggccatcgagccactggatgacatcgccgccgttactgacatcctgacccagagagagggcgcccgattagaaacaccgcctccatggctcgcgatgtttacagatcaacctgctttaccgaatccatgcagcccagcctctgtggcccctgcccctgactggacccatccgcttccttggggtcggccaaggaccttctctctagatgccgtgccacccgaccacagccccagagcacgctccgtcgctccccttcctccccaacgctctcctcggaccagaggattatgcagtaagggccagccccggacctggcttcagagtccagtctag

SEQ ID NO: 203448 - DNA, 1653 bp, synthetic construct
  misc_feature 1..1653: note = Description of Artificial Sequence: Synthetic coding sequence
  source 1..1653: mol_type = other DNA
atgcaggaccggctgcacatcctggaggacctgaacatgctgtacatcaggcaaatggcgctatcacttgaagataccgagctccaacggaagctggaccacgaaatccgcatgcgcgaaggcgcgtgcaagcttctcgcagcatgctcacagcgagaacaggcattggaggcaaccaaatctcttctggtgtgcaactcgcgcatactgagctacatgggagaattacagagacgaaaggaagctcaggtgctgggaaaaaccagcaggcgaccctctgacagtggccctcctgcggaaagatcaccttgccgcgggcgcgtatgtatatctgatctcaggatcccactcatgtggaaagatacagagtattttaaaaacaagggagacctgcataggtgggctgtgttcctgttgttgcagctaggggaacatatccaagacacagaaatgatcctcgttgaccgaaccctgaccgacattagctttcagtcgaacgtactattcgccgaagcgggccccgactttgagctacggcttgaactgtacggtgcatgcgtcgaggaggaaggagctctgactggtggacctaaacgactggccaccaagctgagttccagcctaggaaggagctcaggtcgaagagtgagggcctctctggacagcgctgggggctctggatcatcccccatacttttacccacgcctgtcgtgggtgggccaaggtaccatctacttgcccacacaaccctcacccttgctgccgtgcaggacggcttcagaactcacgacctgacgctggcctcccatgaagaaaacccagcttggctgcccttgtatggttctgtctgctgcagactggccgcacagcctctgtgcatgacccagcccacagcctcaggcacactgcgggttcaacaggccggagagatgcagaactgggcacaggtccatggggtcctgaaaggaaccaacctgttctgctataggcagccagaggatgctgatactggagaagaaccactcttgacgattgcggtcaacaaagagacaagggtgagggcaggcgaactggatcaggcacttgggcgtcctttcaccctgagtatcagcaatcagtacggagacgacgaggtaacccacaccctgcaaaccgaatcgcgcgaggcacttcagtcctggatggaagctctctggcagctattttttgatatgtcacagtggaagcagtgctgcgatgaaattatgaagattgagaccccagccccccgcaaacctccccaggcactggccaagcaagggtctttgtaccacgaaatggctattgagcctctggatgacatcgcagctgtgaccgatattcttacccagcgggaaggggcaagactcgagacccctcctccctggctggccatgttcaccgatcagcctgctctcccgaatccttgttctcccgcttctgttgctccagcgccagactggacacatccactcccttggggccgccctcggacctttagtctggatgctgtgccccccgatcattctcctcgcgcccgttctgtcgccccactccctccacaaaggtcccccagaactcggggtctgtgttctaaaggccagccccgaacatggctgcagtctcccgtctag

SEQ ID NO: 203449 - DNA, 4635 bp, synthetic construct
  misc_feature 1..4635: note = Description of Artificial Sequence: Synthetic coding sequence
  source 1..4635: mol_type = other DNA
atggacagcggccccgtgtaccacggcgacagccggcagctgagcgcctctggcgtccccgtgaatggagccagagaacccgccggcccatctctgctcggaactgggggtccctggcgtgtcgaccaaaagcctgactgggaagccgctcctggacctgcccatactgcccgccttgaggacgctcacgacctcgtggctttcagtgcagtcgcagaagctgtgagctcctatggagctctgtcaactcgcctgtatgaaacgtttaatcgcgagatgtcgagggaggctgggaacaacagccggggcccccgccctggccctgaaggatgctctgccggtagcgaagatctagacacactacaaaccgcactggctttggccaggcacggtatgaaacctcccaattgtaactgcgacgggcccgagtgccccgattaccttgaatggttggaaggcaagattaagtctgtggtaatggaaggcggcgaggaaaggccgagactgcctgggccacttcctccaggagaggctgggttgcccgcaccatcaacacgcccgctgctctctagtgaagttccgcagatttcccctcaggagggactccctctgtctcagtccgccttgagcattgcaaaagaaaagaatattagcctgcagacagcaattgccatcgaagcgctgacgcagttatcttcagccctccctcagcccagtcatagcacccctcaggcgagctgtccattaccagaagccttgtcgccgccggcaccctttcggtctccgcagagctatcttcgggcaccatcttggcctgtggtccctcctgaagaacacagctccttcgcccctgacagctcagccttccctccagctactcccaggactgagtttccagaagcatggggcactgatacccctccagctactcctaggtcatcctggcctatgccccgacctagtccagatcccatggctgaactggagcaattacttggcagcgcctcagattacatccagtccgtattcaaaagacccgaggcgctcccaactaagcccaaagtcaaggttgaagcgccaagttcaagccccgccccagctccgtccccagtgttacagcgggaagcccccacccccagcagtgaacctgacactcaccagaaggcccagacggccctacaacagcacctccaccacaagaggagtctgttcctggagcaggtccacgatacttccttccccgcaccctcagagccttccgcccccggatggtggccacccccatcctcccctgtgccccgtttgcccgaccggccgccgaaggagaaaaaaaaaaaactgcctacacccgcagggggtccagtgggaacagaaaaagccgctccagggattaagccctccgttaggaaacccattcagatcaagaagagccggccaagggaggcccagcctctgttccccccagtccgccagattgtgctggaaggtttgaggagccccgcgtcccaagaagttcaggcgcaccctccggcccctctcccggcatcccaagggtccgcagtgccactgcctcctgagccctcactcgccctattcgctccatcgccctcccgtgattcccttctgccgccaacccaggagatgagatctccctctcctatgaccgccctccagcctggcagcactggccccctgccaccggccgatgataaactggaagaattgatcagacagtttgaggccgaattcggagactctttcggtcttccaggccctcccagcgtccctatacaggatccagagaaccagcagacatgtctgccagctccagaaagcccattcgccactcggtctccaaaacaaatcaagatagagtcatctggtgcagttaccgtcctctccacaacatgtttccattccgaggaagggggccaggaagctacgcccacaaaggctgagaaccccctcacccccacgctttcaggcttccttgagtcaccgctgaagtatctcgatacacccacaaagtccctcttagatacaccagccaagcgcgcccaggcagagtttcccacttgcgactgcgtggagcagatcgtggaaaaagacgaaggtccctactacacccaccttggttccggccctacagttgcatcgatcagggagctaatggaggagcggtacggcgagaaagggaaagcaatcagaatagagaaggtcatatataccggcaaagaggggaaaagttcccggggctgccccatcgccaaatgggtgatacgccgacacacattggaagagaagttactctgcttggtcagacatagggccggacaccactgtcaaaacgcagtaatcgtcattctcatcttggcatgggagggcattccccggtctctgggagataccttgtatcaggaactgaccgacacccttaggaaatacggaaacccaaccagtcgaaggtgcggcctgaacgatgatagaacatgcgcatgtcagggaaaggaccccaatacctgtggggcttcctttagcttcggatgcagctggagcatgtactttaacgggtgtaagtacgcacggagtaagacacctcggaagttccgtcttgcgggagacaacccgaaggaggaagaggtgctgcgtaagtcattccaggatctcgccactgaagtcgcccccttgtacaaacggctcgccccacaagcatatcaaaaccaggtcactaatgaggaaattgccattgattgtcggcttggcctcaaggaagggcgccctttcgccggcgttacagcgtgtatggatttttgcgcacacgctcataaggaccagcacaacctgtacaacggttgcacagttgtttgcacactgaccaaagaggataacaggtgcgtgggaaaaattccggaagacgaacaactgcatgtcctgcccctgtataagatggccaatactgacgaatttggaagcgaggagaatcaaaatgccaaggttggcagtggtgctatccaagttctgaccgcattcccgcgcgaagtgaggaggctcccagagccagccaagagttgtcgacaacgccagcttgaggctaggaaggccgccgcagagaaaaaaaagattcagaaggaaaagctctctactccagagaaaatcaagcaggaagctcttgagctagccggcataacatctgatccaggactgtctctcaagggaggtctgagccagcaagggctcaagcctagtctgaaggtggaacctcagaaccacttttcaagcttcaagtacagtggaaacgctgtagttgagagttattccgtcttgggcaactgtcgacccagcgacccttattctatgaattccgtctacagttatcattcctactacgcacagccttcgctgaccagtgtgaatgggtttcattcgaagtacgcgctgccgtccttcagctactatggctttccttcatccaatcctgtcttcccctcacaatttctcggaccgggagcttgggggcattccgggtcaagcggctcttttgagaagaagccagatctgcatgcactgcataattctctgtcacccgcgtacggcggggcggagtttgcagagctcccctcacaggccgttcctacggacgcgcaccaccctaccccccaccaccaacagccagcatatccaggtccgaaggagtatctcctcccaaaggcccctctgctgcactctgtgagtagggatccatcccccttcgcccaatccagtaattgttataatcggagcatcaagcaagagcctgtcgacccactgacccaggccgaacctgtacccagagacgccggtaagatgggaaagacaccactgtctgaagtgtcgcaaaacggggggcccagtcatctgtggggccagtattcaggaggaccttccatgtccccgaagcggactaatggagttggaggatcctggggagtgttttcctcgggggagtcccccgcaatcgtgcccgacaaactgagctcttttggtgcctcttgcctcgcaccaagccacttcaccgacggccagtggggcctgttcccaggtgagggccagcaggcggcatctcattctggaggccggttaaggggtaagccctggagcccatgcaagttcggaaactccaccagtgctctcgctggaccgtctcttacggaaaaaccttgggcactcggcgccggggactttaattctgcactaaaagggagcccagggttccaggacaaactgtggaaccccatgaaaggggaagagggccgaatccccgccgctggcgcctctcagttggttttctaccaacataaaaacctgaaccagccaaatcacggtctggcgctctgggaggcaaagatgaagcagcttgccgagagggcccgcgcacggcaggaggaggccgccagactgggcctcggtcaacaggaagcgaaattgtatggcaaaaaacgcaagtggggcgggaccgttgtggcagaaccgcagcagaaagaaaagaagggggtagtgcctacacgccaagccttagctgtaccaactgactccgcagtcactgtgtcatcttacgcctatacgaaggtgactggtccgtatagtcgatggatctag

SEQ ID NO: 203450 - DNA, 468 bp, synthetic construct
  misc_feature 1..468: note = Description of Artificial Sequence: Synthetic coding sequence
  source 1..468: mol_type = other DNA
atgcggcacctgccctacttctgccggggccaggtggtgcggggctttgggcgcgggtcgaagcaactggggattcctacggcgaactttcccgagcaagttgtcgataatctgccagctgatatttccacaggcatttactacggttgggctagcgtgggaagtggagacgtacacaaaatggtagtcagtatcggatggaacccgtactacaagaatactaaaaagtctatggagacacatattatgcatacctttaaggaagatttctacggcgaaatactgaatgtcgctatcgtgggctatctccgacccgagaaaaacttcgacagcctggaatcacttatcagtgcaatccagggcgatattgaggaggccaaaaagcgcttagagcttcctgagcatctgaagataaaggaggacaatttctttcaggtgagtaaatcaaaaatcatgaatggtcactag

SEQ ID NO: 203451 - DNA, 969 bp, synthetic construct
  misc_feature 1..969: note = Description of Artificial Sequence: Synthetic coding sequence
  source 1..969: mol_type = other DNA
atggccgccagcggcgagccccagcggcagtggcaggaggaggtggctgccgtggtggtagtcggatcttgtatgacagacctcgtctcactgacctcaaggctccctaaaactggtgagacgatccatgggcacaagtttttcataggtttcggaggaaaaggagctaaccagtgcgttcaggcagcacgcctaggagccatgacaagcatggtatgcaaagtgggcaaggattccttcggcaacgactatattgagaatctgaaacagaatgacatttctacagaatttacctatcaaacgaaagacgctgctaccgggactgctagtattatcgtgaataacgaaggtcaaaatattattgtcattgttgctggggccaaccttctcctgaatacggaggatctgcgagccgctgcaaacgtgatctcccgcgctaaggtgatggtgtgtcagctagaaattacaccagctaccagcctggaggcccttactatggcccgcagatcaggggtgaaaaccctgtttaatccggcacctgctatcgccgacttagaccctcagttctataccttgtccgacgtgttttgctgtaacgaaagcgaggctgagatccttactggactgacagtggggtcagccgcagacgccggtgaagccgcgttggttctgctgaaaagaggttgtcaggtggttatcattacactgggcgcggaggggtgcgtcgtgctgagccagacagagccagagcctaagcatattcctacagagaaggtgaaagccgttgacaccaccggtgccggcgacagcttcgtcggggccttggccttttacctcgcctactacccaaatctaagcttggaagacatgctgaaccgatccaacttcatagccgcagtgagtgtacaggcggcaggtacccagtcatcctacccatataagaaagaccttccattaacgctgttctag

SEQ ID NO: 203452 - DNA, 861 bp, synthetic construct
  misc_feature 1..861: note = Description of Artificial Sequence: Synthetic coding sequence
  source 1..861: mol_type = other DNA
atggccgccagcggcgagccccagcggcagtggcaggaggaggtggcagctgttgtggtagttggaagttgcatgacagatctggtaagcttaacaagccgtctccctaagacaggcgagaccattcatggtcacaagttttttatcggatttggcggtaaaggagcgaaccagtgtgtgcaagctgctcggcttggggcaatgacaagtatggtgtgcaaggttggcaaggatagtttcggcaacgattatatcgagaacctaaaacaaaatgatatctctacagagtttacctatcagaccaaagacgctgcaactggaaccgccagcattattgtgaataacgaaggccagaatatcattgtcatcgtggccggagccaatctgctccttaatacagaggatttacgcgccgcagcaaatgtgattagcagggcgaaggtgatggtatgccagctggaaatcactcccgccacaagcttggaggcacttactatggcccgccggtctggggtcaagactttgtttaaccctgcccccgcgatcgctgacctggacccccagttttatactctatctgacgtgttttgttgcaacgagtccgaggcagagattctcactggcttgacagtcggaagcgccgctgacgcaggagaagctgccctcgtgctcctgaagcgagggtgtcaggtcgtcatcattacgctgggcgccgaggggtgtgtcgtacttagccagaccgagccagagccaaagcacattccaacagagaaggtcaaggccgtcgatacaacctgccggcccggtagccgaccaaaatccgaggccgcttctgtgaaaaagcagaaacattataagtag

SEQ ID NO: 203453 - DNA, 861 bp, synthetic construct
  misc_feature 1..861: note = Description of Artificial Sequence: Synthetic coding sequence
  source 1..861: mol_type = other DNA
atgagctggctgctgttcctggcccaccgggtggccctggccgccctgccttgtcggcgcgggtcaagagggttcggtatgttctacgcagtgaggagggggagaaaaaccggcgtctttctgacatggaatgagtgcagagcacaggttgaccgctttcctgccgcccgattcaaaaagttcgctactgaagacgaagcttgggcatttgtccgcaagtcagcgtcgcctgaggtttctgaaggccacgagaaccagcatggacaggagagcgaggcgaaagcctcaaagagattacgggagccacttgacggggatggacatgaatcagccgagccctacgcaaagcacatgaagccctccgtcgaacctgcacctccggtgagcagggacacattctcttacatgggggattttgtcgttgtgtataccgacggctgctgctcttccaacggcagacgcagacctcgggccggtattggcgtgtactggggaccaggacatcccttaaatgtggggattaggctcccgggacgccagaccaaccagagggccgaaatccacgccgcttgcaaggctatcgagcaggcaaaaacacaaaacattaataagctggtgctctatacagacagcatgttcactatcaatggtatcactaattgggtccagggctggaagaagaacggatggaagaccagtgcaggaaaagaggttattaacaaggaggactttgtggcactcgagcgcctgacccagggtatggatattcaatggatgcacgtgccagggcatagtgggttcatcggcaacgaagaggcggacaggctggccagagaaggtgctaagcagagtgaggattag

SEQ ID NO: 203454 - DNA, 1683 bp, synthetic construct
  misc_feature 1..1683: note = Description of Artificial Sequence: Synthetic coding sequence
  source 1..1683: mol_type = other DNA
atggagttccggcaggaggagttccggaagctggccggccgggccctcgggaagcttcatcgccttctggaaaaaagacaggagggggcagagacattggagctgagcgccgatgggagaccagttacaactcagacccgtgacccccccgtagtagattgcacatgcttcggtcttccacgccgatacataattgccataatgtccggcctgggcttctgcatcagttttggaatccgatgtaatttaggggtagcgatcgtgagcatggttaataattccacaacccatcggggcggccacgtggtagtgcaaaaggcccagttcagctgggacccagagacagtcggacttattcacggatcattcttctgggggtacatcgtgacccagatccccgggggattcatctgtcagaagttcgctgctaaccgcgtgttcggctttgccattgtcgctacatcaactcttaatatgttgattccctccgccgcccgggtgcattacgggtgtgtcatctttgtgcgtattctgcaggggcttgtggaaggcgtgacttatcccgcctgtcatggcatctggagtaagtgggctcctcccctcgagaggtctcgccttgccacgactgctttctgcggctcatacgctggcgcggtggtcgcaatgcccctcgcaggcgtgcttgttcagtattcaggatggtccagtgtgttctacgtctacggctcgttcggcatcttctggtacctcttttggctgctcgtcagctacgagtcccccgctctgcatccttcaatctcggaggaggaaaggaaatatatagaggatgcaatcggcgagtctgcgaaactaatgaatcctctgaccaaatttagtacaccctggaggcgcttctttacgagtatgccggtctacgccattattgttgcgaacttttgccgcagttggacattctatttacttctgattagccaacccgcctacttcgaggaggtgttcgggtttgaaatcagcaaggttggcctggtgagtgccctgccccacctggtaatgaccatcatagtgccgatcgggggccagattgctgattttctgaggagtaggcgaatcatgtccaccacaaatgttcgcaagctgatgaactgcggcggatttggcatggaggccacattactcctcgtggtcgggtactcgcattctaagggggtggcaattagtttcttagtgttagccgtggggttcagtggctttgctattagcggctttaacgtgaatcacctggacatcgcgccccggtacgcttccattcttatgggtatctccaacggtgtgggcactctaagcggaatggtttgccccataattgtgggagccatgaccaagcacaaaacacgggaggagtggcagtatgtatttctgattgcctccctagtgcactatggcggagtgatcttttatggggtattcgctagcggagagaaacagccctgggccgagcctgaagaaatgtcagaagagaagtgcgggtttgtgggacatgaccagctcgccgggagtgacgactcggaaatggaggatgaagccgaaccacccggcgcccccccagctccccccccctcatacggcgcgacccattcaactttccagccaccacgcccccccccccccgttagggattactag

SEQ ID NO: 203455 - DNA, 939 bp, synthetic construct
  misc_feature 1..939: note = Description of Artificial Sequence: Synthetic coding sequence
  source 1..939: mol_type = other DNA
atggccgccggcgtggactgcggcgacggcgtgggcgcccggcagcatgtgttcctggtctccgagtacttgaaggacgctagcaagaagatgaagaacggactcatgtttgtaaaattagtaaatccttgctcgggtgaaggagcaatttacttgttcaatatgtgcctccagcagctcttcgaggtaaaggtgttcaaggaaaaacatcactcctggtttatcaatcagtcggtacaaagcggcgggctccttcactttgctacccccgtcgatccacttttcttgctcttacactacctcatcaaagccgacaaagaggggaagttccaaccactggatcaggtggtggttgataatgtgtttccgaattgcatcctgctcttgaaactacctgggctggagaaactcttacaccacgtgacagaagagaaaggaaaccctgagattgacaacaaaaaatattacaaatatagcaaggaaaagacacttaagtggctcgagaagaaagtgaatcaaaccgttgctgctctcaaaacgaacaacgtaaacgtttcttctcgggtccagtcaaccgctttttttagcggtgaccaggcaagtactgataaggaggaagactatatccggtatgcacacggtttgatttccgattacattcccaaagaattatccgacgacctgtcgaaatatttgaaactgccagagccctccgcatccctgcccaaccctccttccaagaagatcaaattaagcgatgaaccagtcgaagcgaaagaggattataccaagtttaatacaaaagatcttaagaccgagaaaaaaaactcaaagatgacagctgctcagaaggcactcgcaaaggtggacaagagcggaatgaaaagtattgacaccttctttggagtgaagaataagaagaaaatcggtaaggtgtag

SEQ ID NO: 203456 - DNA, 774 bp, synthetic construct
  misc_feature 1..774: note = Description of Artificial Sequence: Synthetic coding sequence
  source 1..774: mol_type = other DNA
atggccgccggcgtggactgcggcgacggcgtgggcgcccggcagcacgtctttctcgtcagcgagtacctgaaagatgcgtccaagaaaatgaagaacgggctgatgttcgtgaaattggtaaatccctgcagcggcgaaggcgccatatacctgttcaacatgtgcttgcaacagcttttcgaagttaaggtgtttaaagaaaagcaccattcttggttcatcaatcagtcagttcagtctgggggtctacttcatttcgctactccggtggaccctctctttctgctccttcattacttaatcaaagcagacaaagagggcaaattccagccactggatcaggtcgttgtggacaatgtgttcccaaactgcattttgctactgaaactaccagggctagagaagctgctgcaccatgttaccgaggaaaaaggcaaccctgagattgacaataaaaagtattataagtattctaaggagaagactttaaaatggcttgagaaaaaagttaatcagacggtagcagcactcaagacgaataatgtgaatgtctcctctcgtgtgcagtctacggccttcttctccggtgaccaagctagcacagataaagaagaagactacatcagatacgcccacggtctcatctccgactacattccgaaggagctgtccgacgatctgagtaagtacctcaagctgcctgagccgtcagcaagccttcctaatccacccagcaaaatggctgctcagcgtcagaaacgggggaaatag

SEQ ID NO: 203457 - DNA, 996 bp, synthetic construct
  misc_feature 1..996: note = Description of Artificial Sequence: Synthetic coding sequence
  source 1..996: mol_type = other DNA
atggccgccggcgtggactgcggcgacggcgtgggcgcccggcagcatgtatttcttgtgagcgagtatctgaaagacgctagcaaaaagatgaaaaacggcttaatgtttgtcaaactcgtgaatccttgctcaggggagggggcaatctatctgttcaacatgtgtctccaacagctgttcgaggtgaaggttttcaaagaaaagcaccatagctggtttattaaccagagcgtgcagagtgggggcctattgcacttcgctacaccggtggatccactgtttctgctcttgcattacctgatcaaagccgataaagagggcaagttccagccgctggatcaggttgtagtcgacaacgtattcccaaactgcatattactgctgaaattgcccgggctggaaaaactgttacatcatgtgaccgaggaaaagggtaacccagagatcgacaataagaagtactataaatactcaaaggaaaaaactttgaaatggctcgaaaagaaggtgaatcaaaccgtggccgctcttaaaactaataacgtgaacgtgtcgagcagggtacaatctacggcgtttttcagcggggaccaggccagcacagataaggaggaagactacattcggtatgcacatggcctcatctccgattatataccaaaagagttatccgatgatctcagcaagtacctgaagctacccgaaccgagcgcttctctccctaatcctcccagtaagaagataaagttgagcgatgagcctgtggaggccaaggaagactacactaaatttaacaccaaagacctgaaaactgagaagaaaaatagtaagatgaccgccgcccaaaaagccctagccaaggtggataaatccggtatgaagagtatcgacacattttttggcgtgaagaagaagctggagagattcgaaacccttaaaatcaagagctccaagaacatctgcttcctgcatgtatcagtatgcccaagttag

SEQ ID NO: 203458 - DNA, 495 bp, synthetic construct
  misc_feature 1..495: note = Description of Artificial Sequence: Synthetic coding sequence
  source 1..495: mol_type = other DNA
atggagagcggcgacgaggccgccatcgagcggcaccgggtgcacctgcgtagtgccacgctgcgcgacgctgtccccgctactctgcatcttctcccgtgtgaggtggcagtggacgggccggccccagtggggcgatttttcacccccgctattcggcagggtcctgagggcttggaagtgtccttccggggcaggtgcctccgcggggaggaggtcgcagttcctccgggcctggtcggatatgtcatggtcaccgaggaaaaaaaggtgtctatgggcaagcccgaccccttgcgcgatagtgggaccgacgaccaggaggaggagccgctggaacgagatttcgatcgcttcatcggggccaccgctaacttctcccgatttaccttgtggggtctcgaaaccattccaggaccggacgccaaagttcgcggagcactaacgtggcccagcctagcagccgcgatccacgctcaagtaccagaggattag

SEQ ID NO: 203459 - DNA, 2226 bp, synthetic construct
  misc_feature 1..2226: note = Description of Artificial Sequence: Synthetic coding sequence
  source 1..2226: mol_type = other DNA
atggagagccgggaccacaacaacccccaggagggccccaccagctcttcaggaagaagggcagcagtggaagacaatcatctgttaattaaggccgtccagaacgaggatgtcgacctggtccagcagttgctggagggcggtgccaacgtaaatttccaggaggaagagggcggctggaccccactgcataatgctgttcagatgagcagggaagatatcgtcgaattgctcttacgacacggggcggacccagtgctcaggaaaaagaacggagcaaccccctttattcttgccgctattgctggatcagtgaaattattaaaactattcctgagcaaaggtgccgatgtgaacgaatgcgatttctatggattcaccgctttcatggaggcagctgtttacggtaaggtgaaggcgctgaagttcctatacaagcggggcgcaaatgtgaacttacgtaggaaaactaaggaggatcaggaaagactgcggaaaggaggcgccaccgccctaatggacgccgcagaaaaaggccacgtcgaggtcctgaagatcttgctagatgaaatgggcgcagatgtgaatgcttgtgataacatgggccgaaatgcattgatccatgccctgctcagcagtgatgattctgacgtagaggctatcacacacctcctgctcgatcacggtgctgacgtcaacgttaggggcgagcgaggaaagacacccctgatacttgctgtggagaaaaagcatctgggactggtccagcgtttgcttgagcaagaacatattgagattaacgacaccgattccgacggcaaaacagcgttacttctggctgttgagctcaagctcaagaagatagctgaactgctgtgtaaaaggggtgcttctaccgattgcggcgatctggtcatgactgctagacgaaattatgaccattctctggtgaaggtgctgctgtctcatggtgcaaaagaggatttccaccccccggcagaagattggaaaccgcagagctctcactggggggccgccctgaaggacctccaccgaatctaccgccctatgattggcaaactgaaattttttattgacgaaaaatacaagatcgcagacacatccgagggaggcatatacctcggcttctatgagaaacaggaggttgccgtaaagacattttgtgaggggtcacctcgcgcccaaagggaggtgagctgcctccaatcttcacgggagaatagccacctggtgacattttacgggtccgagagccacagggggcacctcttcgtgtgcgtgaccttatgcgagcagaccctcgaggcgtgcctcgacgttcacaggggggaagatgtggagaacgaagaggatgaatttgctcggaacgtactctcgtctattttcaaggcagttcaggagttgcacctgtcctgcggatacacacatcaggacctgcagccccaaaatattctgatagattccaagaaggctgcccatctggccgacttcgacaagagcattaaatgggctggggatccacaggaggtaaagcgggacctggaggaccttggtcgcttagttctgtacgtcgtgaagaagggctctatcagcttcgaggacctgaaagctcagtccaacgaagaggtcgtccaactgagtcccgatgaggaaacgaaggacctcatacaccggttattccatccgggagagcacgtccgggactgcttatctgacctgctgggacacccattcttttggacatgggaaagtcgatacagaacacttaggaacgttgggaatgaaagtgatatcaaaacccgcaagagcgagagcgagattctgcgcctcctccaacccggaccatctgaacacagcaaatcctttgataagtggaccacaaagatcaatgaatgtgtgatgaaaaagatgaataaattttatgagaagagaggtaacttttaccagaacactgtcggcgacttgttgaagtttattagaaatcttggcgagcacatcgatgaggagaagcataagaaaatgaagctgaaaatcggcgacccatccttgtactttcaaaaaaccttccccgatttggtgatatacgtttacacaaaacttcagaataccgagtacagaaaacatttcccacagacacactccccaaacaaacctcagtgcgatggagctgggggcgcctcaggtctggccagtcctggatgttag

SEQ ID NO: 203460 - DNA, 2226 bp, synthetic construct
  misc_feature 1..2226: note = Description of Artificial Sequence: Synthetic coding sequence
  source 1..2226: mol_type = other DNA
atggagagccgggaccacaacaacccccaggagggccccaccagctccagcggtaggagagcagccgttgaggataaccatcttctgattaaggccgttcagaacgaagacgtggatctcgtgcagcaactcctggagggcggagccaatgttaatttccaggaagaggaaggcggctggacccccttacacaatgcagtgcaaatgtccagagaggacatcgtagagctgttgctgaggcatggggccgacccagtgcttcgcaagaagaacggtgctacacccttcatactcgctgccattgcaggtagcgtgaaactgctgaaactgttcctgtctaagggcgccgatgtcaatgagtgtgatttttacggcttcacagcttttatggaggcggccgtttacggaaaagtgaaggccctgaaattcctttataagcggggtgccaacgtaaatctgcggcggaagaccaaagaggatcaagagcggcttaggaagggaggcgctaccgccctgatggatgcggcggaaaagggccacgtggaggtcctaaaaattctcctagatgaaatgggcgccgacgtgaacgcctgcgacaacatgggaagaaacgctttgatacatgccctattgagtagcgacgatagcgacgtggaagccattacgcatctcctcctcgatcacggagctgacgtgaatgtgcggggggagcggggaaaaacacccctgatcctggccgtggaaaaaaagcacctgggcctcgtccaaagactgctggagcaggagcatattgagatcaatgataccgatagcgacggaaaaacagccctgttgctggctgttgaattaaagctgaaaaaaatcgccgaactgttatgtaagcgcggagcaagcaccgactgcggtgacctcgtgatgacagccaggcggaactacgatcattccctggtgaaggtcctactgtctcatggcgctaaagaggacttccatcccccagctgaagattggaagccccagagttcgcactggggggctgccctgaaagacttgcaccggatctacagacctatgattgggaagcttaaatttttcattgacgagaagtacaaaatagccgatacatcggagggagggatctatctgggattttacgaaaagcaggaagtggctgtgaagactttctgcgaagggtctccccgggcccagagagaggtgtcttgcctacagtccagccgggaaaatagccatctggtgaccttctatggatctgagtcccatagaggccatctctttgtgtgcgtcactctctgtgagcagacactggaagcctgcctggacgtgcataggggcgaggacgtggagaatgaggaagatgagttcgcccgcaatgtgctgagcagtatatttaaagctgtgcaggagctccacttgagctgcggttatacccatcaagatctgcagcctcagaacatcctgatagacagtaagaaagcagcacatcttgcggattttgataagagtatcaaatgggcaggtgaccctcaggaagtcaaacgcgatctagaggacctaggaaggttggtattgtacgtagtgaaaaaaggaagcatttcattcgaagacttgaaggcccagagcaacgaagaagtcgtccagttaagcccagatgaagaaacaaaagaccttattcaccgactctttcaccctggtgagcacgttagggattgcctatctgacctgctgggtcacccctttttttggacgtgggaatccagatacaggacactgcggaacgtaggaaacgagtccgatatcaagactagaaaaagcgagtccgaaattctgagactgctgcaaccaggtccctccgagcatagcaagtcgttcgataagtggacaactaagataaatgagtgcgtcatgaaaaagatgaacaaattctacgagaagcggggcaacttctatcaaaatacagtcggcgacctgctcaaattcattcgcaatttaggggaacacattgacgaggagaagcacaagaaaatgaaattgaagataggagatcctagtttgtattttcagaaaacctttcccgacttggtgatctatgtgtatactaagctccagaacaccgaataccgcaaacactttccccagacacatagtccaaataaaccacaatgtgacggagccgggggcgcatctggtctggcatcccccggttgttag

SEQ ID NO: 203461 - DNA, 1959 bp, synthetic construct
  misc_feature 1..1959: note = Description of Artificial Sequence: Synthetic coding sequence
  source 1..1959: mol_type = other DNA
atggagagccgggaccacaacaacccccaggagggccccaccagctcttcaggccgaagggccgccgtggaggacaaccatttgctgatcaaagccgtgcagaacgaagacgtcgatctggtccaacagctcctggagggtggggctaacgttaattttcaagaggaagaaggggggtggacacctcttcacaacgcagtgcagatgtcccgggaggacatcgttgagcttctactgaggcacggggctgaccctgtactgcgcaaaaagaacggtgcaaccccctttatactggcagccattgcaggatctgttaagctactcaagcttttcctcagtaagggcgctgacgtgaacgagtgtgacttttatggctttactgcgttcatggaggcagctgtgtacggcaaagtcaaggccctcaagtttttgtataagagaggagctaatgtaaacctgcggaggaagactaaggaagatcaggagcgactaagaaaaggcggagctaccgccctgatggacgctgcagaaaagggacatgttgaagttctgaaaatcctccttgacgagatgggagccgatgtgaatgcttgcgacaatatgggcagaaacgccctcatccacgccctcctgagtagtgacgatagcgatgtcgaagctatcacgcacttactgctggatcatggcgctgacgtgaatgtaaggggagaaagagggaaaacacccctgattctggcagtcgagaagaagcatctgggtcttgtgcagaggctgctggaacaggaacatatcgagatcaacgatacagactctgacggcaaaaccgcactactgctcgctgtagagcttaagcttaagaagattgcggagctactctgcaagaggggggccagtaccgactgtggcgacctggtcatgactgcacgtagaaattacgatcactcactcgtgaaagttctgctgtctcacggcgctaaagaggacttccatccgccagcagaagattggaaaccccagtcttcgcactggggcgcagctctcaaggatttgcaccgtatttatcggcccatgattggcaagctgaagttctttattgatgagaagtataaaattgcagatacatctgaagggggaatctatctgggattttatgagaagcaggaggttgctgtgaaaactttttgcgagggtagtccgagagctcagcgtgaagtgtcatgcctgcaatctagtcgtgagaacagccacttggtcactttttacggatctgagtcccatcgggggcatttattcgtgtgtgtgactctatgtgaacaaacactggaggcatgcctggacgtacatcggggggaagatgttgaaaacgaagaagatgagttcgctcggaacgtgttgtcttccatttttaaggctgtgcaagaactccatctctcatgtggatatacccaccaggatttacagccacagaacatccttatcgactccaaaaaagctgcgcatttggctgactttgacaaaagcattaaatgggcaggcgatccccaggaggtgaagcgggacctggaggacttaggacggctggtcttgtacgtcgtgaagaaagggagcatttcattcgaagacctgaaggcccagtctaacgaagaagttgtgcagctgtctcctgacgaggagaccaaggacctgattcatcggctctttcacccaggagagcatgttcgagattgcctgagcgatcttttggggcatccgtttttttggacctgggaaagtagataccgcactttaaggaacgtaggcaatgagtcggatatcaaaacccgtaagtcagaaagcgaaattctgcggcttcttcaacctgggccgtcagagcatagcaaaagctttgataaatggaccaccaaaatgtcaaagctcaggcatcgccagataatttttcctacaacacagaaccagtag

SEQ ID NO: 203462 - DNA, 465 bp, synthetic construct
  misc_feature 1..465: note = Description of Artificial Sequence: Synthetic coding sequence
  source 1..465: mol_type = other DNA
atgatcggcaagctgaagttcttcatcgacgagaagtacaagatcgccgatacaagtgagggcggcatttatcttgggttctatgagaaacaggaggtcgccgttaaaaccttttgcgaaggctcacccagggcgcagagagaggtttcctgtttgcagtcgagccgagaaaactcacatttggttacattctacgggagtgaatctcacaggggccatttattcgtgtgcgtaacactctgcgaacagactttagaagcttgtttggacgtgcaccggggtgaagacgttgaaaacgaggaggatgagttcgccagaaacgtgctgagttccattttcaaggccgtacaggagttgcacctgtcttgtggatacacccaccaggatctccagcctcagaatatcctgatcggcccctggaccgctggccccctgtgtggtaaagagggaaagcacctcatctag

SEQ ID NO: 203463 - DNA, 465 bp, synthetic construct
  misc_feature 1..465: note = Description of Artificial Sequence: Synthetic coding sequence
  source 1..465: mol_type = other DNA
atggccggccccgtgaaggaccgggaggccttccagcggctgaactttctgtaccaggccgcacactgcgtcctcgcccaagaccctgagaaccaggccctcgcccggttttattgttacacagaaaggaccatcgcaaagcgcctcgtgctccgtagagacccttcagtgaagcggacactttgcagggggtgctcatcactgctagtccccggcctgacctgcacccagcgccagcgacgatgtaggggacagcgctggacagttcagacttgccttacttgtcagcgttcccaacgattcttgaacgatcccggccaccttctgtggggagatcggcccgaggcccagctgggatctcaggcagacagtaagccattacagccactccctaatacagcccacagtatttccgatcggttgccggaagagaaaatgcaaacacagggcagcagcaatcagtag

SEQ ID NO: 203464 - DNA, 489 bp, synthetic construct
  misc_feature 1..489: note = Description of Artificial Sequence: Synthetic coding sequence
  source 1..489: mol_type = other DNA
atggccggccccgtgaaggaccgggaggccttccagcggctgaacttcctctatcaggctgcacattgcgttctagctcaggacccagaaaaccaggccctggcgcgtttttactgttacacagagcgcactattgcaaaaaggctcgtgctccggagaccgctttctagctcagcccctcgggacccctcagtgaaacgtacactctgccggggatgtagtagtctgttagtacccggcttgacctgcacacagagacaacggcgctgcagagggcagaggtggacagtgcagacttgtttaacatgccagaggtcccagagattcttgaacgatccaggccacctcctgtggggggatcgccccgaggcacagctaggctcccaggccgactcaaagcccctgcagcccctgcctaatactgctcactccatctcagatcggttgccggaagagaagatgcagaccaagggctcatcaaatcaatag

SEQ ID NO: 203465 - DNA, 534 bp, synthetic construct
  misc_feature 1..534: note = Description of Artificial Sequence: Synthetic coding sequence
  source 1..534: mol_type = other DNA
atggccggccccgtgaaggaccgggaggccttccagcggctgaactttttataccaggtgtctctgcgacagggaccacatggtgatggcgcccggagaccgagggtgactgcaccgctgccccaagccgctcattgtgtcctcgcacaggaccctgaaaaccaagctctcgcccgcttctactgttacacagaaagaactattgcaaaacggttagtgctccgcagagacccatcagtgaagagaacactgtgcagaggctgttcttctttgcttgtcccagggttaacttgtacacagagacagcgaagatgccgcggccagagatggacagttcagacatgtctcacctgccagcggtcccaaaggtttctgaatgatcccggccaccttctgtggggcgacagaccggaagcccaactgggctcccaagccgactcgaagccgttgcagccgctgcccaataccgcccactccatctctgatcggctccctgaggagaaaatgcagactcaggggagtagtaaccagtag

SEQ ID NO: 203466 - DNA, 489 bp, synthetic construct
  misc_feature 1..489: note = Description of Artificial Sequence: Synthetic coding sequence
  source 1..489: mol_type = other DNA
atggccggccccgtgaaggaccgggaggccttccagcggctgaactttctctatcaggccgcccattgcgttctcgcccaagaccctgaaaatcaggctttggcacgcttctactgctatactgaaaggacaatcgccaagcgattggttttgcggagaccactgagctctagtgcccctcgggacccgtccgttaaacggaccctctgccgggggtgttcctctttgcttgttcctggactgacctgtactcaccgccagaggaggtgtcggggtcaacggtggactgttcaaacatgcttgacatgtcagagaagccagaggttcctgaatgaccccggtcacttgctatggggtgatcggccagaggctcaactgggctctcaggctgacagcaaacccctccagcccttgcctaacacagctcacagcatctccgacagattgcctgaagaaaagatgcagactcagggcagcagtaaccagtag

SEQ ID NO: 203467 - DNA, 534 bp, synthetic construct
  misc_feature 1..534: note = Description of Artificial Sequence: Synthetic coding sequence
  source 1..534: mol_type = other DNA
atggccggccccgtgaaggaccgggaggccttccagcggctgaactttctctaccaggtgtccttgagacagggcccccacggagatggcgctcggaggcctagggtgaccgcaccactcccacaggcagcacactgtgtattggcccaggatcccgagaatcaggcactagcacgcttctactgctataccgaacgcacaatcgccaagcgactggtcctgcgccgagacccatccgtgaagagaacactatgtaggggctgttcatccctcctcgtcccaggacttacgtgcacccagaggcaacggcgctgtcggggccagcgctggacggtccaaacctgcctcacctgtcagcggtcccagcgttttctgaacgacccaggacatctgctgtggggtgatcggcccgaggcgcagttgggttcccaggctgattccaaacccctgcaaccactaccgaacacagcccattccatttccgacagactgcccgaggaaaagatgcaaaccaaaggatcaagtaaccagtag

SEQ ID NO: 203468 - DNA, 465 bp, synthetic construct
  misc_feature 1..465: note = Description of Artificial Sequence: Synthetic coding sequence
  source 1..465: mol_type = other DNA
atggccggccccgtgaaggaccgggaggccttccagcggctgaacttcctgtatcaggctgcccactgtgtgctcgcccaggaccctgagaaccaggccctggcccgtttttattgctacaccgaaaggacaatcgcaaaaagattggtcctcaggagggaccctagcgtaaagagaactctctgcagagggtgctcttccctactggttcctggactcacttgcactcataggcagagacggtgtaggggtcagcggtggaccgtacagacttgcctgacctgccagcgatcacagcggttcttaaacgatcccggtcatcttctttggggcgaccgcccggaggctcaacttgggtcccaggctgactccaaacctcttcagcccctgccaaatacagcccactctatctctgaccgcctgcccgaggaaaagatgcaaactcagggaagttcaaatcaatag

SEQ ID NO: 203469 - DNA, 435 bp, synthetic construct
  misc_feature 1..435: note = Description of Artificial Sequence: Synthetic coding sequence
  source 1..435: mol_type = other DNA
atggccggccccgtgaaggaccgggaggccttccagcggctgaacttcctgtatcaggccgcgcactgtgtgcttgcccaagatccggagaaccaggccttggcccggttttattgctacacggagagaactatcgccaaaagacttgttctcaggcgggacccaagcgtaaaaaggacattgtgccggggctgttccagcttattagttccagggcttacatgcacccagaggcagcgaaggtgtcggggtcaacgatggaccgtgcaaacctgcctcacgtgtcagagaagccaacgatttctcaacgatcccggccatctcctgtggggtgatcggcccgaggcccagcttggatctcaagcgggagagagattccagactactacgacactagctaagcatagcccacttcatttcagacccccttcctag

SEQ ID NO: 203470 - DNA, 465 bp, synthetic construct
  misc_feature 1..465: note = Description of Artificial Sequence: Synthetic coding sequence
  source 1..465: mol_type = other DNA
atggccggccccgtgaaggaccgggaggccttccagcggctgaacttcttgtaccaggccgcccattgtgttctcgcccaggaccccgaaaatcaagctctggcccgtttctactgctatacagagcggactatcgccaagaggttagtactaagaagggatccttcagtgaagcgtaccctttgtcgcggatgctcaagtctgcttgtgcccggtctgacctgtacgcatcggcagcgcagatgcagaggccagaggtggacagtccagacgtgtcttacctgccagaggtctcagagatttttgaatgacccgggacacttgctgtggggagaccgtcccgaagctcagctcggcagtcaggctgacagcaaacctttacaaccgttgccaaacacagcacattcgattagcgatcgcctgccggaggaaaaaatgcagacccagggtagttctaaccagtag

SEQ ID NO: 203471 - DNA, 465 bp, synthetic construct
  misc_feature 1..465: note = Description of Artificial Sequence: Synthetic coding sequence
  source 1..465: mol_type = other DNA
atggccggccccgtgaaggaccgggaggccttccagcggctgaacttcctgtaccaagcagcccattgcgttctggctcaggatcctgaaaaccaagcgcttgcaagattctattgttacacggaacggaccatcgccaagagactagtgcttcgccgtgacccaagcgtgaagcgtacactctgtcgcgggtgttccagtctactggtacctgggctcacgtgtacccagcggcagaggcggtgtaggggacagcggtggactgtacaaacctgcctgacttgtcagcggtcacaacggttcctgaacgaccctggacacctcttatggggagaccgacctgaggcccaactcggttcgcaagctgattccaaacccctccagccccttcctaacactgcccattccatttccgacaggttgcccgaggagaagatgcagactaaggggtcatcgaaccaatag

SEQ ID NO: 203472 - DNA, 534 bp, synthetic construct
  misc_feature 1..534: note = Description of Artificial Sequence: Synthetic coding sequence
  source 1..534: mol_type = other DNA
atggccggccccgtgaaggaccgggaggccttccagcggctgaactttctgtaccaggtctcccttaggcagggcccccacggagatggcgcgcgcagacctcgggttacagctccgcttccccaggctgcgcattgtgtgctggcccaagatccagagaatcaggcactggcgcggttctattgctacacggagcggaccattgcaaagcggcttgtgctgcgccgcgacccctctgtgaagcgcaccctctgcagaggctgttccagtctcctggtgccaggcctgacttgcactcacagacagcgcagatgcaggggacagcggtggaccgttcaaacctgcctgacttgccagaggtctcagaggttcctcaatgatcccggacatctgttatggggagatcgacccgaagctcagcttggtagccaggccgattctaagccactgcaacccctgcctaatactgcacacagtatcagcgatagactccccgaggagaagatgcaaacgcaaggctcctccaatcagtag

SEQ ID NO: 203473 - DNA, 435 bp, synthetic construct
  misc_feature 1..435: note = Description of Artificial Sequence: Synthetic coding sequence
  source 1..435: mol_type = other DNA
atggccggccccgtgaaggaccgggaggccttccagcggctgaacttcctgtaccaagcggcccactgtgtcctggcacaggatcctgaaaaccaggctctcgcgcgattttactgttacaccgagagaaccattgccaagcgacttgtgctgcgcagagacccatccgtaaaacgcactctttgtagaggatgttcaagcctgttagtgccggggctcacctgcacccatagacagcgccgatgcaggggtcagcgatggaccgtacagacatgtttgacctgccagaggtcgcagcggtttctgaatgatcccggacacttattgtggggcgaccggccagaagcacagcttggaagccaggcaggggaacggttccaaacaacaacaaccctcgctaaacacagcccactccactttcgtcccccctcatag

SEQ ID NO: 203474 - DNA, 465 bp, synthetic construct
  misc_feature 1..465: note = Description of Artificial Sequence: Synthetic coding sequence
  source 1..465: mol_type = other DNA
atggccggccccgtgaaggaccgggaggccttccagcggctgaactttctgtatcaggcagctcattgcgtgcttgcacaggaccccgagaaccaggctcttgccagattctattgttatacagagcgcacaattgcaaagcggttggtcctgagaagagacccaagcgtaaagagaactctctgccgcggatgtagctcacttctggtccctggacttacatgcactcagcgccagcggcgatgtagggggcagcgctggacagtgcagacttgtctcacatgccaaagaagccaaaggtttctgaatgatcctgggcatctgctgtggggcgacaggccagaagcccaactgggatctcaagcagattctaagccactccagccattgcctaacactgcacatagtatttccgaccgactgccagaggaaaagatgcaaacccaggggtcaagcaaccaatag

SEQ ID NO: 203475 - DNA, 489 bp, synthetic construct
  misc_feature 1..489: note = Description of Artificial Sequence: Synthetic coding sequence
  source 1..489: mol_type = other DNA
atggccggccccgtgaaggaccgggaggccttccagcggctgaacttcttatatcaggcggcgcactgcgtgcttgcacaggatcctgaaaatcaggctctggcacggttctactgttacaccgagcggacaatcgctaagcgcctggttcttagaagacccctcagctcatccgctcctagggacccaagcgtgaagcgcaccctctgcaggggttgttcaagtcttcttgtcccaggcctgacgtgtacccagcgccagcggaggtgtcgggggcagcgatggaccgtccagacctgcctaacttgccagaggtcccagcgctttctgaacgaccccggccacctcctctggggtgatagaccagaagctcagcttggatctcaggcggactccaaacctctgcaacccctacccaatacggcacatagtatctctgatcgcctgcccgaagaaaaaatgcaaacacagggaagttccaatcaatag

SEQ ID NO: 203476 - DNA, 435 bp, synthetic construct
  misc_feature 1..435: note = Description of Artificial Sequence: Synthetic coding sequence
  source 1..435: mol_type = other DNA
atggccggccccgtgaaggaccgggaggccttccagcggctgaacttcctctatcaggccgcgcattgtgtgctcgcacaagaccctgagaatcaggccctggcaaggttctactgttataccgagcgtactatagcaaaacgcttggtgctgcgcagagacccttcagttaaacgcacactgtgtcgcggctgcagtagcctactggtgccaggattgacatgtacacacagacagaggagatgccgtggccagagatggaccgtgcaaacctgcctgacctgtcagcgaagccagagatttctgaatgaccccgggcacttactgtggggcgatcgtccggaggctcagcttggatctcaggccggcgagcgcttccagaccaccaccaccctggctaagcactcacccctacacttccgccctccttcctag

SEQ ID NO: 203477 - DNA, 534 bp, synthetic construct
  misc_feature 1..534: note = Description of Artificial Sequence: Synthetic coding sequence
  source 1..534: mol_type = other DNA
atggccggccccgtgaaggaccgggaggccttccagcggctgaactttctgtaccaggtgagtctgaggcaggggccacatggggatggggcgcgccgtccccgcgtaacggctcctctgccccaggctgcacattgcgtcctagcccaagacccggagaatcaggctttggcacgcttttactgctacacggagagaacaatcgctaaacggctagtgctgagacgagacccgagcgttaaacgcacactgtgccgcggctgttcatctctgcttgtgcccggcctcacgtgtacccaacggcagcggcgttgcaggggccagaggtggaccgtgcagacctgcttgacttgtcaacggagccagaggttcttaaatgaccccggacatctgctgtggggcgaccggcccgaggcgcagctgggttctcaggcggacagcaagcctcttcagcccctccccaacacagcacattcaataagtgatcggcttccggaggagaaaatgcagactcaaggctcgtccaatcaatag

SEQ ID NO: 203478 - DNA, 489 bp, synthetic construct
  misc_feature 1..489: note = Description of Artificial Sequence: Synthetic coding sequence
  source 1..489: mol_type = other DNA
atggccggccccgtgaaggaccgggaggccttccagcggctgaacttcctgtaccaggccgctcattgcgtcctcgcccaagatcctgagaatcaggcgctggccagattttattgctacaccgaacgcaccatcgccaagcggctggtgttgaggaggcccctgagctcctcagcacccagagatccgagcgtgaaacgaacactgtgccggggatgctcctccctccttgttcctggactaacatgcacacaccggcaaagaaggtgcaggggacaacgctggaccgttcagacctgtttgacctgtcagagaagccagcgctttttgaacgatcccgggcatcttctctggggtgatcgtcccgaggcgcagctggggagccaagcagattccaagcctctgcaacccctccccaatactgctcattccatttcagaccgtctcccagaagagaaaatgcagactcaaggatcctccaaccaatag

SEQ ID NO: 203479 - DNA, 534 bp, synthetic construct
  misc_feature 1..534: note = Description of Artificial Sequence: Synthetic coding sequence
  source 1..534: mol_type = other DNA
atggccggccccgtgaaggaccgggaggccttccagcggctgaacttcctgtatcaggtttcactgcggcagggaccacacggagatggcgcccggaggccaagagtgaccgcgcctctgccccaggctgcacactgtgtcctggctcaggaccctgagaatcaggcactggctcgattttactgttataccgagcgcacgatcgcaaagcggctggttcttcgccgcgatcccagcgtcaaaagaaccctgtgtcggggatgtagcagcctgctagtcccgggactgacttgcacccagaggcagcgccgctgtcggggccagcgttggacggtacagacttgtctgacatgtcagcgctcacaacggttcctcaacgaccctgggcacctcttgtggggagatagacccgaagcgcagctgggcagccaggcggacagcaaaccactacagcccctcccaaacacggcacattctattagtgatcgcctacccgaggaaaaaatgcagacgcaggggtcaagtaatcagtag

SEQ ID NO: 203480 - DNA, 489 bp, synthetic construct
  misc_feature 1..489: note = Description of Artificial Sequence: Synthetic coding sequence
  source 1..489: mol_type = other DNA
atggccggccccgtgaaggaccgggaggccttccagcggctgaactttctgtatcaagcggctcactgcgttttggcacaggatcctgagaatcaagctttagcccggttttactgttatacagaacggaccatcgcgaaacgattggtacttaggaggcctctgtctagctctgcaccgagggaccctagcgtgaaaaggacgttatgtcgggggtgcagcagtttgctggtccctggcctgacctgtacacaaaggcaacgacgatgtcgcggacagaggtggaccgtgcagacctgtctgacctgccagagatcccaacgatttttaaacgatcctgggcacctcctctggggtgatcggcccgaagcgcagttgggtagccaggctgattccaaaccccttcagccacttcccaataccgcacactccatctcggacaggctccccgaggaaaagatgcagactcaggggagttctaatcagtag

SEQ ID NO: 203481 - DNA, 465 bp, synthetic construct
  misc_feature 1..465: note = Description of Artificial Sequence: Synthetic coding sequence
  source 1..465: mol_type = other DNA
atggccggccccgtgaaggaccgggaggccttccagcggctgaactttctttaccaggccgcccactgtgtacttgctcaggacccagagaatcaggccctagctcgattctactgctacaccgagaggacaatagccaaaagacttgttctgagacgggacccgagcgtcaagagaacgctctgtaggggatgctcttctctgctcgtgcccggtctcacttgcactcatcgccaaagacgctgccgcggacagcggtggactgttcagacctgtctaacatgccaacggtctcagcggtttttaaacgatcctgggcacctgttgtggggtgatcggcctgaggctcagttggggtcacaggccgactccaaacctttacagcccctccccaacacggcccatagtatctctgatcgcctccccgaagagaaaatgcaaactcagggttcctccaaccagtag

SEQ ID NO: 203482 - DNA, 435 bp, synthetic construct
  misc_feature 1..435: note = Description of Artificial Sequence: Synthetic coding sequence
  source 1..435: mol_type = other DNA
atggccggccccgtgaaggaccgggaggccttccagcggctgaactttctataccaggccgcccattgtgtgctggcacaggatccagagaaccaagcattggccagattttattgttacacagagagaacaattgctaaaagactggtcctgcgaagagacccttccgtgaaacgaacactgtgccgaggatgttcatctcttctcgtcccgggcctgacttgcacacagagacagagacggtgccggggtcagagatggacagttcagacctgtttgacgtgtcaaaggtcccagagattcctcaatgatcccggccacttactgtggggcgaccgaccagaagcccagcttggatcccaagccggggaaaggtttcaaactacaaccactctggccaaacactccccactgcactttagacccccctcatag

SEQ ID NO: 203483 - DNA, 435 bp, synthetic construct
  misc_feature 1..435: note = Description of Artificial Sequence: Synthetic coding sequence
  source 1..435: mol_type = other DNA
atggccggccccgtgaaggaccgggaggccttccagcggctgaacttcctgtatcaggccgcccattgcgtgttagctcaagatcctgaaaatcaggccctggccagattttactgttataccgaacggaccattgcgaagagacttgtcctgagacgagacccaagtgtcaaacgtacactgtgcagaggatgttcatctctgttggtgccaggtctcacctgcacccagaggcaaagacggtgtaggggacagcgttggactgttcagacctgcctgacgtgccagcgcagtcagaggttcttaaatgaccccggtcacctgttgtggggcgatcgccctgaagctcagctgggaagtcaagccggcgagcgtttccagaccacaacaaccttagcaaagcattccccgctccatttccggcctccctcttag

SEQ ID NO: 203484 - DNA, 435 bp, synthetic construct
  misc_feature 1..435: note = Description of Artificial Sequence: Synthetic coding sequence
  source 1..435: mol_type = other DNA
atggccggccccgtgaaggaccgggaggccttccagcggctgaactttctctatcaggctgcccactgcgtactcgcccaggatcctgagaaccaggcgctcgcccggttttattgctacactgagcgtactatagctaagcgccttgtgctgagaagggacccatcagttaaacgtaccctttgtcgtggctgcagttcccttctggttccaggtctcacatgtacccaacgccagaggaggtgtaggggtcaaagatggacagtgcagacgtgtctgacatgtcagcggtctcagagattcctgaacgaccccggacatctgttgtggggcgatcgccctgaggctcagctggggtcccaagccggggagcgatttcaaactaccaccactctcgccaagcactcccctctgcattttcggcccccttcctag

SEQ ID NO: 203485 - DNA, 534 bp, synthetic construct
  misc_feature 1..534: note = Description of Artificial Sequence: Synthetic coding sequence
  source 1..534: mol_type = other DNA
atggccggccccgtgaaggaccgggaggccttccagcggctgaactttctctaccaggtgtccctgcgccaggggcctcatggcgacggcgctaggaggcccagggtcactgctccactcccccaagcagcccactgcgtcttggcccaggatcctgagaaccaggccctggccagattttactgctacacagagaggacgattgcgaagcgactggttctgcgcagagaccctagcgtgaagagaacactatgtcggggatgctcctccctgctggtgcctggacttacgtgtactcatagacagcggcgctgccggggacagcgttggactgtccaaacctgtcttacctgccagaggtctcagaggtttttgaatgatcccggccacctgctctggggagaccgcccagaagcccaactgggaagccaagcggacagcaagcccttgcagcctctcccgaacacagctcactcgattagcgaccggctcccggaggagaagatgcagacccaggggagctctaatcagtag

SEQ ID NO: 203486 - DNA, 435 bp, synthetic construct
  misc_feature 1..435: note = Description of Artificial Sequence: Synthetic coding sequence
  source 1..435: mol_type = other DNA
atggccggccccgtgaaggaccgggaggccttccagcggctgaacttcttgtaccaggcggctcactgtgtgctcgcgcaggatccagagaaccaggctctggccagattctattgttacactgaacggactatcgctaagcgcctggtgctgcggcgagacccctcagtgaagcggaccctgtgccggggctgcagctcattgttggtaccaggattgacctgcacacataggcagaggcggtgtagagggcaaaggtggaccgtacaaacctgtctcacctgccagcgatcccagaggttcctaaacgaccccggccatctactctggggagataggccagaggcacagctcggttcccaggcgggagaacggttccaaaccacaaccacattagccaagcactctcctctccactttagacccccttcatag

SEQ ID NO: 203487 - DNA, 465 bp, synthetic construct
  misc_feature 1..465: note = Description of Artificial Sequence: Synthetic coding sequence
  source 1..465: mol_type = other DNA
atggccggccccgtgaaggaccgggaggccttccagcggctgaactttctctaccaagccgcccactgtgtgttggcccaggatcctgaaaaccaagctctggccagattctactgttataccgaacgaaccattgccaagcgcctggtcttgcgtagagatcccagtgtaaagcggacactctgtcggggatgctccagcctgctggtgcctggtctcacttgcacccagaggcagcggcgatgtagaggccagagatggaccgtgcagacatgtcttacttgtcagaggagccagcggttcttgaacgaccctgggcatctgctctggggagacaggcccgaggctcagctggggtctcaggccgatagcaaacccctgcagccattaccaaataccgcacactcgatatctgacaggcttcctgaagagaagatgcagactcagggatcatcgaaccagtag

SEQ ID NO: 203488 - DNA, 534 bp, synthetic construct
  misc_feature 1..534: note = Description of Artificial Sequence: Synthetic coding sequence
  source 1..534: mol_type = other DNA
atggccggccccgtgaaggaccgggaggccttccagcggctgaacttcctctatcaggtgtctctgcgacaagggccacacggggacggtgctaggcgaccccgggttaccgctcccctgccacaggctgcacactgtgtgcttgcccaggatcctgaaaaccaggccctggcccggttttattgctacacagagaggactattgcgaagcggctggttctgagaagagatccttccgtgaagcgaaccttgtgtcggggctgtagcagcctcttagtgcctggcctaacctgtacccaccgccagcggcggtgtagaggccagagatggacagtccagacatgtctgacatgtcagaggtcccagaggttcttgaacgatccaggccatcttttatggggcgaccggcctgaagctcagctggggagccaggcagattccaaacccttgcaacctctgccaaatacagcacacagcatatctgacaggctccccgaagagaaaatgcagacccaggggagttcgaatcagtag

SEQ ID NO: 203489 - DNA, 489 bp, synthetic construct
  misc_feature 1..489: note = Description of Artificial Sequence: Synthetic coding sequence
  source 1..489: mol_type = other DNA
atggccggccccgtgaaggaccgggaggccttccagcggctgaactttctataccaagcagcccattgtgtcctcgcacaggatcctgaaaatcaggccttagctaggttctactgttatactgaacgtacaatcgccaaaagactcgtcctgcgccgccccctgtcttccagtgccccacgagatccaagcgtgaaaagaactctttgccgcggttgttcctccctcctggtgcctggcctgacttgtacacagcggcagcggagatgcagaggacagcgatggacggtacaaacctgtcttacatgtcagaggtctcagcgctttctgaacgaccccggtcacctgctgtggggcgataggcccgaagctcagctgggctcacaggccgacagtaagccactgcaacctctgccaaatactgcacacagtatctctgatcgactgcctgaagagaagatgcagactcaggggtcctccaatcagtag

SEQ ID NO: 203490 - DNA, 489 bp, synthetic construct
  misc_feature 1..489: note = Description of Artificial Sequence: Synthetic coding sequence
  source 1..489: mol_type = other DNA
atggccggccccgtgaaggaccgggaggccttccagcggctgaactttctctaccaggccgcccattgcgtattggcccaggacccggagaatcaagctctggcaaggttttactgttataccgagcgaaccattgccaagagactggtcttacgccgccccctctccagttcagctcctcgcgacccctccgtcaagagaacgctatgtcgaggctgctcaagcctgcttgtgcctggcctcacttgtacgcatcgacagcgccggtgcaggggtcagcggtggactgtgcagacttgcttaacatgccaaagaagccagaggttcttaaacgatccagggcacctgctgtggggagacagacccgaagcccagcttggctcccaggcagatagcaaacctttgcagccgctgcccaacactgcccacagcatttctgatcgtttgcctgaggaaaagatgcagactcagggatcttccaaccagtag

SEQ ID NO: 203491 - DNA, 765 bp, synthetic construct
  misc_feature 1..765: note = Description of Artificial Sequence: Synthetic coding sequence
  source 1..765: mol_type = other DNA
atggccgtgttcgccgacctggacctgcgggccggcagcgacctgaaagcccttcgcggacttgtggagaccgccgctcaccgtgaattgccacgcttgagggcctggccaacctcttgtcatccagaccacagggcgaccctgcgtattggctattctgtggtggctatcaaccacattgtcgactttaaggagaagaagcaggagatcgagaagcctgttgccgtgtctgagctgttcacaactcttcccatagttcaaggcaaatcccggccaattaagattctcacccggctcacgatcatcgtttcagacccgagtcattgtaatgtcttacgcgccacaagttctcgtgccaggctttacgacgtggtcgccgtcttcccaaaaacagagaaactcttccacattgcttgcacccaccttgatgtggacctggtgtgcatcactgttactgagaagctgccgttctacttcaaacgtcctccaattaacgtagcaatcgacagaggactggccttcgaattagtgtactcccctgcaatcaaggattcaaccatgaggcgttatactatctcttccgcactgaacttaatgcagatttgtaaagggaagaacgttatcatctcctcagccgccgagagacccttagaaattcggggcccttatgacgtggcaaatctgggacttctttttggcctgtccgaatccgacgccaaagccgctgtttcaacaaactgccgcgcggccctgctgcatggctag

SEQ ID NO: 203492 - DNA, 807 bp, synthetic construct
  misc_feature 1..807: note = Description of Artificial Sequence: Synthetic coding sequence
  source 1..807: mol_type = other DNA
atggccgtgttcgccgacctggacctgcgggccggcagcgacctgaaggctctgcgcggactcgtagagactgctgcacatttgggctactccgtggtggcaatcaatcatattgtggacttcaaagaaaagaagcaagagattgagaaacctgtggcagtgtctgaactcttcaccactctgcccatagtacagggcaaaagccggcccatcaaaatcttaacacgcctcactatcattgtttccgaccccagccattgcaatgtgctacgggcaacgagctcgagagcccgcctctacgatgtagtcgccgtgttccctaagacagaaaagctgtttcacatcgcatgcacccatctcgatgtcgatcttgtttgcataacagtcacagagaaactgcccttttattttaaacgacccccaatcaatgtggccatcgacaggggactcgcttttgagttggtgtacagtcccgccattaaggatagtacgatgaggaggtacaccatctctagcgctctgaacttaatgcagatttgtaagggcaagaatgtgattatcagctcagctgccgaacggccgttggagatccgggggccatacgatgtcgcaaacttgggccttctcttcggccttagcgaatctgacgcaaaggccgctgtcagcacaaactgcagggccgccctgctgcacggtgagacaaggaagacagcctttggaattatttcaacagtaaagaaacctcgaccctccgaaggcgatgaggattgtctacccgcatccaagaaagcaaaatgtgagggctag

SEQ ID NO: 203493 - DNA, 768 bp, synthetic construct
  misc_feature 1..768: note = Description of Artificial Sequence: Synthetic coding sequence
  source 1..768: mol_type = other DNA
atggccgtgttcgccgacctggacctgcgggccggcagcgacctgaaagctctgcgaggccttgtggagactgcggctcatcttggctattccgtggtcgccataaaccacatagtggacttcaaagagaagaaacaggaaattgagaagcctgtggccgtgtccgaattatttacaaccctacccattgtgcagggcaagagccggccaatcaagattttgaccaggctcaccatcatcgtgtcggatccctctcactgtaatgtattacgcgccacatcttctagagcacgattgtacgatgtggtggccgtcttccctaaaactgagaaactgtttcacatcgcgtgtacacacctcgatgttgacctcgtctgcattacagtgacggagaagttacccttctactttaagcgaccacctattaacgtggccatagatagaggcctagccttcgaactcgtctactctccagccatcaaggattcaaccatgagacgctacaccatatccagcgccctcaatctgatgcagatttgtaagggtaaacctctggagatcagaggaccctatgatgtcgccaacctgggtctgttattcggcctgagcgaaagcgacgcaaaagccgctgtcagcactaactgccgcgcagcgttactccacggagagactagaaagacggcctttgggataatttccacagtgaaaaagccacgaccaagtgagggggatgaggattgtctgcccgctagtaagaaagccaaatag

SEQ ID NO: 203494 - DNA, 969 bp, synthetic construct
  misc_feature 1..969: note = Description of Artificial Sequence: Synthetic coding sequence
  source 1..969: mol_type = other DNA
atggccgtgttcgccgacctggacctgcgggccggcagcgacctgaaggctttgcgcgggctggtggagaccgccgctcacttagggtattcagtagtagctatcaatcacatcgtcgactttaaagaaaagaaacaggaaatcgaaaaacctgtggcagtgtccgagctgttcaccactctcccaatagttcagggtaagtctcgccctattaaaattctaactaggctcactatcatcgtttccgacccttctcactgcaatgtacttcgcgcaacctctagcagggccaggctttacgacgtggtagcggttttccctaagacagaaaaactcttccatatagcatgcacacaccttgacgtggatctggtatgtataacagttacagagaaactgccattttactttaagcgcccccctattaatgtcgcaattgaccgcgggctggcattcgagctggtgtacagtcccgcaatcaaggacagtaccatgaggcgctacactatcagcagcgctttgaatctgatgcagatatgtaaaggcaaaaatgtgattatttcaagcgctgctgaacgtcccctcgagattagggggccatatgatgtggccaatctcggattgttattcgggctcagtgaaagtgacgcgaaagccgcggtgtctactaattgcagagcggccctgctccatggcgaaaccaggaaaaccgccttcggcataattagtactgttaagaagccccggccttctgagggagatgaagactgccttccagcgtccaagaaggctaagtggtcccacagcgtgacccaggccggcgtgcagtggcacaatctaggctccctgcagcctttgccactaggcctgaagcccagctcccatctcagcctgcccagaacccgaatccaacagagacaactcctcattagccaccagagggatcatacacccaaaaatcgattgtag

SEQ ID NO: 203495 - DNA, 639 bp, synthetic construct
  misc_feature 1..639: note = Description of Artificial Sequence: Synthetic coding sequence
  source 1..639: mol_type = other DNA
gagatcgagaagcccgtggccgtgagcgagctgttcaccaccctgcccatcgttcagggtaagtcacgaccaattaaaatcctcacgagactgaccatcatcgtgtccgacccttcccattgcaacgtcttgagagccacaagttctcgggctcgtttgtacgacgtggtggcggtattccctaagacagagaagctcttccacatcgcctgtacgcatctggatgtggacttggtctgcatcaccgttacagaaaaacttccattctactttaagagacccccgattaacgtggcgatagaccgtggtctagcctttgagttggtctatagtccagccattaaagactctacaatgaggcggtataccatatcctctgctcttaatctcatgcagatttgtaaaggtaagccactggaaatcaggggcccatacgacgtggcgaacctagggcttctctttggcctcagcgaaagcgacgctaaggctgcggtgtccaccaattgtagagcagcactgcttcatggggaaacccgtaaaaccgccttcggcattatctccacagtgaaaaaaccacggccctccgagggagacgaagactgtctgcccgcgtctaaaaaggctaaatgtgagggctag

SEQ ID NO: 203496 - DNA, 852 bp, synthetic construct
  misc_feature 1..852: note = Description of Artificial Sequence: Synthetic coding sequence
  source 1..852: mol_type = other DNA
atggccgccgccccccaggcccccggccggggcagcctgcggaagaccaggccactggtggtgaaaacctcccttaacaacccttatatcatccgatggagtgcgctggagtccgaggatatgcatttcatcctgcagaccctggaggatcggttgaaggcaatcgggttgcaaaagatcgaggacaaaaagaaaaagaacaaaacccccttcctcaaaaaggaatccagagaaaaatgctcaattgccgtggatattagcgaaaatctgaaggagaagaagacagatgccaaacagcaggtgtcaggttggactcctgcccacgtccgcaagcagctcgctatcggggtgaacgaggtaacgcgggctctggagcgccgcgaactgttgctagtcctggtgtgcaagtcggtaaaaccagcaatgattacgagtcacttgatacagctgagtttgagccgctccgtgcctgcttgtcaggtgccacgactgagcgaacgcattgctccagtgatagggctcaaatgtgtgctcgccctcgcttttaaaaaaaatactactgacttcgtagacgaagtgagagctatcatcccacgggtgcctagcctgagcgtgccctggttacaggaccgaattgaggacagcggcgaaaacctggaaacggagccattggagagtcaagatagggagctcctcgatacctcctttgaggatctgtctaaacccaaaagaaagctcgctgacggtagacaagcatccgtgaccctacaaccccttaagatcaaaaagctgattcccaatcctaataagattcgaaagcccccaaaatcaaagaaagcgacacctaaatag

SEQ ID NO: 203497 - DNA, 504 bp, synthetic construct
  misc_feature 1..504: note = Description of Artificial Sequence: Synthetic coding sequence
  source 1..504: mol_type = other DNA
atggccgccgccccccaggcccccggccggggcagcctgcggaagaccaggcctctggtggttaaaacttctttaaacaatccctatatcattcgatggtcagctcttgagagtgaggacatgcatttcatactccagaccttggaagatcgcctcaaagcaataggactccagaaaattgaggataagaagaagaaaaataaaactccctttctcaagaaggagagtagagagaagtgtagcatcgctgtggatattagcgagaatctgaaggagaagaagacagacgcaaagcagcaagtgagcgggtggacgccagcccatgtcaggaagcagttggccattggcgttaacgaggttacccgcgcactcgaacggcgtgagttgctcctggtcctggtgctgactcttctgcctcgtttagagtgctcaggggtgatccccgcccactgcaatccggcttcatgggttcaggccatcttactgccccagccccctgaatag

SEQ ID NO: 203498 - DNA, 852 bp, synthetic construct
  misc_feature 1..852: note = Description of Artificial Sequence: Synthetic coding sequence
  source 1..852: mol_type = other DNA
atggccgccgccccccaggcccccggccggggcagcctgcggaagacccggcctctggtcgtgaagacaagtttgaacaatccttatattatacgctggtcagccctggagtcagaggatatgcactttatccttcagacactcgaggatcggttgaaggccattgggctccagaaaatcgaagataagaagaagaaaaacaagactcccttccttaagaaagaatctagagagaagtgcagcattgctgttgatatatctgagaatcttaaagaaaaaaaaaccgacgctaagcagcaggtctcaggctggacaccggcacacgttcgtaagcagctggccatcggcgttaatgaagttacacgtgctcttgagcgtagagagctgctgctggtgctcgtctgcaagtcagtgaagcctgctatgattacttcccatcttattcagctctctctgagtcgctctgttccggcatgccaagttccgcgattgagtgaaagaatcgctccggtgatcggcctgaagtgtgttttggctttagctttcaagaagaatacgactgacttcgtcgatgaagtccgcgccattatccccagggtcccttccctttctgtaccgtggctgcaggaccgaatcgaggattctggagagaatctggaaacagagccgctggagtcacaggacagggagcttctggacacaagctttgaggacctcagcaagccaaagcggaaactcgccgacggccgacaggctagtgtgaccctgcagccactcaaaatcaagaaattgattccaaaccctaataagattcgcaagcccccgaagtctaagaaagccaccccaaaatag

SEQ ID NO: 203499 - DNA, 852 bp, synthetic construct
  misc_feature 1..852: note = Description of Artificial Sequence: Synthetic coding sequence
  source 1..852: mol_type = other DNA
atggccgccgccccccaggcccccggccggggcagcctgcggaagacgcggccattggttgttaaaacctccctgaataacccctatattatcaggtggagtgccctggagagtgaagatatgcacttcatcttacagactctggaagaccggttgaaagcgataggcctgcagaagatagaagataaaaaaaagaaaaataaaacacccttccttaaaaaggagagccgcgagaaatgtagcatcgctgttgatatctccgagaacctcaaggaaaagaaaactgatgcaaaacagcaggtaagcggctggacaccagcccatgtgagaaagcagctggccatcggagtcaatgaagtgacaagggccctcgaacgcagagagcttttacttgtgctagtgtgcaagtccgtcaagcccgcaatgattacatcacatttgatccagctgagcctgagtcggagcgtgcccgcctgtcaggtaccacgcttgtcagagcgtatcgcgccagtgattggcctgaaatgcgtgctcgctttggcttttaaaaaaaacaccaccgactttgtcgacgaggtcagggctattatccctcgggtgcccagcctctctgttccttggctacaggaccggatcgaggactcgggcgagaaccttgagactgagcctttggagtcccaggacagagagttgctcgatacttcattcgaggacctgagtaaacctaagcgcaaactggccgatgggcgtcaggctagcgtcaccctgcaacctttgaagattaaaaaactgatcccaaacccaaataaaattcggaaaccccccaaatcgaagaaggcaacccctaagtag

SEQ ID NO: 203500 - DNA, 510 bp, synthetic construct
  misc_feature 1..510: note = Description of Artificial Sequence: Synthetic coding sequence
  source 1..510: mol_type = other DNA
atggccgccgccccccaggcccccggccggggcagcctgcggaagacccggcccttggtcgtgaagacaagccttaataacccttacatcatccgctggtccgctcttgaaagcgaggacatgcattttattctgcagaccctggaagatcgtcttaaggcaattggattgcagaagatcgaagacaaaaaaaagaaaaacaagaccccattcctgaaaaaggaatcccgcgaaaagtgctccattgccgtagatatttcagagaatctgaaggaaaaaaagaccgatgcgaagcagcaggtcagtggatggactccggctcatgtacgcaaacagctagctataggcgtcaacgaagtcacgcgcgcactggagcgcagggaactgctccttgtactggtatgcaagtcagtaaagccagcaatgatcaccagtcatttgatccaactgtccttgtcccgctcagttcccgcttgccaagttccacggctgtctgagagaattgcctag

SEQ ID NO: 203501 - DNA, 1092 bp, synthetic construct
  misc_feature 1..1092: note = Description of Artificial Sequence: Synthetic coding sequence
  source 1..1092: mol_type = other DNA
atggccaccctgcggcggctgcgggaggccccccggcacctgctggtgtgtgagaaatcgaacttcggcaaccacaagtcacgccatcgccacctggtccaaacacattactacaactatagggtctctttcctcattcctgaatgcggaatcttgtccgaagaactcaaaaacctggtgatgaacacgggtccttactatttcgtcaaaaatctaccgcttcatgaactcataactccggagttcatttctaccttcattaagaaaggatcctgttatgcgttgacctacaacacgcacattgacgaagacaataccgttgcgttgctccctaacggcaagctcatactgtctttagacaaagatacgtatgaggaaactggcctgcagggccacccaagccagtttagcggtcgaaagattatgaaattcatagtttccattgatctgatggagctgagtctgaacctcgacagtaagaaatacgaacgaatctcatggtcttttaaggagaagaaaccgctgaagttcgatttcctgctggcttggcataagaccgggtctgaagaatccacgatgatgagctactttagcaagtaccagatccaggagcaccagccaaaggtagccctttctaccttacgggatctccagtgcccggtgttacaatcctctgagttggagggtactcccgaggtcagttgccgagccctggaattgttcgattggctgggggctgtgtttagtaatgttgacctgaataatgaaccgaataattttatctccacatattgttgccctgaaccatctaccgttgtagcgaaggcctacttgtgtaccattactggtttcatcctcccggagaagatctgccttctgctcgaacacctgtgtcattattttgacgagccaaaactcgccccctgggtgactctcagcgtccaaggctttgccgatagcccagtgtcctgggaaaagaatgagcacggattcagaaaaggaggggagcatctctacaattttgtgatcttcaataaccaggattactggcttcagatggcagttggagccaatgaccattgtcctccgtag

SEQ ID NO: 203502 - DNA, 912 bp, synthetic construct
  misc_feature 1..912: note = Description of Artificial Sequence: Synthetic coding sequence
  source 1..912: mol_type = other DNA
atgaacaccggcccctactacttcgtgaagaacctgcccctgcacgaactgatcactccagaatttatctcaacatttataaaaaagggcagctgttacgcgctgacttataatacccatatcgacgaggataacacagttgcgctgctgcctaatggaaaactgatactgtccctggataaggatacctacgaggagaccggcttgcagggacatcctagtcagtttagcggccgcaagattatgaagttcatagttagtattgacctgatggagctaagtttaaacctcgatagcaagaaatacgagagaattagctggagctttaaggagaaaaaacccctgaaatttgacttcctgctggcatggcataaaaccgggagcgaggagagtacgatgatgagctactttagcaagtatcagatccaggaacatcagcctaaggttgctttatctacattgagagacttgcagtgtcccgtcctacagagtagcgaactggaaggcactccagaagtttcttgcagagctcttgaactgtttgattggctgggagctgtgttcagcaatgtcgacctcaataatgagcccaacaatttcatttctacctactgttgtccggagccctcgaccgtcgtggccaaggcatacttgtgcactatcactggattcattttacccgaaaagatttgcttgctcctcgagcacctgtgtcattactttgacgagcctaagctggctccgtgggtgaccttgagtgttcagggattcgccgactcccccgtcagctgggagaaaaatgagcatggatttaggaagggaggagagcatctctacaacttcgtaatttttaacaaccaggactactggctgcagatggctgtcggagccaatgaccactgtccgccttag

SEQ ID NO: 203503 - DNA, 717 bp, synthetic construct
  misc_feature 1..717: note = Description of Artificial Sequence: Synthetic coding sequence
  source 1..717: mol_type = other DNA
atgcggcccgccgccctgcggggcgccctgctgggctgcctgtgcctggccctcctgtgcctgggtggcgccgacaaacgattgcgcgacaaccatgagtggaagaagctgatcatggtacaacactggccagagactgtatgcgagaagattcaaaatgattgtagggaccctcctgattactggaccattcacggactatggcctgacaagtctgaaggatgcaatcgtagctggcccttcaaccttgaggagatcaagaagaattggatggagatcaccgacagctccctgccctccccctctatgggacctgcaccacccaggtggatgcgctctactccccgacgctcaacgctcgccgaggcttggaattcaactggctcctggacatcaacaggaggatgcgctttaccacctgcagctctcccctctggcgatctttgttgccgcccatcattaactgccggatcacgaggagtcggagtggatctcacagcgctgcaacaattacttcacgttcactatagtgccacagggattatcccagaggaatgctcagagcctaccaaaccattccagattatcctacaccatgatcacacggaatgggtgcaaagtattggcatgcccatttggacaatttccagtagtgagtctgctatcggaaaaacacgaacccagcctgcttgtgctgtcttgtcgcatgattcttag

SEQ ID NO: 203504 - DNA, 624 bp, synthetic construct
  misc_feature 1..624: note = Description of Artificial Sequence: Synthetic coding sequence
  source 1..624: mol_type = other DNA
atgcggcccgccgccctgcggggcgccctgctgggctgcctgtgccttgcactcctatgcctagggggcgctgataaaagacttagagacaaccatgagtggaagaaactgatcatggtgcagcactggcccgaaactgtgtgtgagaagatacagaacgattgtagggatccaccagattactggaccatccacggactctggcccgacaagtctgaagggtgtaatcggagctggccgtttaacctggaggaaatcaagaaaaactggatggagataacggattcttcgctgccatccccctccacagacctcctgccagaaatgcgggcatactggccagatgtcattcacagttttccaaatcgaagcagattctgtggaacatgtgccgctcaagtagacgccttgaatagtcagaaaaaatattttgggcgatcactggagctttacagagaattggacctcaaccgctgggtgcggccaagtcctgggtgtaccagtcagtgggggtccctgctgagccctaagcctgatagctggattcagggaagtggctgtcgacctcactgccccccagccgccagcgcttgtgctctcttcggatactgggaccatagctag

SEQ ID NO: 203505 - DNA, 921 bp, synthetic construct
  misc_feature 1..921: note = Description of Artificial Sequence: Synthetic coding sequence
  source 1..921: mol_type = other DNA
atgcggcccgccgccctgcggggcgccctgctgggctgcctgtgcctggccctgctctgcctggggggtgctgataaacggttgcgcgacaaccatgagtggaaaaaactgattatggtccagcactggcctgaaacagtgtgcgagaagattcagaatgattgccgtgatccgccagactactggacaattcacggcctctggcaagttagccatacctcccggcgaggtctcttattccttttcaaaaatatcttctctctgagctctcgcaattttagcttctattcgctgcagacaagtatgaaaaaacctccacagccctctttgatcttcctgatttttagcttcaagcccgataaatctgaaggttgcaatagaagttggccttttaaccttgaagagatcaaggatctcttgcctgaaatgagggcatactggcctgacgtcatacactccttcccaaatcgatctcgtttctggaaacacgagtgggagaagcatggcacgtgcgctgcccaggttgatgccctcaacagtcagaagaaatacttcgggcgttcactggagctgtatcgagagctggacctgaattccgtgctactgaagctggggattaaaccaagtattaactactaccaagtggccgactttaaagatgcacttgcccgtgtgtacggcgtgatcccaaaaatccaatgtctgcctccatctcaggacgaggaggtgcaaacaatcggccaaatcgaactgtgcctgaccaaacaggatcagcagcttcaaaattgtacggagcccggcgagcaacccagtccgaagcaggaagtttggttggcaaacggagctgctgaaagtcgagggctgcgagtgtgcgaggacgggccggtgttctacccacccccgaaaaagacaaaacactag

SEQ ID NO: 203506 - DNA, 771 bp, synthetic construct
  misc_feature 1..771: note = Description of Artificial Sequence: Synthetic coding sequence
  source 1..771: mol_type = other DNA
atgcggcccgccgccctgcggggcgccctgctgggctgcctgtgcttggccttgctgtgtcttgggggtgctgataaaagactgcgcgacaatcacgaatggaaaaagttaatcatggtccagcactggcccgaaacggtgtgtgagaagatccaaaacgattgtagggatccccccgattactggactatacacggattgtggccggacaagtccgaaggctgtaacaggtcctggccgtttaacctcgaggagatcaaagatctcttgccagaaatgagagcatactggcccgatgtgatccattcatttcctaacagaagtcgtttctggaaacacgagtgggaaaagcatgggacctgcgcagcccaggttgatgctctcaatagtcaaaaaaagtactttggccgaagcctagagctttatagggaactggaccttaactcggtgctgctgaagcttggaatcaagccctccataaattactaccaggtcgccgactttaaggacgccctggctcgtgtgtacggagttatccccaagatccagtgcctccccccttcccaggatgaagaggtccagaccataggacaaatcgagctttgtcttacaaaacaggaccaacagctgcagaactgcactgagcctggagagcagccgtccccaaaacaggaagtgtggctggccaatggtgccgcagaatctaggggacttagagtgtgtgaagatggacccgtgttctatcctccaccgaagaagacaaagcattag

SEQ ID NO: 203507 - DNA, 765 bp, synthetic construct
  misc_feature 1..765: note = Description of Artificial Sequence: Synthetic coding sequence
  source 1..765: mol_type = other DNA
atgcggcccgccgccctgcggggcgccctgctgggctgcctgtgcctggctctgttgtgtctcggaggcgccgataagcggcttcgtgataatcacgaatggaagaagctaattatggttcagcattggccggagaccgtgtgcgagaaaattcaaaacgattgtagagatccccctgactactggactatccacgggctttggcccgataaatccgaaggttgtaacaggtcatggccgtttaacctggaagaaataaaagacctgttaccagagatgagagcttattggccagacgttattcattcttttcccaaccgatcgcgcttctggaaacatgagtgggagaaacacggcacatgcgcggctcaggttgatgccctaaatagccagaaaaagtacttcggccgtagcctggagctgtatcgggagcttgacctaaactcagtgctcctcaagctgggtatcaaacccagcatcaattactatcaggtcgccgactttaaggatgccctagccagggtctacggcgtgatcccaaagatccagtgtctgccgccttcccaggatgaggaagttcagacgatcggacagattgaactgtgcctgacaaaacaagaccaacaactgcagaattgtacagagccgggcgaacagccatcccctaagcaagaggtgtggttggcaaacggggcagcagagtcccgggggctgagagtgtgcgaggacgggcccgttttctaccctcctcccaagaagacttag

SEQ ID NO: 203508 - DNA, 771 bp, synthetic construct
  misc_feature 1..771: note = Description of Artificial Sequence: Synthetic coding sequence
  source 1..771: mol_type = other DNA
atgcggcccgccgccctgcggggcgccctgctgggctgcctgtgccttgctctgctttgtctgggtggggcagacaaaaggttgcgcgataaccacgaatggaaaaaactaataatggtacagcactggccagagactgtctgcgaaaagatccagaacgactgtcgtgatcctcctgattactggaccatccacggtctgtggcccgataagtctgagggctgtaaccgttcttggccctttaacctggaggagattaaggacctcttgccagaaatgagagcctattggccggatgttattcactcattccccaatagaagcagattttggaagcatgaatgggagaaacacggtacgtgcgcggctcaggtcgatgcattaaactcccaaaagaaatacttcggccgttcactcgagttgtaccgggagttagacttaaattctgtcctgctgaagctcggcattaaacccagcattaattactatcaggtggctgattttaaggacgcattagcacgggtctacggggtgatccctaagattcaatgcctaccgccctctcaggatgaagaagttcagaccatcggtcagatcgagctttgcttgaccaaacaagatcagcagcttcagaattgcacagagccgggcgaacaaccgagccccaagcaagaggtctggttggcaaatggagccgctgagtcccgcggattgagggtgtgcgaggacggccccgtgttttacccccccccaaagaaaacaaagcactag

SEQ ID NO: 203509 - DNA, 471 bp, synthetic construct
  misc_feature 1..471: note = Description of Artificial Sequence: Synthetic coding sequence
  source 1..471: mol_type = other DNA
atggccctggagaagagcctggtgcggctgctgctgctggtgctgatcctgctggtcctcggctgggtccagccctcactggggaaggaaagtcgggccaagaagtttcaacgccagcatatggactctgacagcagtcccagcagttcttcgacgtactgtaaccaaatgatgcggagaaggaatatgacacaaggccggtgtaaaccagttaacacgttcgtccatgagcctctggtggacgtccagaacgtttgtttccaggaaaaagtcacttgtaaaaacggacagggcaactgctacaagtccaacagttccatgcatatcaccgactgtcgactaacaaatggttctagataccctaattgcgcttacagaacctcacccaaggaacgccacatcatcgtagcctgcgaagggtccccttatgtgccggtccacttcgacgcttccgtcgaagattccacttag

SEQ ID NO: 203510 - DNA, 471 bp, synthetic construct
  misc_feature 1..471: note = Description of Artificial Sequence: Synthetic coding sequence
  source 1..471: mol_type = other DNA
atggccctggagaagagcctggtgcggctgctgctgctggtgctgatcctgctggtcttggggtgggtacaaccatctctgggtaaagagagccgcgccaagaaatttcagcgccagcacatggacagcgatagtagtcctagttcctcgagtacgtactgcaaccagatgatgcggcgcaggaatatgactcaagggcggtgtaagcccgtgaacacctttgtccatgagcctcttgtggacgtccaaaacgtttgctttcaagaaaaggttacttgcaaaaacggccagggcaactgttacaagtctaactcatcaatgcacattacagattgtcgcctgacgaatggaagcagatacccaaactgtgcatacagaactagtcctaaggagcgtcacatcatagtggcgtgcgagggctccccatacgtgccggtccacttcgatgcctccgttgaagattccacctag

SEQ ID NO: 203511 - DNA, 471 bp, synthetic construct
  misc_feature 1..471: note = Description of Artificial Sequence: Synthetic coding sequence
  source 1..471: mol_type = other DNA
atggccctggagaagagcctggtgcggctgctgctgctggtgctgattttactggtgctgggctgggtgcagccaagtctgggcaaagaatctagggctaaaaaattccagaggcagcatatggattccgatagctctccctcctctagcagcacatactgcaatcagatgatgcggaggcgaaacatgactcaggggcgctgcaagcccgtgaacacgttcgtgcatgaacccctggtcgatgtgcaaaacgtctgtttccaggagaaggtgacttgcaaaaacggccagggtaactgttataagagtaactcttccatgcacattaccgactgtcggctgacaaatggctcccggtatccgaactgcgcttaccggactagccccaaagagcggcacatcatcgttgcctgcgaaggctccccgtacgtgcctgtgcacttcgatgcttccgtggaagactctacttag

SEQ ID NO: 203512 - DNA, 471 bp, synthetic construct
  misc_feature 1..471: note = Description of Artificial Sequence: Synthetic coding sequence
  source 1..471: mol_type = other DNA
atggccctggagaagagcctggtgcggctgctgctgctggtgctgatccttcttgtgctggggtgggtgcagccaagcctgggcaaagagtctcgagcgaagaagtttcagcgccaacatatggatagcgactcttcaccctcttcttcttctacatactgtaaccaaatgatgcggcggagaaacatgacacagggaagatgcaaaccagttaacacattcgtgcatgagcccctggtcgacgttcagaatgtttgtttccaggagaaggtgacgtgcaaaaacggacagggcaattgttacaaaagtaacagctcaatgcacataaccgactgtagactgaccaacggatccaggtacccaaactgcgcttataggacgagccccaaagagcggcacatcatcgtcgcgtgcgaaggaagcccttatgtacccgtgcacttcgacgcttccgttgaggactcaacatag

SEQ ID NO: 203513 - DNA, 486 bp, synthetic construct
  misc_feature 1..486: note = Description of Artificial Sequence: Synthetic coding sequence
  source 1..486: mol_type = other DNA
atggtgcccaagctgttcaccagccagatctgcctgctgctgctgctggggctgctcgccgtggaagggagcctacacgttaagcctccccagttcacttgggctcaatggttcgaaactcaacacataaatatgacttcccaacagtgtaccaatgccatgcaggtgattaacaattaccaacgcagatgtaaaaatcaaaatacattcctgctgacaacctttgccaacgtggtaaatgtgtgtgggaatccaaacatgacatgtccatctaataagacacggaaaaattgccaccattcaggaagccaggtcccactaatacactgtaacctgactacaccttcaccccagaacatatctaattgccgttacgctcagacacccgcaaacatgttttacattgtggcttgtgacaacagggatcagaggagagaccccccccaataccccgtggtgcccgtgcatctcgatcggatcatttag

SEQ ID NO: 203514 - DNA, 483 bp, synthetic construct
  misc_feature 1..483: note = Description of Artificial Sequence: Synthetic coding sequence
  source 1..483: mol_type = other DNA
atggtgcccaagctgttcaccagccagatctgcctgctgctgctgctgggactgatgggggtagaaggcagtctccatgcacgccccccacagtttacaagagcacaatggttcgcaattcagcatatcagcctgaaccctccgcgatgcactattgccatgagggccatcaataattacaggtggaggtgcaagaatcagaacacattcttgcgcaccactttcgccaatgtggtcaacgtctgtggaaaccagagcatcaggtgccctcacaatcggacactgaacaactgccatcggagcagattcagggttcctttgctacattgtgacctgatcaatccgggggctcaaaatatctcaaactgcacttatgcagataggcctggaaggcgattttacgtcgttgcttgtgataacagagatcctcgtgacagccctcgctatcccgtggttcctgtacaccttgacaccacaatttag

SEQ ID NO: 203515 - DNA, 444 bp, synthetic construct
  misc_feature 1..444: note = Description of Artificial Sequence: Synthetic coding sequence
  source 1..444: mol_type = other DNA
atggccctgcagcggacccacagcctgctgctgctgctgctgctgaccctgctaggtctaggcttggtacagcctagctacgggcaggacggcatgtaccagagatttttaagacagcacgtgcaccccgaagagacaggcggctcggacagatattgcaacttaatgatgcagcgccgcaaaatgacactgtatcactgtaagcggtttaacacatttatacacgaagacatctggaacatacgcagcatttgcagtaccaccaacattcaatgtaaaaatggcaagatgaattgccacgagggtgttgtcaaggtgaccgattgccgggatacgggctccagcagggcacctaactgccgataccgggccattgccagcacccgccgggtggtgatagcctgtgaaggaaacccacaggtgcctgtccatttcgacggttag

SEQ ID NO: 203516 - DNA, 444 bp, synthetic construct
  misc_feature 1..444: note = Description of Artificial Sequence: Synthetic coding sequence
  source 1..444: mol_type = other DNA
atggccctgcagcggacccacagcctgctgctgctgctgctgctgacattgttggggctgggcctcgtgcagccgtcatatggtcaggacgggatgtatcaaagatttcttaggcaacacgtacaccctgaagaaaccggcggaagtgaccgttattgcaacctcatgatgcagcgcaggaagatgaccctgtatcactgcaagagatttaatacgttcattcacgaggatatttggaatatccgctcaatttgctctacaaccaatatccagtgcaagaatgggaagatgaattgtcatgagggggtggtcaaggtcacagattgccgagatacagggtcttcccgcgctcccaattgccggtaccgtgccattgcaagcacccgacgggtggttattgcatgtgagggcaaccctcaagtgccagtgcattttgacggctag

SEQ ID NO: 203517 - DNA, 444 bp, synthetic construct
  misc_feature 1..444: note = Description of Artificial Sequence: Synthetic coding sequence
  source 1..444: mol_type = other DNA
atggccctgcagcggacccacagcctgctgctgctgctgctgctgacattgctgggtctgggcttggtgcagcctagctatggacaggacggcatgtatcagagattcctcaggcaacatgtgcatcccgaggaaactggaggcagtgatcgatattgtaacctcatgatgcagcgccgaaagatgacgctctaccactgcaaacggtttaatactttcatccacgaagatatctggaatattagatccatctgttctacaaccaacatccaatgcaaaaacgggaaaatgaactgtcatgagggtgtcgttaaggtcacagattgccgtgacacaggttcctcccgcgcccccaactgccgatatcgggctatcgcaagcaccagacgcgttgtaattgcatgtgagggcaacccccaggtgcctgtacacttcgacggatag

SEQ ID NO: 203518 - DNA, 465 bp, synthetic construct
  misc_feature 1..465: note = Description of Artificial Sequence: Synthetic coding sequence
  source 1..465: mol_type = other DNA
atggcccccgcccgggccggctgctgccccctgctgctgctgctgcttggcctgtgggttgccgaggtgctcgttcgagcaaagcctaaagacatgacatcttctcaatggttcaaaacacagcatgtgcagcccagtccccaggcttgtaactcagcgatgtctatcataaacaaatatacggagagatgcaaagacttgaacacgtttcttcacgagcccttcagttcggtggctatcacttgtcagacaccaaacatcgcctgcaaaaactcctgtaagaattgtcaccaaagccatgggccaatgagcctaaccatgggtgaacttactagcgggaagtatcctaactgccgctataaggagaagcacctgaatacaccctacattgtggcatgcgacccaccacagcagggagacccagggtacccactggtccctgtacacttggacaaggtagtgtag

SEQ ID NO: 203519 - DNA, 453 bp, synthetic construct
  misc_feature 1..453: note = Description of Artificial Sequence: Synthetic coding sequence
  source 1..453: mol_type = other DNA
atggtgctgtgcttccccctgctgctgctgctgctggtgctgtggggacccgtgtgccccctgcacgcatggcccaagaggctgactaaggcacactggtttgaaatccaacacatccaacccagtccccttcagtgtaaccgcgcaatgtccgggattaacaactacacccaacactgtaaacaccagaacacttttttgcacgatagtttccagaatgtggcagcagtgtgcgatctgctgtcgatcgtgtgcaaaaatcggcgacacaactgccatcagtcctccaagcctgtcaatatgacagactgcagactgacttctgggaagtatcctcagtgcaggtattctgctgcagcccagtacaaattttttattgtggcgtgcgaccccccccaaaaatcggatcccccatacaagctggtcccggtccaccttgacagcatcctgtag

SEQ ID NO: 203520 - DNA, 2271 bp, synthetic construct
  misc_feature 1..2271: note = Description of Artificial Sequence: Synthetic coding sequence
  source 1..2271: mol_type = other DNA
atgcccctgcggcccggcagcctggtgcccgagggcgccggcttccccaagatggcagccgatgtatcagtcacccacaggccaccactgtcccccaagtcaggcgcagaggtagaagcaggagacgccgccgagagacgagcccccgaagaagaattgcctccactggacccagaggagataagaaaaagactagagcacacggagaggcagtttcgaaaccgaagaaagattctgatccgtggattgccgggggatgtgacaaatcaggaggtgcatgacctcctttccgactatgaactcaagtactgtttcgtggacaagtacaagggtaccgccttcgtcaccctgttgaatggagaacaggctgaggcagccatcaatgccttccatcaatcccgcctgcgcgagagggaactctctgtgcagctgcaacccacggatgcccttctctgtgtcgccaatctgccccctagcctaactcaacaacagtttgaagagttggtccgcccctttggctcccttgagaggtgctttcttgtgtacagtgagaggaccggccagtccaagggttacggcttcgctgagtatatgaagaaggatagcgccgctagagcaaaatccgatttactcgggaaaccactcggccctcggacgctgtatgtgcactggaccgatgccggccagttgacccccgccctgctgcattcaagatgcctttgcgtagatcggctgccgccagggtttaacgacgttgatgccctatgccgagctctcagtgcagtacacagcccaaccttttgtcagctggcctgtggtcaggacggacagctgaagggttttgccgtactggaatacgaaaccgcggaaatggcagaagaggcccaacagcaggcagatggcttgtccctggggggtagccacctgagggtgtccttctgcgccccagggcctccgggccggagcatgctagcggccctgatagcggcgcaggccacggctttgaacaggggtaagggactccttccggaacctaacattctccagctgcttaataacttgggaccctccgcgtctttgcagttactgctaaatcccctgctgcacggctctgccggcgggaagcagggccttcttggggccccacccgctatgccactgctgaacggccccgctttgagcaccgcgcttctccagctggccttgcagacacaagggcaaaagaagcctggcatactgggcgatagccctctgggcgccttacaacctggggcacagcccgccaacccactgctgggggaattgccagcgggaggcggtctgcctcctgagctaccccctcgacgggggaagcctccacctctgctgccttcagtgctcggcccggcggggggcgaccgcgaggcacttggcttgggaccccctgccgcacagttgactcctccaccggcccctgtaggcctgcggggctccggactccgcggactgcagaaagatagcggcccgcttcctacacccccaggggtgtctctgttaggagagccccccaaggactatagaatccctcttaatccatatctgaaccttcactccctgctccccgccagtaacctcgctggtaaggaagcgcgcgggtggggcggggccggaaggagccgaagacccgccgagggccctccaactaaccctccagcccccgggggcgggtcctcatctagcaaggcctttcagctaaagtctaggctactttctcctttgtccagcgcaagactcccccccgaacccggcctgtccgattcctatagcttcgactaccccagtgacatgggacctagacgcctcttcagtcaccctcgagaaccggccctgggtccacacggccctagccggcacaaaatgagcccccctccaagtggcttcggcgagcgtagctctggcggatcgggaggcgggcctctgtcgcacttctatagcggaagccccacctcctactttacgagtggtttacaagccgggctgaagcagagtcacctgagcaaagctataggctcttcacccttgggctctggggaaggactcctgggcctgagcccaggtcctaatgggcatagccacctgttaaagacgccactggggggccagaaacgttcatttgctcatcttctgccatctcctgaacctagccctgagggatcctacgttggtcaacactcccaggggctgggcggccactatgcagatagctatctcaagcgcaagagaattttctag

SEQ ID NO: 203521 - DNA, 1821 bp, synthetic construct
  misc_feature 1..1821: note = Description of Artificial Sequence: Synthetic coding sequence
  source 1..1821: mol_type = other DNA
atggccgccgacgtgagcgtgacccaccggccccccctgagccccaagtcgggagctgaggtcgaggctggggatgctgctgagcggagagctccagaggaggagttgccccctcttgatccagaagaaatccggaagagactggaacataccgaaagacaatttcgcaacagaagaaaaattctcatacgaggactaccgggagatgtcactaatcaagaggtgcacgatctgctgtctgactatgaattgaaatactgttttgtagataaatacaaggggactgcctttgttactctcctgaacggggaacaagctgaagccgccatcaatgcgtttcaccaatctagactgcgggagagagagttgagcgtgcagctacagcccaccgatgctctcctctgtgtagcgaatctgcctccctcactgactcaacagcaattcgaggagctggttcggcccttcggatccctggaaagatgctttttagtttacagtgagaggactggccaatccaaggggtatggttttgccgagtatatgaaaaaggattctgcggccagggctaagtccgacctgcttggcaagcctctgggcccaagaaccctctatgtccactggactgatgctggccaactgacacctgctttgctccattctagatgcttatgtgtggaccgactcccacccggtttcaacgacgtggatgcgctctgcagagctttaagtgctgtgcacagcccaacgttttgccagctcgcttgtggtcaagacggccagctgaaaggttttgccgtcctagaatatgagacagcggagatggctgaggaggcgcagcagcaggccgacggactctcactgggcggcagccatctgagggtttcattctgcgcaccaggcccaccagggaggagtatgctagcggcgctgattgctgcccaggccaccgctctgaataggggcaaagggcttttacccgagcctaacattctgcaactgctgaacaacttagggccgtcagcctcactgcagcttctcttaaatccgctcctgcacggaagcgccggcgggaaacaagggctgctgggtgcacccccagccatgccacttctgaacggcccggcgttgtctacagcactacttcagctggcactgcaaacgcagggccaaaaaaagcctggtatcctgggcgattctccgttgggggcattgcagcccggcgcgcagccagccaaccccctgctgggcgagctgcccgcggggggtggcctgcctcctgagttgcctccccgccgcgggaagcccccacccctgcttccatctgtccttggccctgctggcggcgatcgcgaggcactgggcctaggaccgcctgccgcccaattgaccccgcctccagcccccgtgggtttgaggggtagtgggcttcgcggtcctttgagtcacttctacagcggaagcccaacctcatactttaccagtggactgcaggccggcctgaagcagtctcacctgtctaaagctataggctcaagtcccctgggctctggagagggcctgctgggcttgtctccaggccccaacggacactctcacctgttaaaggtgagagcagggggcggcgacatgcagggatgggaggctccagctccccagcgaccgctgacgcgacccgcattaccgtccgtgagcaggcctcattgggccgcaaggaacgctgcgctgcctacctgttgcccacgcccatcccctgcccagaaagccgcaatgtgggcatcgacccctcgtgctagcgccgctactacacgcacacctacttag

SEQ ID NO: 203522 - DNA, 2076 bp, synthetic construct
  misc_feature 1..2076: note = Description of Artificial Sequence: Synthetic coding sequence
  source 1..2076: mol_type = other DNA
atggccgccgccgccggcgacggcggcggcgagggcggcgccggcctaggctcagctgccggtctgggacccggacctggtttaagggggcagggcccttcagccgaagcccacgaaggggcccccgatccaatgcctgctgctctgcatcccgaggaagtcgccgcccggctacaaagaatgcagagagaactgtctaatcgcagaaagatcttagtgaagaacctacctcaggacagtaactgccaggaggttcatgatctgcttaaagattacgacctgaagtactgttacgtcgaccgaaataaaagaacagcttttgtgactttgttgaacggggagcaggctcagaacgcgatccagatgtttcaccaatacagctttagaggaaaagatctcatagtgcagcttcagcccacggatgctctcctgtgtatcaccaacgtgccaatttcatttacaagtgaggagttcgaagagttggtacgagcttacggtaacattgagagatgttttcttgtgtattcagaggtgaccgggcactccaaggggtatgggttcgttgagtacatgaaaaaggattttgcagccaaagccagactggaactcctggggcgtcagcttggggccagcgcactcttcgcacaatggatggatgtgaacctgctggcttctgaattaatacactctaagtgcctgtgtatagacaaactgcccagcgactaccgtgattctgaagagctcctacagatcttcagcagcgtgcacaagcccgtgttttgccagctcgctcaggatgaaggctcctatgtgggtggttttgcagtagtcgagtactctacagccgagcaggcggaggaagtccaacaagccgctgacggaatgaccattaaaggttcgaaagtgcaggtgagtttctgtgcacccggggcccccgggcgctctacgctcgccgcactcatcgctgctcagcgggtcatgcacagcaaccagaaggggctgctgccagagcctaaccctgtacagataatgaagagcctcaataatccagccatgcttcaagtactgctgcagcctcagctgtgtggtagagccgttaagccagccgtgttgggcacccctcattccttgcctcacctcatgaatcctagtatttctcctgcatttctgcaccttaataaagcccatcagtcatcagtgatgggcaacacttctaaccttttcctacagaacctctcccatattcctctcgctcaacagcagctgatgaagtttgagaacattcatacgaacaataagccggggctgctgggtgagcctccagcggtggtactccagactgccctaggaatagggtcggtgcttccattaaagaaagagctggggcaccaccatggcgaagcccataagacaagctccctcattccaactcagaccacaatcaccgctggcatgggcatgttaccatttttcccaaaccagcacattgctggccaggccggtcccggtcactcaaatactcaggaaaagcagcctgctactgtgggaatggccgaagggaatttctctgggtctcagccttatctccagagcttccccaatctcgcagccggttctctgctggtcggtcaccataaacagcagcagtctcagcccaagggaaccgagatctcatccggcgccgcatcaaaaaaccagaccagcctcctgggcgaaccccccaaagagatccgcctgtcaaagaacccttatctaaacctggccagtgtgctcccgagtgtgtgcctaagctctccagctagtaagaccactctgcataaaaccggaattgcatcctctattctggacgccatttcccagggttcagaaagccagcacgccttggaaaagtgcattgcctattcgccaccattcggagactacgctcaggtctcttcactccgcaacgagaagagaggctcgagctacctcatatccgccccagaaggcggcagcgtggaatgtgtggaccaacactcacaaggcactggggcctactacatggaaacatatctgaaaaagaagcgtgtttactag

SEQ ID NO: 203523 - DNA, 2037 bp, synthetic construct
  misc_feature 1..2037: note = Description of Artificial Sequence: Synthetic coding sequence
  source 1..2037: mol_type = other DNA
atggccgccgccgccggcgacggcggcggcgagggcggcgccggcctgggatccgccgctgggctcggccctggtccaggattgagaggacaaggtccatccgcagaagcacatgagggggctcctgatcccatgcctgctgcacttcacccagaagaagtggccgctcggctgcagcggatgcagcgcgaactaagtaataggcgtaaaatattggtgaagaatttgccccaagactcaaactgtcaagaggtgcacgatctcctcaaagattacgacctgaagtactgttatgtagaccgaaacaaaaggactgcattcgtgacactgctcaacggggagcaggcacaaaacgccatccaaatgttccatcaatattcatttcgtggcaaggatctcatagtgcagctgcagccaacagatgccttgctctgcattacgaacgtgccaattagttttacaagcgaggaattcgaggagcttgtgcgagcctacggcaacatagaacgatgtttcctggtgtacagcgaagtgactggccatagcaagggatacggcttcgttgagtacatgaaaaaggatttcgccgccaaagcacgactcgaactgctcggcaggcagcttggggcttctgcactctttgcccaatggatggacgtgaatctgttagcttccgagctgattcattccaaatgtctctgtatcgacaagttgcctagcgactacagagattcggaggagttactgcagattttctcaagcgtgcataagccagtgttttgtcagctggcacaggacgagggttcttatgttggcggcttcgctgttgtagagtattcaacagctgaacaagccgaggaggtccaacaagcagcagacggtatgactattaaaggttccaaggtgcaggtaagcttttgcgcaccaggcgcacccggacgaagtacgctcgcggcgctgattgccgcccagagggtcatgcattcgaaccagaaggggctgttgcccgaacccaatcccgtccagattatgaagagtcttaataaccctgccatgctccaggtcctattacaaccccaactgtgtggaagggcagtgaagcctgccgtcctggggaccccacatagtctgcctcacctaatgaaccctagtatcagcccagcgtttctgcacttaaacaaggcccatcagaacttgtcacacatccccctggcacagcagcagcttatgaaatttgagaatatccatacaaataataagcctgggctgcttggcgagccacctgcggttgttctgcagactgctctgggaattgggagtgttctacctcttaagaaggagctggggcaccatcacggcgaggcacataagacctcctccttaatacccacacagactaccatcaccgcagggatgggcatgctgccgttcttcccaaaccagcatatcgccggccaggctgggcctggtcactcaaacactcaggagaaacagcccgccaccgtcggcatggctgaggggaacttcagtgggtctcagccctacctgcagtcatttcctaacctggcagcaggctctctgctcgtcggacaccacaagcaacagcagagccagcccaaagggacagagatttcttctggagctgcatctaagaaccagaccagtctgctgggggaaccccccaaggaaatccgcctgagcaagaatccttacctcaatctcgcgtcagtgctaccctcagtgtgtctttcatcccctgcaagcaaaaccacacttcataagactggaattgcctcaagtattcttgacgccatttctcagggatccgagagccagcacgcattggagaaatgcatagcttattcgcccccgtttggggactatgctcaggtgagttcgctgcggaatgaaaagagagggagcagctacctgatcagcgcaccggaaggtggttctgtggagtgcgtcgatcagcatagccagggtacaggggcatattacatggagacctacctgaagaagaagagggtgtactag

SEQ ID NO: 203524 - DNA, 693 bp, synthetic construct
  misc_feature 1..693: note = Description of Artificial Sequence: Synthetic coding sequence
  source 1..693: mol_type = other DNA
atgaccatcaagggcagcaaggtgcaggtgagcttctgcgcccccggagctcctggcagatcaactcttgctgcccttatagctgcacagagagtgatgcacagcaaccagaaagggctgctgcctgagcctaatccagtccagattatgaaaagccttaacaacccagcaatgctacaggtgctccttcagccccagctttgtggaagggccgtcaagcccgccgtgctggggactccccacagccttccccacctgatgaacccctccatctcccccgcctttttgcatctgaacaaagcacatcagaaccagaccagcttattaggtgagccacccaaagagataaggctttcaaaaaacccatacctgaatttggcaagcgtgctgcctagcgtgtgcttgagctcacccgcatccaagacaacgctgcacaagactggtattgcaagttcgatactcgatgccatttctcagggatccgagtcccagcatgcgttggaaaaatgcatcgcttatagtcctccatttggtgactatgctcaagttagctctttgcggaacgaaaagcgcggctcttcctacctgataagtgctccagagggcgggtcggtcgagtgtgtggatcaacactctcagggtactggggcatactatatggagacctatctcaagaagaagagggtctactag

SEQ ID NO: 203525 - DNA, 2379 bp, synthetic construct
  misc_feature 1..2379: note = Description of Artificial Sequence: Synthetic coding sequence
  source 1..2379: mol_type = other DNA
atgcacgtgatcaagcgggacggccggcaggagcgggtgatgttcgacaaaattacgagtcgtatccagaaactatgctacggcctcaacatggatttcgttgaccctgcccagattaccatgaaggtaatacagggcctgtatagcggggtgacgactgtggagctggacacacttgccgcagagacagccgccaccctgaccaccaagcatccggattatgctatcctggccgcaaggattgccgtgtccaatcttcacaaagagacaaaaaaagttttttccgacgtcatggaagacctgtacaattatatcaaccctcacaacggaaagcacagtccaatggtggccaagtcaacccttgacatagtactggccaacaaagaccgtctgaacagtgctataatatatgaccgggatttctcctacaactatttcgggttcaagaccctcgaacggagttatttgctgaagatcaacgggaaagtagcagagagaccccagcatatgctcatgagagtcagtgtggggatacacaaggaggacatagacgctgccattgagacgtataatttattgtccgaacgatggtttacacatgcctcaccaacgttgtttaacgccggtactaatagaccccagcttagtagctgcttcttactttcgatgaaagatgactctattgagggcatctacgatactttaaagcaatgcgcactgatctcaaaaagcgccggcggcattggcgttgccgtgtcttgcattcgagcaacagggtcttacattgctggcaccaacggaaattctaatgggttggtaccgatgttgagggtatataacaataccgcgcgctatgttgaccagggcgggaacaaacgacctggagctttcgcgatttatcttgaaccctggcatctcgatatatttgagtttttagacctcaaaaagaatactggcaaagaagaacaacgcgctcgagacctgtttttcgcactctggattcccgatttattcatgaaaagggtggaaactaaccaggattggtcactgatgtgccctaatgagtgtccaggcttggacgaggtctggggcgaggagttcgaaaaattgtacgcatcatacgagaagcaagggcgcgtgcggaaagtcgttaaagcccagcagttgtggtatgcaattatcgagagccagaccgagacgggtaccccgtacatgctgtacaaggatagttgcaataggaagtcaaatcagcaaaatttggggaccatcaagtgctctaacctttgtacagagattgtggagtacacttctaaggacgaagttgctgtctgcaacctggcctccttggctctgaacatgtacgttacgagcgaacacacttatgactttaaaaaactggccgaggtgaccaaggtcgtggtgagaaatctcaacaagatcattgacatcaactattaccctgtgcccgaagcttgtctgtccaataaaaggcaccgtccaattggtatcggtgtccagggcttggccgatgctttcatcctgatgagatacccctttgagtccgccgaggcccagctactgaataagcagatcttcgagacaatctactacggggctcttgaggccagttgtgacttagccaaagaacaggggccatacgagacttatgagggaagccccgtttctaaaggcattctccagtacgatatgtggaacgtcaccccaacggacctgtgggattggaaggtgctgaaggagaagattgctaaatatggcatacgaaattcactgttgatcgccccaatgccaacggctagcacagctcaaatactagggaataatgagagcattgaaccttatacttctaacatttacacaaggcgcgtgctctcgggcgaattccagattgttaatccacacctgctgaaggacctgacagagaggggactgtggcacgaagagatgaagaaccagattatagcctgcaatggatctatccagtccatacctgagattcccgacgacctcaaacagttgtacaagactgtctgggaaatttcccagaaaaccgttctgaagatggccgccgagaggggtgccttcatcgatcagtcccagtcgctgaatattcacatagctgagccgaactacggaaaattgaccagcatgcatttctatggttggaaacagggccttaaaactgggatgtactatttgaggacgcgaccagcggccaatcccattcagttcactctcaataaggagaagttgaaggacaaggagaaggtgagcaaagaggaggaggaaaaggagaggaacaccgcagccatggtttgctccctggagaaccgggacgaatgcctaatgtgtgggtcctag

SEQ ID NO: 203526 - DNA, 2088 bp, synthetic construct
  misc_feature 1..2088: note = Description of Artificial Sequence: Synthetic coding sequence
  source 1..2088: mol_type = other DNA
atggaggacctgtacaactacatcaacccccacaacggcaagcactcccccatggtagcgaaatccactctggacatagtgcttgctaacaaggatagactcaacagcgcaatcatctacgacagggatttttcttacaattattttggtttcaagaccctggaacgtagctatctcctgaagattaacggtaaggtagcagaacgcccacagcatatgctaatgcgcgtgtccgtcggaatccataaagaagacatcgacgcagcgatcgaaacctataatttactctcagaaagatggttcactcacgcttcccctactctttttaacgccggcaccaacaggccccagctctctagctgtttcctgctttctatgaaagacgactctattgaaggtatttacgatacccttaagcaatgtgccctgattagcaagtccgccggcggcattggggtagccgtgtcctgcattcgtgcaacagggtcatacatcgctggcaccaacggcaattcaaatggcctagtcccgatgctgagagtttataacaacactgctaggtacgtcgaccagggcggcaacaagcggcctggcgcgtttgctatttatctggagccctggcatttggatatcttcgaattcttagatctcaaaaaaaacaccggcaaagaagaacagagagcccgggatttgttctttgccctgtggatccctgacctatttatgaagcgcgttgagacaaaccaggattggagcctaatgtgcccaaacgaatgccctggcctcgatgaggtgtggggtgaagagtttgagaaactgtacgcaagttacgagaaacagggaagagtgaggaaggtcgtgaaggcccagcagttgtggtatgcaattatagagtctcagaccgagaccgggacaccatacatgttgtataaggactcctgcaaccgtaagtccaatcagcaaaatcttgggaccatcaagtgtagtaacctctgtacagagatcgtggagtacacctcaaaggatgaagtcgccgtgtgtaatctggcatccctggctctgaatatgtatgtcacaagcgaacacacctatgattttaaaaagctcgccgaggttaccaaagtggtagtccggaacttgaacaagattatcgatattaactattaccccgtgcccgaggcttgcctgtccaataagcgacataggccgatcggcatcggagtgcagggtctcgctgatgcatttattctcatgagatacccctttgaaagcgccgaagcccagctgttgaacaagcagatattcgagaccatctactacggggccttagaggctagttgcgacctggccaaagagcagggcccatacgagacatacgaagggagccctgtttcaaagggcattctgcaatacgacatgtggaacgtaactcccacagacttgtgggactggaaagtgctgaaggagaaaattgcaaagtacggtatacggaatagccttctcatcgccccgatgccaaccgcatctacagcgcaaatcctgggtaacaacgagtcaatcgagccctacacatcaaatatctacactagaagggtgctgagcggggaatttcagatagtaaatccccatctgctgaaggatctcactgaaaggggcttgtggcacgaggaaatgaaaaatcaaattattgcgtgcaatggctcaatacagtccatacctgaaatcccagatgacctgaagcagttgtataaaactgtctgggaaatctctcagaaaacggtgcttaagatggcggctgagaggggcgcctttattgatcagtcgcagtcgctaaacatccacatcgcagaacccaactatgggaagctaacctcaatgcacttctacggttggaaacagggactgaagactggtatgtactacctcaggacccggcccgcggccaatcccatccagtttacactaaataaagaaaaattgaaagataaagagaaggtgtccaaagaagaagaggaaaaagaaagaaacacagcagcgatggtgtgctctctggagaatcgggatgagtgtctgatgtgcgggtcgtag

SEQ ID NO: 203527 - DNA, 2118 bp, synthetic construct
  misc_feature 1..2118: note = Description of Artificial Sequence: Synthetic coding sequence
  source 1..2118: mol_type = other DNA
gacggccggcaggagcgggtgatgttcgacaagatcaccagccggatccaaaaactctgctatggcctcaatatggactttgtggacccagcgcagataacgatgaaagtaattcagggactctattcaggcgtaacaactgtggaactcgacacattagcagctgaaacggccgccacactgaagacactcgaaaggtcctatctactgaagattaacggtaaagttgctgaacgcccgcaacatatgctcatgagagtcagcgtgggaatccacaaagaagatatcgatgccgctatcgagacctataatctactgtctgagcggtggttcacgcatgcctccccaaccctattcaatgcgggaactaaccgcccccaactctctagctgcttccttctctctatgaaagacgactccatcgaaggcatatatgacacgctaaagcagtgtgccctgatctctaagagcgcaggtgggatcggggtggcagtttcttgtatccgcgccactggctcatatattgccggaactaacggcaatagtaatggcctggtgcctatgctcagggtgtataataacaccgcccgctacgtggatcagggtgggaacaagcgtccaggggctttcgctatctacctggagccatggcacctcgatatttttgagttcttggacctcaagaaaaatactgggaaggaggagcagagggcccgcgacctttttttcgccctctggatccccgacctcttcatgaagagagtggaaaccaaccaggactggtcattaatgtgtcccaacgaatgtcccggtctggacgaagtctggggggaagaattcgagaaactgtacgcctcttatgaaaagcaggggagagtacgcaaagttgttaaagcccagcaattgtggtacgcaatcattgaatctcagacggaaacagggacaccctatatgttatacaaagattcttgcaaccgtaaatcgaaccagcagaatcttggtaccattaaatgttcaaacctgtgcacagagattgtggaatacacaagcaaggatgaagtggctgtttgcaatctggccagtctggccctgaacatgtatgtcacttccgagcacacatacgacttcaagaagctggccgaagtaaccaaagtggtcgtcaggaacctgaacaaaataatcgatatcaattattaccctgtgcccgaggcttgcttgtcaaacaagcgacatcggcccataggtattggggtccaaggactagccgacgccttcattctcatgaggtatccgttcgaatccgcagaagctcaattgctgaataagcagattttcgagacaatctattatggtgcactagaagcctcatgtgatctggccaaggagcagggaccctatgagacatatgagggctcacccgtgagcaaaggaatcctgcaatacgacatgtggaatgtgacgccaactgacctgtgggactggaaagtgctcaaagaaaagatcgccaagtacggaataagaaactccttactgatagctcctatgccaactgcctccaccgcccagattttgggaaataacgagtcgattgaaccatacacaagcaatatttacactcgccgggtcctgtcaggggagtttcagatagtgaacccgcatctgctaaaggacctcacggaacgagggctttggcacgaagagatgaaaaatcagattatcgcttgtaacggctccatccagagcattccagagatccccgatgatctgaagcaactctataagacggtgtgggagatctcccagaagacagtgctgaagatggcggcggaacggggagctttcatagatcaatcacagtccctgaatattcacattgcagaacctaattacgggaagttgacttctatgcacttttacggctggaagcagggcctgaagactggaatgtactacctccgaactcggcctgccgccaacccaatccagtttaccctgaataaggagaaactcaaggacaaagagaaagttagcaaggaagaggaggagaaggaaaggaataccgctgccatggtctgctctttggaaaacagggacgaatgcctcatgtgcgggagttag

SEQ ID NO: 203528 - DNA, 1365 bp, synthetic construct
  misc_feature 1..1365: note = Description of Artificial Sequence: Synthetic coding sequence
  source 1..1365: mol_type = other DNA
atgaagcgggtggagaccaaccaggactggagcctgatgtgccccaatgaatgccccggcctggatgaagtgtggggtgaagagttcgaaaagctttacgcatcatatgagaagcaagggagggtccgcaaagtagttaaagcacagcaattgtggtatgccattattgagagtcagacagagacaggcactccctacatgctatacaaggattcctgcaacaggaaaagcaaccagcaaaatctaggtaccataaaatgtagtaacctgtgcactgagatcgtcgagtatactagcaaggatgaagttgccgtgtgcaacttggccagcctggctctgaatatgtatgttacatccgaacacacctatgatttcaagaagctggcagaggttacgaaagtggtagtcagaaatctgaacaagataattgatatcaactattaccctgtgcctgaggcctgtctctccaataagcgtcacagacccattgggattggagttcagggcttggctgacgccttcatcttgatgagataccctttcgagagtgctgaagcccagctcctgaataagcagattttcgagactatctactatggtgctttggaggccagctgcgatcttgcaaaagaacagggaccatatgagacctacgagggaagccccgtttccaaaggcattcttcagtacgatatgtggaatgtcacaccaactgacctttgggattggaaagttctgaaggagaaaatcgccaagtatggcatccggaacagcctccttatcgcccccatgcccaccgcgagcaccgcccagatcctcggcaacaacgagagcatagagccctatacctcgaatatttatacccgcagagtgctgagcggcgagtttcagatagtaaacccccatctgttaaaggatctcaccgagagaggactctggcacgaagagatgaagaaccagattattgcctgtaacggctcaattcaatccattcccgagattcccgatgatttgaagcagctgtacaaaaccgtctgggaaatatcccagaaaaccgtactaaagatggccgctgagcgcggcgccttcatcgatcagtcgcaatcattgaacatccatattgccgaaccaaattacgggaaactgacgtcaatgcatttctatgggtggaagcagggactgaagaccggaatgtattacctgaggacaaggcccgcagcaaacccaatacagtttaccttgaacaaggaaaagttaaaggataaagaaaaagtgagtaaggaagaagaagagaaagagcgcaatactgcggccatggtgtgttccctggagaacagagacgagtgtctcatgtgtggttcgtag

SEQ ID NO: 203529 - DNA, 1170 bp, synthetic construct
  misc_feature 1..1170: note = Description of Artificial Sequence: Synthetic coding sequence
  source 1..1170: mol_type = other DNA
atgctgagcctgcgggtgcccctggcccccatcaccgacccccagcagcttcagctgagccccctgaaagggttgtcactggtggataaagaaaacactccaccggctctttcagggacacgagttctggcgtccaagaccgctcggcgcattttccaggagcctaccgagcccaagactaaagctgctgctccaggagttgaagatgaacctctacttcgcgaaaacccgagacgattcgtgatttttcctatcgaataccatgatatctggcagatgtataaaaaagctgaagcctccttctggaccgctgaggaggtggatttgtccaaggacatacaacactgggagagcctcaagcccgaggagaggtactttattagtcacgttttggcatttttcgcagcctcggacgggatagtgaatgaaaatctggttgagcgcttctcccaggaagtccaaatcaccgaagcacggtgcttttacgggtttcagattgccatggagaatattcatagcgaaatgtatagtctactcattgacacatatatcaaagatccaaaagaaagggaattcctgtttaacgcgatagagacaatgccctgcgtgaaaaaaaaggctgactgggcgttacgctggattggagataaagaggccacctacggggagagggtcgttgccttcgccgccgttgagggaatattttttagcggctcattcgccagtattttttggcttaaaaagcgcggcctgatgcctgggctgaccttttcaaacgaactgatatcccgggacgaagggctgcactgcgatttcgcctgccttatgttcaaacacctggtgcacaagccgagcgaagaacgcgtgcgggaaattatcattaacgccgttagaattgaacaagaatttcttacagaagcactccccgtgaagctgataggtatgaactgcactctgatgaaacagtatatcgagttcgtcgctgataggctgatgcttgagcttgggttttcaaaggtattccgcgtcgaaaaccccttcgattttatggagaatataagcctggaaggcaagacaaattttttcgagaaaagggtaggtgagtatcagaggatgggtgttatgtcctcgcccaccgaaaactcctttaccctggacgctgatttttag

SEQ ID NO: 203530 - DNA, 1350 bp, synthetic construct
  misc_feature 1..1350: note = Description of Artificial Sequence: Synthetic coding sequence
  source 1..1350: mol_type = other DNA
atgggccgggtgggcggcatggcccagcccatgggccgggccggcgccccaaaaccaatgggtagggcaggatccgcacggcgaggtagattcaagggatgttggagtgaaggaagtccagtacatccagtgcctgccgtgctctcgtggctgctggctttgctccggtgtgcatccaccatgctgagtctgcgggtgccactggcacctatcacggacccgcagcagttgcagttgtcccctttgaagggtttgagcttagtggataaagagaacaccccccctgccctgagcggcacgagggtgttggctagcaagactgcacggaggatctttcaggagcccaccgaaccaaagaccaaagctgccgcacccggggttgaggacgagcctctgttgcgagaaaatccacggcggttcgtaatctttcctattgagtaccatgacatatggcagatgtacaaaaaggcagaggcttcattttggaccgcggaggaggttgacctctctaaagacatacagcactgggagtctttgaagcccgaagagagatacttcatcagtcatgttcttgcctttttcgccgccagcgacgggatcgtgaatgagaacctcgtggagagattcagtcaggaagtgcagattactgaagccaggtgcttttacgggttccaaatcgccatggagaatatccatagcgagatgtactctttacttattgacacctacattaaggatccaaaggaacgggagttcctgttcaatgccatcgagactatgccttgcgttaagaaaaaggctgattgggctctgaggtggattggagacaaggaggcaacctacggagagagagtggtggcattcgcagctgttgaagggattttcttttcgggcagtttcgcatcgatcttctggttgaagaagcgggggcttatgcctggactgacctttagtaacgaattaatctctcgcgacgaaggccttcactgcgatttcgcatgcctgatgttcaagcacctggtgcacaaaccatctgaggagcgcgtgcgggagattatcataaacgccgttcggatcgagcaggagttcttgacagaggctctcccagttaagcttattggcatgaactgcacattaatgaagcagtatatcgaatttgtagccgaccgtctgatgctggagctgggtttctctaaggtcttcagagtggagaacccatttgatttcatggaaaacatttctttagaagggaagaccaacttttttgagaaaagggtgggtgaatatcagcgtatgggggtgatgtcctcaccgacagaaaacagctttaccttggacgcagatttctag

SEQ ID NO: 203531 - DNA, 1056 bp, synthetic construct
  misc_feature 1..1056: note = Description of Artificial Sequence: Synthetic coding sequence
  source 1..1056: mol_type = other DNA
atgggcgaccccgagcggcccgaggccgccggcctggaccaggacgagcgcagtagctcagatacgaatgagtcagagatcaaaagcaatgaagagccactacttaggaagagctcacggcgcttcgttatttttccaattcagtacccagacatttggaaaatgtataaacaggcccaggctagcttctggacagctgaggaagtggacttgagtaaagatctcccacattggaataaactcaaggctgatgagaaatatttcataagccacatcctagctttctttgccgcaagtgatggtattgtcaacgagaatctggttgaacggttttcccaggaagttcaggttccggaagccagatgcttttacggatttcagatccttatagagaatgtccactcagagatgtattccctgcttatcgacacttatatcagggatccaaagaagcgcgagttccttttcaatgctattgagacgatgccatatgtgaaaaaaaaagctgactgggccctccgttggattgcggatagaaaatccacctttggtgagagagtcgtggccttcgcggctgtggagggcgtgtttttttctgggagttttgccgcaattttctggctgaagaaacggggattaatgccaggtctcacattcagtaacgaactgatttcgcgggacgagggactgcattgtgacttcgcctgcttgatgttccagtacctggttaacaaaccctctgaggagagggtgagggagatcatcgtagatgcagttaaaattgagcaagagtttctaacagaagccttgcccgtaggactcattggaatgaactgtattttgatgaagcagtacatcgagttcgttgctgatcgtttactggtcgagctcggtttttctaaagttttccaagctgagaatccatttgacttcatggagaacatatctctggagggaaagaccaacttttttgaaaaaagagtgtccgagtaccaaaggtttgcggttatggccgagaccaccgacaacgtgtttactttagacgcggacttctag

SEQ ID NO: 203532 - DNA, 900 bp, synthetic construct
  misc_feature 1..900: note = Description of Artificial Sequence: Synthetic coding sequence
  source 1..900: mol_type = other DNA
atgggcgaccccgagcggcccgaggccgccggcctggaccaggacgaggttgacctctcaaaggacctgcctcactggaacaagctcaaggctgacgaaaagtattttattagtcatatactcgcctttttcgcagcctctgacggtattgtgaatgaaaacctcgttgaacgcttttctcaggaagtgcaggtgccagaggcaaggtgtttttacggctttcaaatcctgatcgaaaacgtgcactccgaaatgtattcgcttctgatcgacacatacatcagggatccaaaaaagagggagttcctgttcaatgccattgagacgatgccctacgtcaaaaagaaggccgattgggccctacgctggatcgccgatcggaaaagtacctttggtgaaagagtagtggcctttgcagctgttgagggtgtgttcttctccgggtccttcgctgcgatcttctggcttaagaaaagaggtttaatgcccgggctgacatttagcaatgaactgatcagccgcgatgagggcctccactgcgacttcgcatgcctgatgtttcagtatctggtaaataagcctagtgaggagagggtgcgggagatcatcgttgatgcagtcaaaatcgaacaggagttccttaccgaggcgttacctgtcggactgattggtatgaactgcattctgatgaagcagtacatcgaatttgtagccgatcggctgttggtcgagctcggattcagtaaggtgtttcaggcggaaaacccctttgattttatggagaatatttcactggagggaaagaccaactttttcgagaaacgagtcagtgagtatcagcgtttcgcagtcatggctgaaaccaccgacaacgtcttcacgctggacgctgacttttag

SEQ ID NO: 203533 - DNA, 420 bp, synthetic construct
  misc_feature 1..420: note = Description of Artificial Sequence: Synthetic coding sequence
  source 1..420: mol_type = other DNA
atgggcgaccccgagcggcccgaggccgccggcctggaccaggacgagggcctccactgtgattttgcctgtttgatgtttcagtatctggtgaacaagcccagcgaggaacgcgtgcgggagatcatcgtggacgccgtcaagatagaacaggagttcctgacagaggctctgcctgtcgggcttatcggaatgaactgcattctgatgaagcaatacatcgagttcgtggcagatcgcctgcttgtggaactcggcttcagtaaagtgtttcaggccgagaatccatttgatttcatggaaaacatcagcctggaagggaaaaccaatttctttgagaaaagggtgtcagagtatcagcggtttgcagttatggcagaaacaactgataacgttttcacattggatgcagacttctag

SEQ ID NO: 203534 - DNA, 201 bp, synthetic construct
  misc_feature 1..201: note = Description of Artificial Sequence: Synthetic coding sequence
  source 1..201: mol_type = other DNA
atgggcgaccccgagcggcccgaggccgccggcctggaccaggacgaggtgtttcaggccgaaaatccgttcgattttatggagaacatttctctggagggtaagaccaatttctttgagaaaagagtaagtgagtatcagaggttcgctgttatggccgagacaaccgacaacgtgtttaccctggacgctgatttctag

SEQ ID NO: 203535 - DNA, 132 bp, synthetic construct
  misc_feature 1..132: note = Description of Artificial Sequence: Synthetic coding sequence
  source 1..132: mol_type = other DNA
atgggcgaccccgagcggcccgaggccgccggcctggaccaggacgaacgcagcagctctgacacaaacgaatccgagataaagagcaatgaagagcctctgctccgaaagtccagccggcggagcttctag

SEQ ID NO: 203536 - DNA, 894 bp, synthetic construct
  misc_feature 1..894: note = Description of Artificial Sequence: Synthetic coding sequence
  source 1..894: mol_type = other DNA
atgtacaagcaggcccaggccagcttctggaccgccgaggaggtggacctcagcaaagatctgccccattggaataaattgaaagctgacgagaagtacttcatttcccacatcctagcttttttcgcggcgtcggatggaatagtcaatgagaaccttgtagaacgatttagtcaggaagttcaagttcccgaggccaggtgcttttatggctttcagattctgattgagaacgtccactctgagatgtacagtctgttgattgacacttatatcagagatcctaagaaaagagaattcctcttcaacgcaattgaaacaatgccgtatgtgaagaaaaaggccgactgggccctcaggtggatcgccgaccgcaagtccacattcggcgagcgagtcgtggcattcgcagctgtcgagggggtattcttcagtggcagctttgccgctattttctggctgaagaagcgcgggctcatgcccggactcaccttcagcaatgagctgatctcacgtgatgaagggttgcattgcgattttgcatgtctgatgtttcaatatctagtgaacaagccctctgaggaaagggtacgggagattatagtggatgccgtcaagatcgaacaggagtttctgacagaagctcttcccgtggggttgattggcatgaactgtatactcatgaagcagtacattgaattcgtggccgataggctcctggttgagttagggttcagtaaggtcttccaggccgagaaccccttcgattttatggaaaatatttcactggagggaaaaaccaacttttttgaaaaaagggtgagcgaataccagcgcttcgcagtgatggcagagacgaccgataatgtgttcaccttggatgcggacttttag

SEQ ID NO: 203537 - DNA, 1824 bp, synthetic construct
  misc_feature 1..1824: note = Description of Artificial Sequence: Synthetic coding sequence
  source 1..1824: mol_type = other DNA
atggaggcccccgccgccggcctgttcctgctgctgctgctgggcacgtgggcaccggcccctggctcggcctcttccgaagcgccacccctgataaacgaggacgtcaagagaaccgtagatcttagtagccatctggccaaagttacagcagaggttgtgctggcacaccttggaggtggatcgacatctagggctactagttttctacttgccctggagcctgaactggaggctcgcctcgcccacctaggggtgcaggtcaagggcgaggacgaagaggagaacaatctggaagttagggaaacgaagatcaaaggaaagtccgggcggttcttcactgtgaaactcccggtggccctggacccaggggctaaaataagtgtaatcgttgagactgtctatacacacgtcctccacccttatccgacgcaaataactcaaagcgaaaagcaattcgtggtctttgaaggaaaccactacttctacagtccatacccaacaaagacacagactatgagagtgaaactggcgtcccgcaacgtggagagttacacaaaactaggcaatccaacccgaagcgaggatttgctggactatgggccgttcagagatgtgccggcctattcccaagatacgtttaaggtgcactatgaaaataattctcccttcttaacaatcacctccatgacccgggtgattgaggtgtctcattggggaaatattgcagtcgaagaaaatgtggatctgaagcataccggcgcagtgcttaaggggcccttctctagatatgactaccagaggcagcccgattccgggatctcttccatccgcagctttaagaccattctccctgccgcggcacaggacgtttactacagagacgagatcggaaacgtctctacaagccacctccttatcctagatgactccgtagagatggagatccggccgcggtttcctctgttcgggggttggaaaacccactatattgttgggtacaacctgccctcttatgagtatctgtacaacctcggtgaccaatatgctttaaaaatgcggttcgtggatcatgtcttcgacgaacaggtcatagactccctcacagtgaaaattatcctccctgaaggagcgaagaacattgagattgacagtccctacgaaatttcgcgtgctcccgacgaactgcactacacctatctcgatacatttggccggccagtcatcgtcgcctacaaaaaaaacctggttgaacaacatatccaggatatcgtggtgcactacacgttcaacaaggtcttgatgctgcaggaacctctgctcgttgtggctgccttctacatactatttttcaccgtcataatctatgtcagacttgatttcagcattaccaaagacccggccgcggaggcccggatgaaggtggcatgtattacagagcaggtgcttacactcgtaaataagaggatcggcctgtatcgtcacttcgatgagaccgttaaccgatataagcagagccgcgatatcagcacacttaatagcggcaagaagagcctggaaaccgagcacaaggcattgactagcgagatcgccctgctgcaaagtcgccttaagactgaggggagcgacctgtgtgatagagtttccgagatgcagaagcttgacgcccaggtgaaagaacttgtcttaaagagcgctgtggaagcagagcgcctcgtggcaggcaaactgaagaaggatacatatattgaaaacgagaagcttatttccggaaaacgccaggaattggtaacgaagatcgatcacatcctggatgcattgtag

SEQ ID NO: 203538 - DNA, 1308 bp, synthetic construct
  misc_feature 1..1308: note = Description of Artificial Sequence: Synthetic coding sequence
  source 1..1308: mol_type = other DNA
atgcgggtgaagctggccagccggaacgtggagagctacaccaagctgggtaacccaacacgaagcgaagaccttttggactatggaccattcagagacgtgcccgcttatagtcaggatacttttaaagtgcactatgagaataactctcccttcttgacaattacttccatgacaagagtgatcgaagtttcgcactggggtaacattgccgttgaggaaaacgtggacttaaaacacacgggcgcagtgctgaaggggccatttagccgatacgactatcagcgacaacccgactctggtataagtagcatcaggtctttcaagacaattctacccgcagccgctcaagacgtgtattatcgggacgaaataggaaacgtgtcgacgtcccacctactgatacttgatgactctgtggaaatggagattagacctcggttcccactctttggcgggtggaaaactcactatattgtggggtacaatctgccctcctacgagtatctctacaacctcggagaccagtacgctctgaaaatgagatttgttgatcacgtattcgatgagcaggtgatagactccctgactgtaaagattatcttgcccgaaggggccaaaaatatagagatcgactcaccctacgaaatatcccgtgcaccggatgaactacactacacatacctagatacttttggtagacccgtcatcgtcgcgtataagaaaaatctagtggaacaacacatccaggatatcgtggttcactacaccttcaacaaggtcttgatgttgcaggaacctcttttggtggtagccgctttttatatacttttttttaccgtaattatttatgttcgactcgacttttcaattacgaaggatccagccgccgaggcacgcatgaaagtcgcctgcattactgaacaggtgctcaccttggtaaataaacgaatagggctgtacaggcacttcgacgaaacagttaataggtacaaacagagccgcgacatcagtaccctgaactcaggcaagaagagcctcgaaaccgaacacaaagccctgaccagcgaaatcgcactactgcagagtcgattgaaaactgagggttccgacttatgtgaccgcgtcagtgagatgcagaagctcgatgctcaagtaaaagagctagtgctcaagtcagctgttgaggccgaaaggctcgtggccggcaaacttaaaaaggatacttacatagagaacgaaaagctcattagcggaaaacggcaggagctcgtcacgaaaatagaccacatcttggatgccttgtag

SEQ ID NO: 203539 - DNA, 1137 bp, synthetic construct
  misc_feature 1..1137: note = Description of Artificial Sequence: Synthetic coding sequence
  source 1..1137: mol_type = other DNA
atgacccgggtgatcgaggtgagccactggggcaacatcgccgtggaggagaacgtggacctcaagcatacaggggcagtactaaaaggaccattctcaaggtacgactaccagcgccagcccgattccgggatttcaagcattaggtcgttcaaaaccattctgccggctgcagcacaggatgtgtactacagagacgagattggcaatgtgtcaacctcgcacttgctaattctggatgactcagtggagatggagattcgtcctcgatttcccttgtttggcggatggaaaacccactacatcgtgggctacaacctgccctcttatgaatacctgtacaatttgggtgatcaatatgcgctgaagatgagattcgttgatcacgtttttgatgaacaggtaatcgacagcttgacggtcaaaattatactccccgaaggggctaaaaatatcgaaatagacagcccctatgaaatttccagggcaccagatgaactgcactatacatacttagacacgttcggaaggccagttatcgtagcctacaaaaagaacctcgtggaacagcatattcaggatatcgtcgtacactacaccttcaataaagtcttaatgctgcaggagcctttacttgttgtagcagcgttttatattctattcttcactgtgataatttacgtacgacttgactttagcatcacaaaggatcccgcagctgaggcccgaatgaaagtcgcctgcattaccgaacaagttctcactcttgtcaacaagaggatcgggctctaccgacacttcgatgagactgtgaatcgctataagcagtcccgggacatttcaacccttaattccggcaagaagtccctggagacggagcacaaggccctaaccagcgagatcgccctcctgcagtcgcgcctgaaaacagaaggatccgatctctgcgacagagtgtctgaaatgcaaaagctggatgcccaagtgaaggaacttgtgttaaagtctgctgtggaagctgagcgcctggtggccggcaaactgaaaaaagacacctacatcgagaatgaaaagttaatctcaggcaaacgtcaagaattagtgaccaaaatagatcatatcctcgatgccttatag

SEQ ID NO: 203540 - DNA, 1746 bp, synthetic construct
  misc_feature 1..1746: note = Description of Artificial Sequence: Synthetic coding sequence
  source 1..1746: mol_type = other DNA
atggaggcccccgccgccggcctgttcctgctgctgctgctgggcacctgggcgcctgcaccaggaagtgctagtagcgaagctccgcctttgataaatgaagacgttaagcgtacggttgacttgagtagtcaccttgcaaaggtgacggccgaggtggtgcttgcccacctaggcgtgcaggttaaaggtgaagacgaagaggagaacaatctcgaggttcgcgagaccaaaatcaagggtaagagtggacggttcttcaccgtgaaactacccgtagctttggaccccggagccaaaatttccgtgatagtcgagacagtatacacacacgttcttcatccttaccccactcagattacccagagtgaaaagcaattcgtggtcttcgaaggaaaccactatttctacagtccttatccgaccaaaacccagactatgagagtgaagctcgcaagccgcaatgttgagtcttacaccaaacttggcaatcccacaagaagcgaggatcttctcgactatggtccttttagggacgtgcctgcatattcccaggatacttttaaagtccattacgagaacaacagcccctttctgacaatcacaagcatgacacgcgtcattgaagtctcccactggggaaatatcgcggtagaagaaaacgtggatcttaaacacactggagccgtgctcaaggggccattcagccgatatgattaccagcgccaacccgattctggaatttctagcataaggagtttcaagaccattttgcccgcagccgctcaggacgtttactaccgggacgagataggaaacgtatctacatcccacttactgatcctggacgatagtgtggaaatggagattcggccgaggtttccgctttttgggggatggaaaacccattatatcgtggggtacaatctaccatcatacgaatatctgtacaacctgggggaccagtacgcactgaagatgagatttgtcgatcatgtcttcgacgagcaggtcatcgatagcctgacagtaaagatcattctccctgagggggccaaaaatatcgaaatcgatagtccatacgagatttcacgggccccggatgaactgcattacacctatttggacacctttgggagaccagttatagtagcttacaagaagaatttagtggaacagcacatacaggacatcgtcgtccattacacttttaacaaagtccttatgctgcaagagcctctgctggtagtggcagcattttacatcctgttctttacagtgatcatttacgtgaggctggatttctcgataaccaaggaccctgccgcagaggctcgcatgaaggttgcctgtatcaccgagcaggtgcttaccctggtgaataagaggattggcctgtacagacacttcgacgaaacggtgaaccggtacaagcagagcagagatatctccactctgaacagtggaaagaaaagtttagagactgagcataaggcgctgaccagtgaaatcgccttgttgcaatctaggctgaagacggagggcagtgacctatgtgatcgggtctcagaaatgcagaagctggacgctcaagtaaaagagctggtgctgaagtccgccgtagaggcagagagactggtcgccgggaagctgaagaaagatacctacatagagaacgagaagcttatttccggaaagaggcaggaactcgtaacaaaaatcgaccacattctggatgctctgtag

SEQ ID NO: 203541 - DNA, 1896 bp, synthetic construct
  misc_feature 1..1896: note = Description of Artificial Sequence: Synthetic coding sequence
  source 1..1896: mol_type = other DNA
atggccccccccggcagcagcaccgtgttcctgctggccctgaccatcattgccagcacgtgggctctaactccaacacactacttgaccaagcatgacgtggaacgcctcaaagcatccctggataggccttttactaaccttgaaagtgctttttactccattgtaggcttatcttctctaggcgctcaggtgcctgacgcaaagaaggcctgcacttacatccgctccaacctggatccttctaacgtggatagcttgttttacgctgcccaagctagccaggccctgagcgggtgcgaaattagtatatccaacgagaccaaggacttgctattggccgctgtgtccgaagatagttcagtaactcagatctatcacgccgtggccgctctgtcagggtttggactccctctggcttcccaggaagccttatccgctctgaccgcgagactctcaaaagaagagacagtgttggctactgtccaggcactacagactgctagccacctctcgcaacaggccgaccttcggtctatcgtggaggagatcgaagacctcgtggcccgcctggacgaacttggaggggtgtatctgcagtttgaggaggggctggaaactacagctttgtttgtcgcagctacctataaactaatggatcatgtggggaccgagccttccatcaaggaggatcaggtcatccaactgatgaatgccattttcagtaaaaagaacttcgaatctctgtccgaggccttttctgtcgcctcagccgctgccgtcctgtctcataataggtaccacgtgcccgttgttgtcgtgcccgaaggtagcgcctcagatactcacgaacaggctatcctgcggctgcaggttactaatgtgttatcccaacccctcacccaggcaactgtgaaacttgaacatgccaaatccgtcgcgtcacgagccactgtcctgcagaagacatcattcacccctgtcggtgatgtgttcgagctcaattttatgaacgtgaagttttcatctggctactacgacttcctggtcgaagtggagggggataacaggtacatagccaacacagtggagctccgggttaaaatctctaccgaagtgggcataacaaatgtagacctctctacggtggataaagatcagagcatcgccccaaaaactacccgagtaacttacccagccaaagccaagggtaccttcatcgcagactctcaccaaaattttgccctctttttccaactggtagatgttaacaccggggcggagctgacgccccatcagaccttcgtccgtttgcacaatcaaaagaccggtcaagaggtggtttttgtagctgaacctgataacaagaacgtctataagttcgagctggacacgtccgaacggaaaatcgagtttgatagcgcatcgggcacatacaccctgtacctgattataggcgatgcaacactgaagaatccaattctgtggaatgtggccgatgtggtgattaaatttcccgaagaggaagcaccctctacagttctcagccaaaacctctttacccctaagcaagagattcaacatctcttccgggagccagagaaacggccaccaactgtggtgagcaacactttcacggcccttatattgtcccctctcctgctgctttttgccttatggattcgaatcggtgctaacgtcagtaatttcacgttcgcaccctcgaccattatctttcacctgggccacgcagccatgcttggcctgatgtatgtgtactggacccagctaaacatgtttcagactctgaagtacctcgcaatcttgggcagcgttacttttctggctggcaaccggatgctggcgcaacaggcagtgaagcgcacagcccactag

SEQ ID NO: 203542 - DNA, 1038 bp, synthetic construct
  misc_feature 1..1038: note = Description of Artificial Sequence: Synthetic coding sequence
  source 1..1038: mol_type = other DNA
gtgagcccccagggcagcagcaccgtgttcctgctggccctgaccattattgcctctacttgggctctgacgccaacacattacctgacaaaacacgatgtcgaaagactgaaagccagtcttgacagaccatttaccaacctcgaatctgctttttactcaatcgtaggattgtcttctctgggcgcgcaggtgcctgatgccaagaaagcctgcacctatatccgatccaaccttgacccttcaaacgttgattcactgttttatgccgctcaggccagccaggcactttcaggatgcgaaatttcaatttccaatgaaactaaagatctgctgctggcagctgtgtccgaagacagctccgttacgcagatctaccacgcagtggccgctctgtctgggttcggtctacccctggcctcccaagaggctctcagcgccctgactgctcgcctgtcaaaggaggaaaccgttctcgcccgagtctggtcaactgtgctagaaagccggtctttgttctctaagagaactgttcaggccctgcagaccgccagccatctttcccaacaggctgatttgagatcaatcgtagaggagatcgaggacttggtggccagactcgatgagctgggaggggtgtacctgcagttcgaggaggggctcgaaaccacggccctgttcgttgctgcaacttacaagttaatggaccatgtggggacggagccatcgatcaaggaggatcaagtgatccagctgatgaatgcaatttttagcaagaagaactttgagagcttgtccgaagccttttcagttgcctctgcagcggcggtgctttcccacaatagataccacgtcccggtggtagtagtacctgaagggtctgcaagcgatacacacgaacaggcaatcttgcgcctgcaagtgactaatgtgttgagccaacctctgacccaggctacagtgaagctggagcacgctaagtccgtcgcaagtagggctactgtgctgcagaaaaccagtttcacaccggtcggatag

SEQ ID NO: 203543 - DNA, 1848 bp, synthetic construct
  misc_feature 1..1848: note = Description of Artificial Sequence: Synthetic coding sequence
  source 1..1848: mol_type = other DNA
atggccccccccggcagcagcaccgtgttcctgctggccctgaccataatcgccagcacctgggccctaaccccgactcactatttgactaagcacgacgtcgagagactcaaggccagtcttgaccgtccctttaccaatctggagtccgctttctacagtattgtggggctatcctctttgggtgcacaggtcccagacgcaaagatatctattagcaacgagacaaaagatctacttttggcagctgtgtccgaggactctagtgtgactcaaatttaccatgccgtagcagcactctccgggtttggcctcccactcgcatcccaagaagctttaagtgcacttactgcacgtctgtccaaagaagaaaccgtgctggccaccgttcaggccttgcaaaccgctagccacttgagccagcaggcagatcttagaagcatcgtcgaggagatcgaggatctggtggctagattagacgagcttggaggagtatatctccagttcgaggagggcctggagacaacagctttgttcgtcgccgcaacttacaaactcatggaccatgtgggcactgagcccagcataaaggaagaccaagtgattcaattgatgaacgcgattttctcgaaaaaaaacttcgaatccttatccgaggccttttccgtggccagcgccgcagccgtcttgtcccacaacagataccacgtacctgttgtggtggtcccggaaggttcggcaagtgatactcatgaacaggcaatccttagactccaggtgactaacgtgctatcacagccgctgactcaggccacggtaaagctggagcatgccaagtccgtggcctctcgggccactgttcttcagaaaacatcgttcacacccgttggcgatgtgtttgaactcaatttcatgaacgtaaagttctcctctggctattacgactttcttgtcgaggtcgaaggtgataaccgatacattgcaaacaccgttgaactcagggttaagatctccactgaagtcggcatcacgaatgttgatctgtcaacagtcgataaagatcaatcaatcgctcctaagaccacccgcgttacctatcccgcaaaggctaaggggacgtttatcgcagattcccaccaaaacttcgccttgttcttccagctcgttgatgtcaatacaggggccgagttgacaccccatcaaactttcgtgagacttcacaaccagaaaactgggcaggaagtggtgtttgtcgccgagcccgacaacaagaacgtgtataaatttgaactcgacacgagcgagcggaagatcgagttcgattctgcctcgggcacatatacgctttatcttatcattggggacgctacccttaagaaccccatactgtggaatgtggccgacgtggtgataaaatttcctgaggaggaggcaccaagtacagtgctgagccagaacttatttacacctaagcaggagatacagcacctctttcgcgagccggagaagcggcccccaaccgtggtgtctaacaccttcactgcactcattctttctcccctcctgctgctcttcgcgttgtggattagaataggcgccaacgtaagcaattttacgttcgccccctcgacaatcattttccacctaggccacgctgctatgctgggtctgatgtacgtctattggacacaacttaacatgttccaaactctgaagtatctggccatactggggtcagtgactttcctcgccggcaatcgcatgctcgctcaacaggcagtgaagaggatagcggccgagcaaagctccagactagctaagtatcgtacgcttagaactgctcattag

SEQ ID NO: 203544 - DNA, 441 bp, synthetic construct
  misc_feature 1..441: note = Description of Artificial Sequence: Synthetic coding sequence
  source 1..441: mol_type = other DNA
ggcacctacaccctgtacctgatcatcggcgacgccaccctgaagaatcccattctctggaacgtggctgacgtcgtcattaagtttcctgaagaagaggctcccagtacagtattatcgcagaatttgttcacaccgaagcaggaaatccagcacctattccgtgaacctgagaaaagacctccaacagtcgtcagtaacacctttactgctctcatcctatcaccgcttctcctattatttgccctatggatcaggattggcgccaatgtgagcaatttcactttcgccccatccacgatcatattccacctggggcacgccgaacagcacatctccagccgtcgtaagatggaaattctcaagaccgaatgtcaggaaaaggagtcacggactatacattccatgcgaaggaaaatggaaaaaaagaattttatctag

SEQ ID NO: 203545 - DNA, 1038 bp, synthetic construct
  misc_feature 1..1038: note = Description of Artificial Sequence: Synthetic coding sequence
  source 1..1038: mol_type = other DNA
atggccccccccggcagcagcaccgtgttcctgctggccctgaccatcatcgcctccacatgggctctgacaccaacccactatttaaccaaacacgatgtagagcgactgaaggcatcactggatagaccctttaccaatctggagagcgccttctattccattgtggggttgtccagtcttggggctcaggtccctgacgcaaagaaggcatgtacatatatccgctctaatctggatcccagtaacgtggatagtctgttttacgctgcccaagcctcacaggcactctccggatgcgagatcagcatttcaaacgaaaccaaggacctcctgctcgctgccgtatcagaagattcctctgtcacccaaatctaccacgctgttgcagcgctaagcggcttcggcctgccccttgcaagccaggaagccctgtctgccctaaccgcaaggctctccaaagaagagacagttctcgcccgcgtttggtccaccgtcttagagagcagaagtctgttcagtaagagaactgtgcaggcccttcaaacagcttcccacctgtcccaacaggccgatctccgttccattgtcgaggagatcgaggatcttgtggcgcgactagatgagctcggcggggtgtacctgcaatttgaagaggggctagaaactacggcgctttttgtggccgctacctacaaattgatggatcacgttggtaccgagcccagcatcaaggaagaccaggtgattcagctgatgaatgctatattcagcaagaagaactttgagagcctgtccgaggccttttccgtggctagcgctgccgccgtcctatcgcacaataggtaccatgtgcccgtcgtggttgtgcctgaaggctctgccagtgatacacacgagcaggctattttgcgcttgcaagtaacaaacgtcctctctcagccactaactcaggctacagttaaattggagcacgccaaatctgtcgcttcccgcgctaccgtcctacagaagacaagctttacccccgtaggatag

SEQ ID NO: 203546 - DNA, 417 bp, synthetic construct
  misc_feature 1..417: note = Description of Artificial Sequence: Synthetic coding sequence
  source 1..417: mol_type = other DNA
gagctggacaccagcgagcggaagatcgagttcgacagcgccagcgggacctacactttgtatctgataataggagacgcaacgctgaaaaatccgattttgtggaacgtcgccgacgttgtgatcaagtttcccgaggaggaggctccttcaactgttctctcgcaaaatttattcacaccaaaacaggaaatccagtggatccggattggggccaatgtaagtaactttacgtttgcaccttcaacgatcattttccacctgggtcacgcagctatgctgggcctgatgtacgtgtactggacccagcttaacatgttccaaaccctgaaatatctggccatcctgggcagtgttacatttttagccgggaaccgaatgctagcccagcaggcagtaaaacgaacagccgaatag

SEQ ID NO: 203547 - DNA, 417 bp, synthetic construct
  misc_feature 1..417: note = Description of Artificial Sequence: Synthetic coding sequence
  source 1..417: mol_type = other DNA
gagctggacaccagcgagcggaagatcgagttcgacagcgccagcggcacgtacactctgtatctgataattggagatgccactttaaagaatccaatcctttggaatgtggcggatgtggttattaagtttccagaagaggaagccccctcaactgttctttctcagaatttgttcacacccaagcaggaaatacagtggattagaatcggcgcgaatgtaagtaacttcacattcgcgccttctactattatctttcacctaggccacgcagcgatgctggggttgatgtacgtttactggactcaattaaatatgttccagactctgaagtatctcgctattctcgggagcgtgacatttctggcaggtaatagaatgcttgcgcagcaagctgtaaagcggactgcccattag

SEQ ID NO: 203548 - DNA, 504 bp, synthetic construct
  misc_feature 1..504: note = Description of Artificial Sequence: Synthetic coding sequence
  source 1..504: mol_type = other DNA
atgcagcggaccgtgcaggccctgcagaccgccagccacctgagccagcaggccgatcttcgctctattgtcgaggaaatagaagaccttgtcgcccgccttgatgaactcggaggagtgtaccttcagttcgaggagggcctagagacaaccgccctctttgtggctgccacgtacaagctgatggaccacgttgggactgaacccagcattaaagaagaccaggttatccagcttatgaacgccatattcagcaagaaaaatttcgagtccctttccgaggcttttagcgtggctagcgccgcggctgttttatcccataatcggtaccatgtgccagtggtggtcgttccggaaggctcggctagcgacactcatgaacaagcaatcctgcgactgcaagtgactaacgtacttagtcaaccacttacccaggccacagtcaagctcgagcatgcaaaatcagtggcctcacgtgccaccgttctacagaagacttcctag

SEQ ID NO: 203549 - DNA, 444 bp, synthetic construct
  misc_feature 1..444: note = Description of Artificial Sequence: Synthetic coding sequence
  source 1..444: mol_type = other DNA
tgaggcacctacaccctgtacctgatcatcggcgacgccaccctgaagaaccccatcctctggaacgtggccgatgtcgttatcaagtttccagaagaggaggcgccttctactgtgctgagtcagaacctattcactcccaagcaggagatccagcacctctttcgtgagcctgagaagcggccaccaaccgtggtatctaacaccttcacagcccttatcctgtccccgctcctgctgctgtttgccctgtggatccggatcggcgccaatgtgagcaactttaccttcgcacccagcactatcatcttccacctaggtcatgccgagcagcacattagttcaaggagaaagatggaaattctcaaaaccgagtgtcaggagaaagagtcaaggacaatccactccatgcgaaggaagatggagaagaagaactttatctag

SEQ ID NO: 203550 - DNA, 936 bp, synthetic construct
  misc_feature 1..936: note = Description of Artificial Sequence: Synthetic coding sequence
  source 1..936: mol_type = other DNA
atgcagcggcccggccccttcagcaccctgtacggccgggtgctggcacctctgccaggaagagcgggaggtgcggcttcagggggtggaggaaattcttgggacctccctgggtctcatgtgaggttgccgggaagggctcagtcgggtacacgcggcggggctggaaatacctctacatcttgcggtgatagtaactcgatctgtcccgcccctagcaccatgagtaaggctgaggaagcaaaaaagctggcggggagagctgcagtggaaaatcatgtccgtaataatcaagtgctgggaataggaagtgggtctactattgtccatgcggttcagcggatagctgagagggtcaaacaggagaacttaaatctagtgtgcatcccaacctccttccaggcaaggcagttaatccttcagtatggtttgacactgagtgatctcgatagacatcctgagatcgatctggctattgatggagccgacgaggtagatgctgatctgaatttgatcaagggggggggagggtgcctgacccaagaaaagatcgtggctggctatgcatctaggttcattgtgattgccgatttcaggaaggactcaaagaatcttggtgaccagtggcacaaaggcatccccatagaggtgatcccaatggcttacgtcccagtgtctcgcgctgtcagccaaaaattcgggggagtggtggagctgcgcatggccgttaacaaggcagggcctgtggttaccgacaacggaaattttattctcgactggaagtttgatcgggtgcacaaatggagtgaagtgaacactgccattaagatgataccaggcgtcgtggacaccggtctgttcataaacatggctgaaagagtatatttcgggatgcaagacgggtcagtgaacatgcgggaaaaaccattctgttag

SEQ ID NO: 203551 - DNA, 534 bp, synthetic construct
  misc_feature 1..534: note = Description of Artificial Sequence: Synthetic coding sequence
  source 1..534: mol_type = other DNA
gcccggcagctgatcctgcagtacggcctgaccctgagcgacctggaccggcaccccgagattgatctggcaatcgacggcgctgacgaagttgacgcagaccttaatttaattaaaggcgggggagggtgcctgacacaagaaaaaatcgtcgctgggtatgcctcccgctttatcgtcatcgccgactttaggaaggatagcaagaatctgggggatcagtggcataaaggtattccaatcgaagttattcctatggcctacgtcccagtgtcacgggcggtgtcacagaaatttgggggggtggtggaactgcgtatggctgtgaataaagctggccctgtggtgactgataatggtaacttcattctcgattggaagttcgaccgcgtccataagtggtctgaggttaacactgcaatcaaaatgattccaggggtagtggatactgggttattcattaacatggcggagagggtttactttggaatgcaggacggttcggtgaacatgcgggaaaagcctttctgctag

SEQ ID NO: 203552 - DNA, 492 bp, synthetic construct
  misc_feature 1..492: note = Description of Artificial Sequence: Synthetic coding sequence
  source 1..492: mol_type = other DNA
atgcggatcgagaagtgctacttctgcagcggccccatctaccccgggcatggaatgatgttcgtccgaaacgactgcaaggtattccgattctgtaagtctaagtgtcataaaaactttaaaaaaaagaggaacccgagaaaggtcagatggacaaaggcatttcgaaaagctgccggtaaagaacttacggtggacaactcttttgaattcgagaaaaggagaaacgagcctataaaatatcagagggaactatggaacaagaccatcgacgctatgaagcgcgtagaggaaattaagcagaagcgtcaggcaaaattcatcatgaatcgtctgaaaaaaaacaaagaactgcagaaggtccaagacattaaggaggtgaagcagaacattcatctaatcagagcccctctagctgggaagggcaaacagctcgaagagaagatggtacaacagctgcaggaagatgtggatatggaggacgcaccttag

SEQ ID NO: 203553 - DNA, 1161 bp, synthetic construct
  misc_feature 1..1161: note = Description of Artificial Sequence: Synthetic coding sequence
  source 1..1161: mol_type = other DNA
atgtgcagcagcgtggccgccaagctgtggttcctgaccgaccggcgcatcagggaagattacccacaaaaggaaatcctccgtgctctgaaggccaaatgctgcgaggaggagctggacttccgggctgttgtgatggatgaggttgtgctgacaattgagcagggaaacttaggactccgtattaacggcgagctcattactgcctatcctcaggtggtggttgtcagggtccccacaccttgggtccagtcagacagcgacatcactgttctccgacatctcgagaagatgggatgccggctgatgaacaggccacaagccattctgaattgcgtaaacaagttctggacttttcaagagctcgctggccacggcgtccctcttccagatacattttcctacggcgggcacgagaactttgccaaaatgattgatgaggcagaagtgctggagttccccatggtggtcaaaaacacgagagggcacagagggaaggcagtgttcttagcgcgcgacaagcatcacctggccgacttgtcccatttaattcgccacgaagccccctacctgttccagaaatatgttaaggaatctcatggcagggatgtgcgcgttattgttgtcggcgggcgagttgtcgggaccatgctgcgatgcagcacggatgggcggatgcagtccaattgtagcctcggtggtgtggggatgatgtgttccctgagcgaacagggcaagcagctcgcaatccaggtttcaaacattttaggcatggatgtctgcgggattgacctgttgatgaaagatgacgggtcattttgtgtgtgcgaagcaaacgcgaacgtggggttcatagcttttgataaggcctgcaatttggatgtcgcaggcataatcgccgattatgccgcgagcctgttaccctctggccgacttacaaggaggatgtctttgctaagtgttgtgagcaccgcaagcgaaacgagcgagccagaattgggcccacctgcgagcacagctgtcgacaatatgagcgccagctcttctagtgttgatagcgaccccgagagcactgagcgggaactcctaactaagctcccaggcggcctatttaacatgaaccagctgctggccaacgagataaaattgctggtcgattag

SEQ ID NO: 203554 - DNA, 1161 bp, synthetic construct
  misc_feature 1..1161: note = Description of Artificial Sequence: Synthetic coding sequence
  source 1..1161: mol_type = other DNA
atgtgcagcagcgtggccgccaagctgtggttcctgaccgaccggcggatcagggaagattatccacagaaggagatcctgagggctcttaaagccaagtgttgcgaggaagaactggatttcagagcagttgttatggacgaggtggtccttacaattgaacagggtaacctagggctgaggatcaatggcgagctgattactgcatatccccaggtggtcgtggttagagtacctactccttgggtacaatcggacagcgatatcaccgtcctgcggcacctggaaaaaatgggctgccggctgatgaaccgcccacaagccatattaaactgtgttaataaattttggaccttccaggagctggcaggccacggggtgcccctgccagacacgttcagctacggcggacatgagaatttcgccaagatgatagatgaggccgaggtcctggaattcccgatggtcgtcaagaacacacgaggtcatagagggaaggcggttttcctagcccgggacaagcaccacctcgccgacctgtcccatcttattcgacacgaggcaccgtatttgtttcaaaagtatgtcaaggagtcccacggtagagacgtcagggtgatcgttgtggggggcagagtggtcggaacaatgctgagatgttctaccgacggtagaatgcagtccaattgttctttgggtggtgtcggaatgatgtgctcactaagtgagcagggcaagcagctggctatccaagtgagtaacatcctggggatggatgtgtgtgggatagatttgctgatgaaagacgacggatcgttttgtgtttgcgaggcaaatgccaacgtcggcttcatcgcctttgacaaggcctgcaatttggacgttgccggaataatcgccgattacgctgcctctctgctgccgagcggaagactaactcggcggatgtcccttctctctgtggtgagtaccgcctccgagaccagcgagccagaactcggtcctcccgcaagtaccgctgttgacaacatgagtgcttcatcatcctcggtggattctgaccccgagtctaccgaacgcgaattactgaccaagctgccaggaggactctttaatatgaaccaattgctggccaacgaaatcaaattactggttgactag

SEQ ID NO: 203555 - DNA, 1161 bp, synthetic construct
  misc_feature 1..1161: note = Description of Artificial Sequence: Synthetic coding sequence
  source 1..1161: mol_type = other DNA
atgtgcagcagcgtggccgccaagctgtggttcctgaccgaccggcgcattcgagaggattatccccagaaggagatcctgagggcactgaaagcaaagtgttgtgaggaagagctcgactttcgggcagtggtgatggacgaagttgttttaacaattgagcaggggaacctggggctcaggataaacggcgagttgataacggcttatccccaggtggtcgtggttagagtccctaccccatgggtgcagtcagacagcgacatcaccgtactgcgtcatttagaaaagatgggatgtcggctgatgaatcgcccacaggccattcttaactgtgtgaacaaattttggacttttcaagagttggccggccatggggtccccttacctgatacctttagttacggcggacacgagaactttgctaagatgatcgatgaggccgaggtgcttgaattcccaatggtggtaaagaacacccggggccaccgcggtaaagccgttttcctcgcgcgcgacaaacaccacctcgccgatctgagtcacctcattcggcacgaggccccttatcttttccagaaatacgtgaaggagtcacacggccgggacgtgcgcgttatcgttgtgggcggccgtgtggtgggaaccatgctgcggtgctcaaccgatggcaggatgcaatctaactgctctttagggggtgtcgggatgatgtgctccctaagtgaacaggggaagcagctcgccattcaggtgtccaacattctgggaatggacgtgtgcggaatcgatctcctgatgaaggatgatggctcattttgtgtgtgcgaagctaacgccaacgtgggtttcattgcatttgataaggcatgcaacctggacgtcgccggaattatagccgactatgccgctagccttctgcctagcgggaggctgacacggcgcatgagtctcctgtccgttgtgtccactgccagcgagacctccgagcctgaactgggcccgcctgcctctaccgctgtggataatatgagtgctagttcctcatctgtagatagcgacccagaatcaaccgaacgcgagctgttaactaaactgccaggcgggctgtttaatatgaatcaactccttgccaatgagattaaacttctagtggactag

SEQ ID NO: 203556 - DNA, 288 bp, synthetic construct
  misc_feature 1..288: note = Description of Artificial Sequence: Synthetic coding sequence
  source 1..288: mol_type = other DNA
atgtgcagcagcgtggccgccaagctgtggttcctgaccgaccggaggatccgcgaagattatccacagaaggagattctgagggcacttaaggcaaagtgttgcgaagaggaactggacttccgagccgttgtcatggacgaggtcgtcctgacgattgaacagggtaacctcggccttagaattaacggcgagctgatcaccgcctacccacaggtcgtagtagtgagggtgccaaccccttgggttcaatccgattctgacataactgtgcttagacacctgtag

SEQ ID NO: 203557 - DNA, 345 bp, synthetic construct
  misc_feature 1..345: note = Description of Artificial Sequence: Synthetic coding sequence
  source 1..345: mol_type = other DNA
atgtgcagcagcgtggccgccaagctgtggttcctgaccgaccggaggataagagaggactacccgcagaaagagatcctgcgggcccttaaggccaaatgttgtgaagaggaactggatttccgcgccgtggtcatggatgaggtagtgttaacaattgaacagggcaatcttggcttaagaatcaacggagaacttataacggcttatccacaagtggttgtggtgcgagtccccaccccttgggtgcagagtgattctgatatcacagtgctacgccatctggaaaagatggggtgcagactgatgaatcggccccaggccatcctcaactgcgttaactag

SEQ ID NO: 203558 - DNA, 645 bp, synthetic construct
  misc_feature 1..645: note = Description of Artificial Sequence: Synthetic coding sequence
  source 1..645: mol_type = other DNA
atgggccggcggcccgcccggtgctaccggtactgcaagaacaagccctatccgaagagcaggttctgtcgtggcgtgcctgacgcgaagatcagaatcttcgatctcggacgtaaaaaagctaaggttgatgaattccctctgtgcggacacatggtaagcgatgaatacgagcaactctcctcagaggctctcgaggccgctaggatttgcgccaacaagtacatggttaagtcatgcggaaaggacggattccatatacgggtgcgcctgcatccttttcatgtgatcaggataaataaaatgctttcttgcgccggggccgaccgcctgcagacagggatgaggggagcttttggaaaacctcaagggacagtggcccgagtccatatcggtcaagtgattatgtccatcaggaccaagcttcagaacaaggagcacgtaatcgaagccctgcgtcgtgccaagttcaagttccctggccgtcaaaaaatccacataagcaagaagtggggttttacaaaatttaatgccgacgagttcgaggatatggtggccgagaaacgcctgattcccgatggctgcggagtgaaatatataccaaataggggccccctggacaaatggcgtgctctgcactcctag

SEQ ID NO: 203559 - DNA, 645 bp, synthetic construct
  misc_feature 1..645: note = Description of Artificial Sequence: Synthetic coding sequence
  source 1..645: mol_type = other DNA
atgggccggcggcccgcccggtgctaccggtactgcaagaacaagccctatcctaaatctaggttctgtagaggagtcccggatgcaaagattcgtatctttgatctgggcagaaagaaggcgaaggtggatgagtttccactctgtggccatatggtaagcgatgaatacgaacagctgagctctgaagctctggaggcagctaggatttgtgccaataagtacatggtcaaaagctgtgggaaagacgggtttcacatccgcgtacggctgcacccgttccacgttatcaggattaataaaatgctttcatgcgctggcgccgatcgcttgcagacaggaatgaggggcgccttcgggaaaccccaaggtaccgtggcgagggttcatatcgggcaggtgatcatgtcaatccggaccaagctacagaacaaggagcacgttattgaagccctgcgacgcgctaagtttaagttccctggacggcagaagatacacatctctaaaaagtggggattcactaagttcaatgccgacgagtttgaagatatggtggcagagaaaaggctcattcccgatggttgtggtgtgaagtatattccaaatcgtggccccctcgataaatggcgcgccctgcacagttag

SEQ ID NO: 203560 - DNA, 645 bp, synthetic construct
  misc_feature 1..645: note = Description of Artificial Sequence: Synthetic coding sequence
  source 1..645: mol_type = other DNA
atgggccggcggcccgcccggtgctaccggtactgcaagaacaagccttaccccaagtctaggttctgccgaggagttccagacgcaaagatccgaatttttgatctgggccgcaagaaggcaaaggtcgacgagttcccattgtgcggccacatggtgtcagacgaatatgaacagctgagcagcgaggcactggaggcagctcgaatttgcgcgaacaagtacatggttaaaagctgtggaaaggacgggtttcacatccgggttagactccatccttttcatgtgattaggattaataaaatgctatcatgcgccggcgcagacagattacagaccggtatgagaggtgcctttggaaagcctcaggggacggtggccagggtacacattggacaggttattatgagtatcagaactaagctgcagaataaggagcatgtgattgaagcgctgaggcgggctaaatttaagttccccggacggcagaaaattcacatcagcaaaaaatggggattcactaagttcaacgccgacgaattcgaagatatggtcgcggagaagcggctgatccctgatggctgcggcgttaaatatatccctaatcgcgggcctctagataaatggcgcgctttgcatagctag

SEQ ID NO: 203561 - DNA, 606 bp, synthetic construct
  misc_feature 1..606: note = Description of Artificial Sequence: Synthetic coding sequence
  source 1..606: mol_type = other DNA
atgggccggcggcccgcccggtgctaccggtactgcaagaacaagccatatcctaagagccgtttctgtaggggggtgcccgacgcgaagatcagaatcttcgaccttgggcggaaaaaggccaaagtagacgagttccctctgtgcggccacatggtgagcgatgagtacgagcaactgtcatccgaggctctcgaggcggctcggatctgcgctaacaagtacatggttaagtcctgcggcaaggacggcttccacataagagtcagactgcacccatttcatgtgatccgaatcaacaaaatgctgtcctgtgcaggagcagaccggttacagactgggatgcggggcgcattcgggaagccacagggaactgtagcacgagttcatatcggacaggttatcatgtccattagaacaaagctccagaataaggagcacgtgatagaagcgctgcgccgggcaaagttcaaattccctggccggcaaaaaatccatataagtaaaaaatggggatttaccaaatttaacgcggatgagtttgaggacatggtcgccgagaagagactgatcccagacggctgcggtgttaagtatattccctag

SEQ ID NO: 203562 - DNA, 327 bp, synthetic construct
  misc_feature 1..327: note = Description of Artificial Sequence: Synthetic coding sequence
  source 1..327: mol_type = other DNA
cccaagagccggttctgccggggcgtgcccgacgccaagatccggatttttgatcttggaaggaaaaaagccaaggtcgacgaatttcctctttgtggacatatggtgtcagacgaatacgagcaattatcgagcgaagcactggaggcagcaaggatctgcgcgaataagtatatggttaaaagctgtggaaaagatggatttcatatccgggtaagactgcatcctttccacgttatccgaataaacaagatgttgtcctgtgccggcgcggatcgacccaccctgctctgtcagtgctgggagacatcccgcaatacttcttag

SEQ ID NO: 203563 - DNA, 546 bp, synthetic construct
  misc_feature 1..546: note = Description of Artificial Sequence: Synthetic coding sequence
  source 1..546: mol_type = other DNA
atgggccggcggcccgcccggtgctaccggtactgcaagaacaagccgtaccctaagagtcgattctgccggggagtccccgacgctaagattaggatttttgatctgggtcgaaagaaggcaaaggtggacgaattccccctctgcgggcacatggtctcggatgagtacgaacagctgtcatccgaagctctggaggctgccagaatttgtgcaaataagtatatggtcaagagttgcggcaaggatggattccatattagggtgcgtttgcacccattccatgtgatcaggatcaacaagatgctgagttgcgccggggctgatagaagcacttcacaaagatctggtgccagccctagttccatgttaatgaatttgaagacatggtggctgaagtcaggatcctcgcaaatggccgttggcagtagcaccagccctattgtggcgctgtggacctccggagggccatgtacacacgagggatttcagtgcgccgccccattgctgattctgaccaacaagttttactttcttagcacgtag

SEQ ID NO: 203564 - DNA, 537 bp, synthetic construct
  misc_feature 1..537: note = Description of Artificial Sequence: Synthetic coding sequence
  source 1..537: mol_type = other DNA
atggcccaggaccagggcgagaaggagaaccccatgcgggagctgcggattcggaaattgtgcctgaatatctgtgtaggggagtcgggagatcgattaacaagagccgccaaagtgcttgaacagctcacagggcagactcctgttttcagtaaggctagatacactgtgaggtcgttcggcatacgtagaaacgagaaaatcgccgtgcactgcacggtgcggggcgccaaggctgaagagatactggaaaagggacttaaagtgcgggaatacgagctgcggaaaaacaacttttccgacaccggcaacttcggatttggaattcaggagcatatagacctggggattaagtatgacccatccatcggcatctacggcttagatttctacgtggtccttggcaggccaggcttttcaatcgccgacaagaaaagacgtactggttgtatcggggctaagcatcgcatcagcaaagaggaagcaatgaggtggttccagcagaagtacgacgggatcatcctgcccggcaagtag

SEQ ID NO: 203565 - DNA, 396 bp, synthetic construct
  misc_feature 1..396: note = Description of Artificial Sequence: Synthetic coding sequence
  source 1..396: mol_type = other DNA
caggaccagggcgagaaggagaaccccatgcgggagctgcggatccgaaagctatgtctgaacatatgcgttggtgagtccggcgacagattaactcgggccgctaaggttctggaacagttgactggtcagaccccggtctttagtaaagccagatacacggtccgctcattcggcattaggcgtaacgagaaaattgccgtgcattgcacagtgcggggggccaaggctgaggagatactggagaaggggctgaaagtgcgagagtacgagcttagaaagaacaacttcagtgacactggaaactttggattcgggatacaagagcacatcgatctcggtattaaatatgacccatctattggtatctacggtttggacttttacgtcgtgtag

SEQ ID NO: 203566 - DNA, 525 bp, synthetic construct
  misc_feature 1..525: note = Description of Artificial Sequence: Synthetic coding sequence
  source 1..525: mol_type = other DNA
caggaccagggcgagaaggagaaccccatgcgggagctgcggatcagaaagttgtgtttgaatatttgtgtgggagaatctggggatagactgactcgtgccgccaaggtacttgagcaactcacaggtcagaccccggtgttttcaaaggccaggtataccgtcaggtccttcggaattagaagaaatgaaaagattgctgtgcactgcaccgttcgcggggccaaggcagaggagatcttagaaaagggcctgaaggtgcgggaatacgaactgcgaaaaaataacttttccgacaccggtaactttggattcggtatacaggagcacattgacctggggataaaatatgacccttctattggcatttatgggctcgacttttatgtcgtgctcggccgacccggcttcagcatagcggataagaagagaagaacaggatgcattggcgcaaaacacagaatcagcaaagaggaggctatgcggtggtttcagcagaaagtgaaattgatttacctcaaatag

SEQ ID NO: 203567 - DNA, 498 bp, synthetic construct
  misc_feature 1..498: note = Description of Artificial Sequence: Synthetic coding sequence
  source 1..498: mol_type = other DNA
atgccccccaagttcgaccccaacgagatcaaggtggtgtacctgagatgcacgggtggggaagtaggtgcgacatcagctctcgctcccaagattggaccccttggtctcagcccaaagaaggtcggcgacgatatcgctaaagccaccggcgactggaagggtctgcgaatcactgtgaaattaaccattcagaaccggcaagcacagatcgaggtggtaccaagtgccagcgcgttaataatcaaagctctgaaggaacccccccgggaccgcaagaaacaaaaaaatatcaagcattctggaaacatcacatttgatgagatcgtcaatatcgcgagacagatgcgccaccgatctcttgccagggagctgtccggtacaataaaagagattctaggtacagctcagtctgttgggtgtaacgtggatggtaggcaccctcacgatataatagacgacataaatagcggggctgtggagtgtccagcctcttag

SEQ ID NO: 203568 - DNA, 399 bp, synthetic construct
  misc_feature 1..399: note = Description of Artificial Sequence: Synthetic coding sequence
  source 1..399: mol_type = other DNA
atgccccccaagttcgaccccaacgagatcaaggtggtgtacctgaggtgcaccggcggggaagtcggggcgacatcagctttggccccaaaaattggacccctcggcctgattgaggtggtccccagcgccagcgctctgattatcaaggctttgaaagagcctcctcgcgacaggaagaaacagaaaaatattaagcactccggaaatatcacatttgacgagattgtcaacatcgccagacaaatgagacaccgcagccttgcacgggaattgtctggtaccatcaaagagatcctgggcaccgcccagtcggtcggctgcaacgtcgatggccgccatccccacgatatcatcgacgacatcaattccggagctgtggagtgccccgcctcatag

SEQ ID NO: 203569 - DNA, 636 bp, synthetic construct
  misc_feature 1..636: note = Description of Artificial Sequence: Synthetic coding sequence
  source 1..636: mol_type = other DNA
atggcccccagccggaacggcatggtgctgaagccccacttccacaaggattggcagaggcgtgtggctacgtggttcaatcaaccggcccggaaaattcggcgtcggaaggccaggcaagccaaagccagaagaatcgcaccgcgaccggccagcggacccatcagaccgatcgtaagatgtcctaccgttcggtatcacacgaaagtgcgtgccggacgtgggttcagtctcgaggaactgcgagtggcaggcatccataagaaggtggcccgaacgattgggataagcgtagatccgcggagaaggaataaatctacggagtctctgcaagctaacgttcagaggctgaaagaatatcggtcaaagctgatcttgtttcccaggaaaccctctgctcctaaaaaaggagatagctcggctgaggaactcaaattagctactcagctcactggcccagttatgccagtgaggaatgtctataaaaaagagaaagctcgtgtcattacagaagaggaaaagaatttcaaggccttcgcttccctgaggatggcgcgtgccaatgcccgtctgttcggtattcgcgctaaaagagcgaaagaggcagctgaacaggacgtagaaaaaaagaaatag

SEQ ID NO: 203570 - DNA, 636 bp, synthetic construct
  misc_feature 1..636: note = Description of Artificial Sequence: Synthetic coding sequence
  source 1..636: mol_type = other DNA
atggcccccagccggaacggcatggtgctgaagccccacttccacaaagactggcagcgacgggtggccacatggtttaatcagccagccaggaaaatccgccgccgcaaagccagacaggcaaaagcccgacgcatagctccccgccctgctagtggacctataaggcctatcgtgcgctgtccaactgtgcgatatcacacgaaggtgcgtgctgggcgcggattttctctagaggaactgcgagtggctggaatccataaaaaagtcgccagaaccattggcatttctgtggatccacggagacgcaacaaaagcaccgagtcattacaggctaacgtgcagcgcctcaaagaatacagaagcaaactcattctgtttccccgtaagccctcagcccccaagaaaggtgacagcagtgccgaagaactcaagttggccacgcagctgactgggccagttatgccagtccgtaacgtatataagaaagagaaagcacgcgtgattacagaagaagaaaaaaactttaaggcgttcgcctctctccgcatggcgcgggctaatgcgcgtctcttcggtattcgcgccaagagggccaaggaggccgcggaacaggacgtcgaaaaaaagaaatag

SEQ ID NO: 203571 - DNA, 495 bp, synthetic construct
  misc_feature 1..495: note = Description of Artificial Sequence: Synthetic coding sequence
  source 1..495: mol_type = other DNA
atggcccccagccggaacggcatggtgctgaagccccacttccacaaagattggcagcgtagggttgccacgtggttcaatcagcctgcaaggaagattaggaggcgtaaagcgcgacaggccaaggcccgtcggatcgccccccggccagcctctggcccaatccgtcccattgttcgctgtcccaccgtccggtaccatactaaagtccgcgccggaagaggattctccttggaagagttaagggtggccggcattcacaagaagggtgattccagcgcggaagagttaaaattggcgacacagctcaccggccctgtgatgccagttcgtaatgtgtacaaaaaagagaaggcccgagtaatcactgaggaggaaaaaaattttaaggcattcgcatcactgcgcatggcacgagctaacgcgagactgtttgggattagggctaaaagggccaaagaggccgccgaacaggatgtcgagaagaagaagtag

SEQ ID NO: 203572 - DNA, 615 bp, synthetic construct
  misc_feature 1..615: note = Description of Artificial Sequence: Synthetic coding sequence
  source 1..615: mol_type = other DNA
atgggcgcctacaagtacatccaggagctgtggcggaagaagcagagtgacgtgatgcgtttcctcctcagagtcagatgttggcagtatcgacagctaagtgctctgcatagagcgcctagacctactagacctgacaaggccagaagattgggctacaaagcaaagcaagggtatgtaatctataggatccgggtccggagggggggccgcaagcgaccggtaccgaaaggtgcaacttatggtaaacccgtgcaccacggcgtgaaccagctgaaattcgctcggtcccttcaatccgttgctgaggaaagagcaggcaggcattgtggagccctgagggtgctaaatagttactgggtgggcgaggacagcacctacaagttctttgaagtcatccttattgatcctttccacaaagccatacgtcgcaatccggacacccagtggatcaccaaaccggtgcacaaacaccgcgagatgcgtgggctgacaagcgccggcaggaaaagccggggattaggtaaaggacataaatttcaccacacaatcggaggatcacggcgtgctgcctggaggcgtcgcaatacgcttcagctacataggtacagatag

SEQ ID NO: 203573 - DNA, 615 bp, synthetic construct
  misc_feature 1..615: note = Description of Artificial Sequence: Synthetic coding sequence
  source 1..615: mol_type = other DNA
atgggcgcctacaagtacatccaggagctgtggcggaagaagcagtctgatgtgatgaggttcctactgcgggttagatgttggcagtacaggcagctgtctgccctacatcgggcccctcgtcctactcggccggacaaggccaggcgacttggctacaaggctaaacagggatacgtcatttataggattagagtgagaagagggggcaggaaacgacctgtccccaaaggcgccacctacggtaaaccagtgcatcacggtgtaaaccagctgaagttcgcaagaagcctgcagtccgtggccgaagaacgcgctgggaggcactgcggcgctctccgcgtgttaaactcgtactgggtgggagaagactccacatataaattcttcgaggtgattctcatcgacccttttcacaaggcaatcagacggaatccggatacacagtggatcaccaaacctgttcacaagcaccgcgaaatgagaggactgaccagcgccggtagaaaaagtcgtggactgggtaagggacacaagttccaccacacaattggggggagccggcgcgcggcctggaggcggaggaacactctgcagctgcacagataccgatag

SEQ ID NO: 203574 - DNA, 528 bp, synthetic construct
  misc_feature 1..528: note = Description of Artificial Sequence: Synthetic coding sequence
  source 1..528: mol_type = other DNA
atgggcgcctacaagtacatccaggagctgtggcggaagaagcagtccgatgtgatgaggtttctcttgagagtgcgatgttggcagtaccgccagctttctgccctccaccgggctcccagacctacgaggcccgacaaagccaggagacttggatacaaagcaaaacaaggctacgttatctatcgcatcagggtgagaaggggcgggaggaaacgccccgtgccaaaaggggctacatacgggaaaccggtgcaccatggagtgaaccagttaaagttcgcacgcagcctccagtccgttgctgaagttaatgctggacgccactgtggggcactgagggttctcaacagctattgggtgggcgaggactctacgtacaagttcttcgaggtcattctgatcgacccgttccataaggccatccgccgaaatcccgatacccagtggattaccaagccagtgcataagcatcgggaaatgcgcgggcttacttccgcgggcaggaagtctcgtggcctcgggtag

SEQ ID NO: 203575 - DNA, 615 bp, synthetic construct
  misc_feature 1..615: note = Description of Artificial Sequence: Synthetic coding sequence
  source 1..615: mol_type = other DNA
atgggcgcctacaagtacatccaggagctgtggcggaagaagcagagcgatgtcatgcgctttcttttacgtgtaagatgctggcagtaccggcagctgagcgcactccatcgcgctccccgtcccactcgaccagacaaagcgcgccgcctgggctataaggccaagcagggatatgtgatataccggatccgtgtcagaaggggcggccggaagcggccagtgcccaaaggcgcaacatatggaaagcccgtccatcacggtgtgaaccagctaaaattcgcaaggagcctccagtccgttgctgaagagagggcgggtagacactgtggagccctgagggtgctcaactcctactgggtcggcgaagattccacctataaattcttcgaggtgattctgattgatccgtttcacaaggcgattagacgcaacccagatactcagtggataaccaaacccgttcataagcacagggagatgaggggacttacttctgctgggcggaaatctcggggactgggaaagggccataaatttcatcataccattgggggatcgcgccgagcagcctggaggagacgcaacacccttcagctacataggtaccgttag

SEQ ID NO: 203576 - DNA, 615 bp, synthetic construct
  misc_feature 1..615: note = Description of Artificial Sequence: Synthetic coding sequence
  source 1..615: mol_type = other DNA
atgggcgcctacaagtacatccaggagctgtggcggaagaagcagagcgacgttatgagattcttgctcagggttcgatgctggcagtaccggcaattgtcagcactccacagagcccctagaccgacaagaccagacaaagcccggcggttaggctataaggcaaagcaagggtatgtcatctatcgcatccgagtgcgcaggggggggaggaaaagaccagtgcccaagggcgctacctacggcaaacccgtgcatcatggagtaaaccagctgaaatttgcaaggtccctgcaaagcgtagccgaagaaagagcaggtcggcattgtggggccctaagggtgctgaattcttactgggtgggagaggacagcacgtataaattcttcgaagtcatcttaattgatccattccataaagccattaggcgtaacccggatacccagtggattaccaagcctgtccataaacatcgagaaatgagagggttgactagtgccggccgtaaaagtaggggactaggcaaggggcacaaattccatcacacaataggaggctcacgcagggcggcttggaggcgcagaaatacccttcagctccacagataccgctag

SEQ ID NO: 203577 - DNA, 402 bp, synthetic construct
  misc_feature 1..402: note = Description of Artificial Sequence: Synthetic coding sequence
  source 1..402: mol_type = other DNA
atgggcgcctacaagtacatccaggagctgtggcggaagaagcagtccgacgtcatgaggtttctcttaagggtgaggtgttggcagtataggcagttgtccgccctccatcgggccccgcgcccgacgcgcccggacaaagcccggcgcctgggatacaaagccaaacaaggctacgtaatctatcgcatcagggttagacgaggcggtcgcaagcggccggtgcccaagggagcaacctacggcaagcccgtccatcatggagtgaatcagctgaagttcgcgcggtcattgcagagcgtcgccgaggaacgcgcaggtcggcactgtggagctctgcgtgtgctgaattcctactgggtgggcgaggactccacctataagtttttcgaagtgatttag

SEQ ID NO: 203578 - DNA, 525 bp, synthetic construct
  misc_feature 1..525: note = Description of Artificial Sequence: Synthetic coding sequence
  source 1..525: mol_type = other DNA
atgggcgcctacaagtacatccaggagctgtggcggaagaagcagtctgatgtaatgaggttcttgctgcgcgtgaggtgttggcagtaccggcagctatccgcccttcatcgggcgccacgcccaaccaggccagataaggcacgtaggctggggtacaaagccaagcaggggtacgtgatatataggatcagagttagaagaggcggcagaaagaggcccgtccctaagggggccacttacggcaaaccagtacaccacggagtaaatcagcttaaattcgccagatccttacaatccgtcgccgaagaaagggccgggaggcactgtggagcccttagagtgcttaactcctactgggtgggagaagactccacttataagttctttgaggtcatcctcattgacccttttcacaaggctatccggcgcaatcccgacacacagtggatcactaagcctgttcataagcacagggagatgagggggctgacctctgccggacggaagagccgcgggctgtag

SEQ ID NO: 203579 - DNA, 615 bp, synthetic construct
  misc_feature 1..615: note = Description of Artificial Sequence: Synthetic coding sequence
  source 1..615: mol_type = other DNA
atgggcgcctacaagtacatccaggagctgtggcggaagaagcagtcagatgtaatgaggtttctattgagggttcgatgctggcagtatcgccagctgagtgcactccatcgtgcaccacgcccaacacggccagacaaggcacgcaggttgggctataaagctaaacaagggtatgtgatttacaggatcagggtgaggcggggtggcagaaaacggcctgtgccaaagggagccacatatgggaaacccgttcatcacggtgtaaaccagctgaagtttgcccggtctctgcagtctgtcgcggaggaacgcgccgggcgccactgcggagctctgcgcgtcctcaactcctactgggtcggagaggacagcacatataaatttttcgaagtgattctgatagaccctttccataaggctattcgccgcaaccccgatacacagtggattacaaagcctgtacataaacatcgtgagatgagggggctcaccagtgctggaagaaaatccaggggactggggaaaggacacaaatttcaccacacaattggcggcagccgccgcgccgcttggcgcagaaggaatacactacagctccaccgctaccggtag

SEQ ID NO: 203580 - DNA, 180 bp, synthetic construct
  misc_feature 1..180: note = Description of Artificial Sequence: Synthetic coding sequence
  source 1..180: mol_type = other DNA
atgggcgcctacaagtacatccaggagctgtggcggaagaagcagtccgatgtgatgcgcttcctcctgagggtgcgctgctggcagtatagacagctttcagctctgcaccgcgctccccgcccaactagacccgacaaagcacgcagactgggttacaaagcgaagcagggcacatag

SEQ ID NO: 203581 - DNA, 438 bp, synthetic construct
  misc_feature 1..438: note = Description of Artificial Sequence: Synthetic coding sequence
  source 1..438: mol_type = other DNA
atgggcgcctacaagtacatccaggagctgtggcggaagaagcagagcgacgtgatgcggttccttctacgggtgagatgttggcagtacagacagctgagcgcactccacagggcaccccgacccacccgtcctgacaaggccaggagactggggtacaaagcaaagcaggggtacgttatatatcgcatacgggtgaggcgtggggggcgaaaacgcccagtccccaagggcgcaacctatgggaagcccgtgcatcacggtgtgaatcagctgaagtttgccagatcgttgcaatcagttgcagaggagcgagctgggcggcactgtggcgccctacgagtcctgaattcctactggatggaaagccattcacacagcggaggttccgcggttggacagtccagactgaccgctacctccgtaagcagggtttag

SEQ ID NO: 203582 - DNA, 495 bp, synthetic construct
  misc_feature 1..495: note = Description of Artificial Sequence: Synthetic coding sequence
  source 1..495: mol_type = other DNA
atgggcgcctacaagtacatccaggagctgtggcggaagaagcagtccgacgttatgcgtttcttattgagggttcgctgctggcagtaccggcagctttctgctcttcacagggcaccaagaccaacacgtccggacaaagcccgaaggctcggctacaaggccaagcagggatatgtgatatatagaatacgcgtgcgacgcggggggcggaaacgccctgtaccaaaaggggctacatacggtaagccggtgcatcatggagttaatcagctcaaattcgcccgttctcttcaatccgtggcagaagaacgggccgggcggcattgtggagccttacgagtgcacaagcatagagaaatgagagggctcacaagtgcagggagaaaaagccgcggcctcggaaagggacacaagttccaccacactattggcgggtcccgtcgagctgcctggcgccgaagaaatacattacagcttcatcgctatagatag

SEQ ID NO: 203583 - DNA, 441 bp, synthetic construct
  misc_feature 1..441: note = Description of Artificial Sequence: Synthetic coding sequence
  source 1..441: mol_type = other DNA
atgcacatccggaaggccaccaagtacctgaaggacgtgaccctgcagaaacagtgtgtacctttcaggcggtacaatggtggcgtggggagatgtgctcaggcaaaacagtggggctggacacaggggagatggcccaaaaaatctgccgagttcttgctgcatatgctgaagaatgctgaatctaacgcagagctgaaaggattagatgtggactccctcgtaattgaacatatacaggtgaacaaggcccccaaaatgaggaggcggacctatcgcgcgcacggtcgcataaatccctatatgagctcaccatgtcatatcgaaatgattctcacagagaaggagcagattgtccccaaacccgaggaggaagtcgcccaaaaaaagaagatcagccagaaaaagttaaagaagcaaaaactgatggccagggagtag

SEQ ID NO: 203584 - DNA, 555 bp, synthetic construct
  misc_feature 1..555: note = Description of Artificial Sequence: Synthetic coding sequence
  source 1..555: mol_type = other DNA
atggtgcggtacagcctggaccccgagaaccccaccaagagctgcaagtccaggggctctaatctccgggtccacttcaagaacaccagagagactgcacaggccatcaaaggaatgcacatccgcaaggcaaccaaatatctgaaagatgtgactcttcaaaagcaatgcgtaccattccggagatacaatggcggagtagggagatgcgcccaggccaagcaatggggatggacccagggcagatggccaaaaaagtcagcggagttcctgctgcacatgttgaaaaacgccgaatccaacgcggagctgaagggattggacgtcgacagccttgtgatcgaacacattcaggttaataaggcaccaaagatgagaaggagaacctatcgtgcacatggtcggatcaatccctatatgagcagtccatgccacattgaaatgatattaacggagaaggagcagattgtcccaaaacccgaggaagaagtggcccaaaaaaaaaaaatctcccagaaaaaactaaaaaaacaaaagctaatggctagggaatag

SEQ ID NO: 203585 - DNA, 555 bp, synthetic construct
  misc_feature 1..555: note = Description of Artificial Sequence: Synthetic coding sequence
  source 1..555: mol_type = other DNA
atggtgcggtacagcctggaccccgagaaccccaccaagagctgcaaatcccggggctccaatcttcgcgtccactttaagaatactcgggagacggctcaagccattaaggggatgcacatcaggaaggccacgaagtacctgaaggacgtgaccctgcagaaacagtgcgtgccctttcgtcgatataatggcggggtcggtagatgtgctcaggcgaagcagtggggctggacacagggaaggtggcctaagaaatcggccgagtttctcctccacatgctaaagaatgcagagtcaaatgccgagttgaaggggttggatgtggacagtctcgtaatcgagcatatccaggtgaacaaggctcccaaaatgagacgcaggacataccgtgctcatggccgcattaatccatatatgagcagcccctgccacattgaaatgatcttgaccgagaaggagcagatcgtcccgaaacctgaggaagaggtggcccagaaaaaaaagattagtcagaagaaactcaagaagcagaaactcatggcaagggaatag

SEQ ID NO: 203586 - DNA, 573 bp, synthetic construct
  misc_feature 1..573: note = Description of Artificial Sequence: Synthetic coding sequence
  source 1..573: mol_type = other DNA
tgaccccagggcgtggacatccggcacaacaaggaccggaaggtgaggaggaaggagcctaagtctcaggacatttacctgcgcctgctcgtaaagctctatcgcttcctggcccgccgcacgaatagcactttcaatcaggtcgtgttgaagcgtctgttcatgtctcgcactaaccgcccaccgctttctctgtcacggatgattcgcaagatgaagctgccgggccgggagaataagacggccgttgtggttggaaccatcacggacgacgtgcgcgtccaagaagtgccaaagctgaaggtctgtgcattgagagtgacaagtcgtgcaagatccagaatcctccgggctggtggaaaaatcttaacgttcgatcagctggctcttgattctccgaaagggtgcggcacggttcttctgtcaggcccccgtaaaggccgggaggtgtaccgacactttggcaaggcacccggcacaccgcattctcacacgaagccctatgttagaagcaagggccggaagttcgaacgggcaagaggcaggcgcgcttctagagggtacaaaaactag

SEQ ID NO: 203587 - DNA, 408 bp, synthetic construct
  misc_feature 1..408: note = Description of Artificial Sequence: Synthetic coding sequence
  source 1..408: mol_type = other DNA
atgggcgtggacatccggcacaacaaggaccggaaggtgcggcggaaagaacctaagtctcaggatatttacctacgactgcttgttaagctctacagatttttggcacggcgaacgaactccacattcaatcaggtagtgctgaagcgtttatttatgtccagaacaaatagaccccccctgtcactgtcaagaatgattcgcaaaatgaaacttccagggcgggaaaataagactgctgtcgttgtcggaaccattactgacgatgtgcgcgtgcaggaggtgcctaagttgaaagtgtcatggcgaggtctgggccgtcctatcagacccctgctgtactgtgcggtgttgtgctgtgcagtcctgtgctgtctcgtgcatcctcaatcatgccaccgctggtag

SEQ ID NO: 203588 - DNA, 567 bp, synthetic construct
  misc_feature 1..567: note = Description of Artificial Sequence: Synthetic coding sequence
  source 1..567: mol_type = other DNA
atgggcgtggacatccggcacaacaaggaccggaaggtgcggcggaaagagccaaaatcccaggacatctacttaaggttgctggtgaaattgtatagattcctggctcgaaggaccaatagcacttttaaccaggtcgtgttgaagagactctttatgtcccgaaccaaccgcccacccttgtctctgtcaaggatgattcgaaagatgaaactgcccggcagagagaataaaacggcagttgttgtaggaaccatcactgatgacgtgcgtgtgcaggaagtgccaaagctcaaagtatgcgccctgagagttacgtccagggccaggtccaggattctgcgtgctgggggtaagattctcacttttgatcagctggctctggacagccctaaaggctgtgggacagtccttttgtcaggaccccgcaaaggcagagaagtatatagacacttcggaaaagctcccggaacaccacatagccatacaaaaccctatgtaagatctaaaggtagaaaattcgagcgcgctaggggccgcagggccagcagagggtacaagaattag

SEQ ID NO: 203589 - DNA, 480 bp, synthetic construct
  misc_feature 1..480: note = Description of Artificial Sequence: Synthetic coding sequence
  source 1..480: mol_type = other DNA
atgctgtaccggttcctggcccggcggaccaacagcaccttcaaccaggtggtgttaaagcggctgttcatgtcccgcaccaacaggcctcctctcagtttgtcaagaatgattcgaaagatgaaactgccaggcagagagaacaagacagctgtggtagtcggtaccattacagatgacgtgcgggttcaagaggtgcccaagctcaaggtgtgtgcgctgagggtgacctctcgggcccgctcccggatcctgcgagccggaggcaagatcctaacattcgatcagctcgccttggacagccctaaaggttgcggtacagtgctgttaagtggacctcgaaaagggcgagaggtataccgtcatttcgggaaagcacccggcactccgcacagccacacaaaaccgtatgtgcgtagcaagggaaggaaatttgaaagagcgcgcggccgacgcgcatctcgaggatataaaaactag

SEQ ID NO: 203590 - DNA, 795 bp, synthetic construct
  misc_feature 1..795: note = Description of Artificial Sequence: Synthetic coding sequence
  source 1..795: mol_type = other DNA
atgaacatcctgcccaagaagagctggcacgtgcggaacaaggacaacgtggctcgagttcgcagagacgaggcccaggcccgcgaggaggaaaaagaaagggaacgaagagtcctgctagcccaacaggaagcccgtacagagttcctgcgaaagaaggctaggcaccagaatagccttccggagctagaggcagccgaggctggcgcccccggcagcggacctgtcgacttattcagagagttgctcgaagaggggaaaggcgtcattcgcgggaataaggaatacgaggaagaaaagaggcaagagaaagagagacaggagaaggctcttggcatattaacatatcttgggcaaagtgcagcagaggctcagacccagcccccctggtatcagttgcccccaggaaggggaggccccccaccaggcccagctccagatgaaaaaataaagtcacgactcgacccattgcgggaaatgcaaaagcatcttggaaagaagcgccagcacggcggcgatgaaggttcacgcagcagaaaagagaaggaaggcagcgaaaaacaacggccaaaggagcccccgtcactggatcagctgagggccgagagattgcggagagaggccgccgagagatctagagccgaagctctgctggcaagggtacagggccgcgcgctgcaggagggccagcctgaagaagacgagaccgacgaccgccgtcggagatacaatagccagttcaacccacagttagctagaagacctcgacagcaggacccacatctgacccactag

SEQ ID NO: 203591 - DNA, 465 bp, synthetic construct
  misc_feature 1..465: note = Description of Artificial Sequence: Synthetic coding sequence
  source 1..465: mol_type = other DNA
atgaaggccagcggcaccctgcgggagtacaaggtggtgggccggtgcctgccaacccccaagtgtcacaccccccctctgtatcggatgcggatatttgcacctaatcacgtagttgcaaagagcaggttttggtatttcgtctcccaattaaagaaaatgaaaaaatcctccggcgaaatcgtatactgtggacaggtattcgagaaatcccccctgagagtgaagaatttcggaatttggctcaggtacgattctcggtctggaacccacaatatgtatcgcgagtacagggatctcacaacagcgggagcagtgacacaatgctatagagatatgggagcgaggcatagagcacgagctcacagtatacaaatcatgaaggtggaggagatagcggcttcaaagtgccgcagacagcacaagccaaggtttacaacaaagcggcctaacacattcttctag

SEQ ID NO: 203592 - DNA, 1278 bp, synthetic construct
  misc_feature 1..1278: note = Description of Artificial Sequence: Synthetic coding sequence
  source 1..1278: mol_type = other DNA
atgggcggcggcgacctgaacctgaagaagagctggcacccccagacgttaagaaatgtggagaaggtctggaaggccgagcaaaaacacgaagctgagaggaagaaaattgaagagctacaacgtgagcttagggaggagagagcacgagaggaaatgcagcgttacgcggaagatgtcggagccgtgaagaaaaaggaggagaaactggactggatgtatcagggaccaggtggtatggtgaaccgggacgaatacctgctgggcaggccgattgataagtatgtgttcgagaaaatggaggagaaggaggcgggatgcagcagcgaaacaggcttgcttcccggcagcatcttcgcccccagcggagcaaatagtttgctcgacatggctagtaagatcagggaagatccactgttcataattcggaaaaaagaggaggaaaaaaagagagaggtgttaaacaacccggtgaagatgaagaaaattaaggagctgctgcagatgtcactcgagaagaaggaaaagaagaagaagaaggaaaagaaaaaaaagcacaaaaagcataaacatcgttcaagctcatccgaccggtcgagctctgaagacgagcacagcgccggtcgctctcagaaaaagatggctaacagctctcccgtgctgtcaaaagtgcccgggtacgggctccaggttcgaaacagcgaccggaatcagggcctgcaaggcccattgacagctgagcaaaagaggggccatggcatgaaaaatcatagcaggagccgttcttcttcacattcccccccacgccatgcatctaaaaaatctacccgggaggccggcagtagagaccggagatcacgatcgcttggacgacggtctcgctcaccacggccttccaagctccacaattccaaggttaaccgccgcgaaactggtcagacccggagtcctagcccaaagaaggaagtgtaccagagacgacatgcccctggatacacacgtaaactcagtgcagaagagttggagcgcaaaagacaagagatgatggagaatgctaagtggagggaagaagagaggctgaacattctcaagaggcacgctaaagacgaggaaagagagcagcgccttgagaagttagattctagggatggaaaattcattcatagaatgaaactagaaagtgccagcacatcttcactcgaagacagggtcaagagaaacatttatagtctgcagagaacctcagtggcacttgagaagaatttcatgaaacgctag

SEQ ID NO: 203593 - DNA, 483 bp, synthetic construct
  misc_feature 1..483: note = Description of Artificial Sequence: Synthetic coding sequence
  source 1..483: mol_type = other DNA
atgaccaacaccaagggcaagcggcggggcacccggtacatgttcagtcgcccttttaggaagcacggcgtggtaccactagccacttacatgcgtatctataaaaagggggatatagtagacataaagggaatgggcacggtgcagaaagggatgcctcataaatgttaccacgggaagacaggcagagtttataatgtgactcagcacgctgtggggatcgtggtgaacaagcaggtgaagggtaagattctggcaaagaggattaatgtcagaattgaacatattaaacatagtaagtcccgcgactcctttcttaagcgtgtcaaggagaacgatcagaagaaaaaagaagccaaagaaaaggggacttgggtccaactcaagagacagcctgccccaccccgagaggcgcacttcgtgagaactaacgggaaggagcctgagctgctggaaccaattccctatgagttcatggcatag

SEQ ID NO: 203594 - DNA, 483 bp, synthetic construct
  misc_feature 1..483: note = Description of Artificial Sequence: Synthetic coding sequence
  source 1..483: mol_type = other DNA
atgaccaacaccaagggcaagcggcggggcacccggtacatgttcagtagacccttcaggaaacacggtgtcgtgcccctcgcaacctatatgcggatctataagaaaggcgacatcgtggatatcaagggaatgggtacagtgcagaagggaatgcctcacaaatgctaccacggaaagacaggtagagtgtataacgtgacccagcatgcagtagggattgtagtgaacaaacaggtaaagggaaagatccttgctaaaaggatcaatgtgcgcattgaacacatcaagcactccaaatctcgagatagcttcctcaaaagagtcaaggaaaatgaccagaagaagaaagaggccaaggaaaaaggcacgtgggtacagctaaaaaggcaacctgctcccccgagggaggctcatttcgtaaggactaacggcaaggagcctgagctcctggaacccatcccctatgagttcatggcgtag

SEQ ID NO: 203595 - DNA, 483 bp, synthetic construct
  misc_feature 1..483: note = Description of Artificial Sequence: Synthetic coding sequence
  source 1..483: mol_type = other DNA
atgaccaacaccaagggcaagcggcggggcacccggtacatgttcagcagaccgttcaggaagcacggggtagtgccactcgctacatacatgcgcatctacaagaagggagacattgtcgatataaaggggatgggaactgtgcaaaaaggaatgccccacaagtgttaccacggaaaaacggggcgcgtttacaacgtgactcaacacgcagtcgggatcgttgtaaacaagcaggtgaaggggaaaatcctggccaagagaataaacgtacggatcgagcatataaagcactccaagagcagagactcttttctgaaaagagttaaagagaatgaccaaaagaagaaggaggcaaaggaaaaaggcacatgggttcagttaaaacgccagcccgcacctccgagggaggctcacttcgttaggaccaacgggaaggaaccggagcttcttgaaccaatcccctatgagtttatggcgtag

SEQ ID NO: 203596 - DNA, 483 bp, synthetic construct
  misc_feature 1..483: note = Description of Artificial Sequence: Synthetic coding sequence
  source 1..483: mol_type = other DNA
atgaccaacaccaagggcaagcggcggggcacccggtacatgttctcaagaccttttagaaagcatggcgtggtcccactggcaacctatatgcgcatctacaagaaaggtgacattgtggacattaaaggcatgggcactgtccagaagggcatgcctcacaagtgctatcacggcaagacagggcgagtgtataacgtcacacagcacgccgtcggaatcgtggtgaacaagcaggtaaaaggtaagattctggcaaagcgaattaacgttagaatcgagcacatcaagcactccaaatcccgagacagcttcctgaaacgagtcaaggaaaatgaccagaagaagaaagaagccaaggaaaagggcacatgggtgcagctcaaaagacagccagccccacccagggaagcccactttgtcaggacaaatgggaaggagccagaactccttgaacccattccctatgaattcatggcctag

SEQ ID NO: 203597 - DNA, 972 bp, synthetic construct
  misc_feature 1..972: note = Description of Artificial Sequence: Synthetic coding sequence
  source 1..972: mol_type = other DNA
atggccgcccccaagggcagcctgtgggtgcggacccagctgggcctgccgcccctgctgcttctgacaatggccttagccggcggaagtggcactgcaagcgcagaagcattcgattcggttctcggcgacacagcaagctgccacagggcttgtcaactgacttatcccctgcacacctaccccaaggaggaagaactgtatgcctgccaaaggggttgtagattattttcaatctgtcagttcgtcgacgacggcatcgacttgaatcgtactaagctggaatgtgagagcgcttgcacggaggcgtacagccagagtgacgagcagtacgcctgccacctgggctgtcagaatcagctgccctttgctgaacttcggcaggaacaactgatgagtctcatgcctaagatgcacttgctatttcccctcaccctggtgcgaagtttttggagcgatatgatggacagtgctcagtcattcattacatccagttggacattttatttgcaggcagatgatggcaagattgtgatttttcagtcaaaaccagaaatccagtacgcccctcacctggagcaggaaccgactaatttgcgggaaagttcgctgagtaaaatgagttatctgcagatgaggaactctcaagcccaccgcaatttcctggaggatggagaatccgatggctttctcaggtgcctttctttgaattccgggtggatcctcaccaccacactggtgctgtccgtgatggtgctcctgtggatttgttgtgcaactgtggccaccgccgtggagcaatatgtgccatccgaaaaattatccatctacggcgacctggaattcatgaatgaacagaagctgaataggtacccagcgtctagcctcgtggttgtgcgctccaaaacagaggaccacgaggaggccgggcccctgcccacaaaggtgaacctcgctcactctgagatctag

SEQ ID NO: 203598 - DNA, 276 bp, synthetic construct
  misc_feature 1..276: note = Description of Artificial Sequence: Synthetic coding sequence
  source 1..276: mol_type = other DNA
atggccggcagccggcgggagtgccggcggggcggcagcagcggcgccaagtttaggatctctcttgggctgccagtgggagccgtgatcaactgcgctgacaacaccggcgcgaagaacctctatataatctcggtgaaaggtattaaaggtcgcctgaacaggctcccggctgccggggtgggggacatggtgatggccaccgtgaaaaaaggtaaaccagaactcagaaaaaaagtccaccccgccgtcgtgatcagacaaaggaaaagctag

SEQ ID NO: 203599 - DNA, 423 bp, synthetic construct
  misc_feature 1..423: note = Description of Artificial Sequence: Synthetic coding sequence
  source 1..423: mol_type = other DNA
atgagcaagcggggccggggcggcagcagcggcgccaagttccggataagcttgggactcccggtgggggccgttatcaactgcgcagataatactggcgccaagaatctgtatattattagtgttaaaggtatcaaaggaaggctgaataggctgcctgctgccggggtcggagacatggtcatggctacagtgaagaagggcaagccagagttgcgaaagaaagtccacccggcagtagtgataagacagcggaagtcctacaggcgcaaggacggggtgtttctgtatttcgaagacaatgccggggtgatcgtcaacaacaagggtgagatgaaagggagcgccatcaccggccccgtggcaaaagaatgcgccgatctgtggccccggattgcgagcaacgctggctcaatcgcctag

SEQ ID NO: 203600 - DNA, 345 bp, synthetic construct
  misc_feature 1..345: note = Description of Artificial Sequence: Synthetic coding sequence
  source 1..345: mol_type = other DNA
atgagcaagcggggccggggcggcagcagcggcgccaagttccggattagcctgggcctgcctgtgggggccgtcattaactgcgcagacaatactggcgcgaagaatctgtacatcatcagcgtgaagggcatcaagggccggttgaataggctaccagccgccggcgtgggggacatggtaatggcaactgtgaagaaagggaagcccgagctccggaagaaggttttgttgtgccatacagggtggtcggcagtgactccactgaagctcaccgtgactttgaactgctggacttggaatcctccagcagtcgcgtttaaaggactgcagttacaggtgtag

SEQ ID NO: 203601 - DNA, 423 bp, synthetic construct
  misc_feature 1..423: note = Description of Artificial Sequence: Synthetic coding sequence
  source 1..423: mol_type = other DNA
atgagcaagcggggccggggcggcagcagcggcgccaagttccggatcagcctgggactgcctgttggggctgtgattaactgtgcagataataccggagccaagaatttgtatatcatcagtgtgaaggggatcaaaggtaggttaaatcggctcccagcggccggggtgggcgatatggtaatggctacagtgaagaaaggcaaaccagagttacggaaaaaagtgcatcctgctgtggttatcaggcagagaaagtcataccgtcgcaaagacggcgttttcttgtactttgaagacaacgctggtgtcatcgtaaataataaaggggagatgaaaggcagtgcaattacaggacccgtcgctaaggaatgtgcggacctgtggcctcgcatcgcctcaaacgctgggtccatagcgtag

SEQ ID NO: 203602 - DNA, 477 bp, synthetic construct
  misc_feature 1..477: note = Description of Artificial Sequence: Synthetic coding sequence
  source 1..477: mol_type = other DNA
tgactggtgggcgccccctgcccccgggccagccccgccccccccaaagcggaggccaaggccaaagcccttaaggctaagaaagccgtgctgaagggagtgcatagtcacaaaaaaaaaaagatccggactagcccaactttccgacgccctaagaccctacggctgaggcggcagcctaagtacccacgtaaaagcgcccctcgccgaaataagctggatcactacgctatcatcaaatttccgcttaccactgaatccgcaatgaagaagatcgaggataataacacactggtgtttattgtggacgtgaaagccaacaaacatcaaataaaacaggcagtgaagaagttatacgatatcgacgtggctaaggtgaatacgctgatacgccccgatggcgagaagaaggcgtacgttagactggccccagattatgatgccctggatgtggcaaacaagatcgggatcatttag

SEQ ID NO: 203603 - DNA, 477 bp, synthetic construct
  misc_feature 1..477: note = Description of Artificial Sequence: Synthetic coding sequence
  source 1..477: mol_type = other DNA
atgagccccggcctggtggtgctgcggtgggcccccgccccccccaaggcagaagctaaagccaaggccctgaaggccaagaaggccgttctcaaaggtgtgcactcacacaagaagaagaaaattcgcactagccctaccttcaggcgacctaagaccttgcggctgaggaggcagccaaaatacccacggaagtcggcaccacggcggaacaaattggatcattacgccattatcaaattccccctgacgactgaatcggccatgaagaagatcgaggacaacaatactctggtttttattgtggacgtaaaggcaaacaaacaccagatcaagcaagctgtaaagaagctttacgatatcgacgtggccaaagtgaacacgctgatcagaccggatggcgaaaagaaagcttatgtgcgcctggcccctgactatgacgccctggacgttgctaacaagataggtattatttag

SEQ ID NO: 203604 - DNA, 585 bp, synthetic construct
  misc_feature 1..585: note = Description of Artificial Sequence: Synthetic coding sequence
  source 1..585: mol_type = other DNA
atgcaccccctggtgggcgccccctgcccccgggcctgcaaggagcttgttcccagcgcgctgactattttccttctggtgcatgtacagcccgggtatattacgcgcccaagcctgcgctctgtcgtcctccggtgggcccccgccccaccgaaagccgaggccaaagccaaagcactcaaagcaaagaaagcggtgctgaagggagtgcattcacataaaaaaaaaaagattcgcacatcccccacattcaggcggcccaagactctgcgcctcaggcgccagcctaagtacccacggaagagcgctcccagacgcaataagctagatcattacgccatcataaaattccctctgactaccgaatccgctatgaagaagatagaagacaacaacacccttgtgttcattgtggacgtcaaagcaaataagcaccagataaagcaggccgtcaagaaattgtatgacatcgatgtcgccaaggttaatacactgatccgaccagacggggaaaagaaggcctacgtgagactggcccctgactacgacgcactcgatgtcgccaacaaaatcggcattatttag

SEQ ID NO: 203605 - DNA, 471 bp, synthetic construct
  misc_feature 1..471: note = Description of Artificial Sequence: Synthetic coding sequence
  source 1..471: mol_type = other DNA
atggcccccaaggccaagaaggaggcccccgccccccccaaggccgaggcaaaagctaaagcactcaaggcaaaaaaggccgtgctaaaaggcgttcactctcacaaaaaaaaaaagattaggaccagccccacattccgccgccccaagactctgcgactgaggaggcagccaaaatacccccgcaagtcagcaccaagacggaacaagctggatcactacgccatcatcaaatttccgctaactactgagtcagccatgaaaaagatcgaggacaacaacaccttagtgtttattgtggacgtcaaggctaacaagcaccagatcaagcaggccgtcaagaaactgtacgatattgatgttgccaaagtcaataccctgattcgccctgatggagagaaaaaggcctacgttcgattggcaccggattacgatgcccttgacgtggcaaataagatcgggataatctag

SEQ ID NO: 203606 - DNA, 474 bp, synthetic construct
  misc_feature 1..474: note = Description of Artificial Sequence: Synthetic coding sequence
  source 1..474: mol_type = other DNA
atgaaggtggagctgtgcagcttcagcggctacaagatctaccccggccacggacgccgttacgcccgcactgacgggaaagtgttccagttcctgaacgccaagtgcgagtccgcgttcctttcgaagcgcaatccgagacaaatcaattggacggtactgtatagacgaaaacacaaaaaggggcagagcgaagaaatccagaagaagaggactcgccgcgcagttaagtttcagagagccatcactggcgcttccttggccgatatcatggccaaaaggaatcagaaaccagaagtgaggaaggcacaaagagagcaggctataagagctgctaaggaggctaagaaagccaagcaggcaagcaagaagaccgctatggcggcggcgaaggctcctactaaggccgctcccaagcagaaaatcgttaaacccgtcaaggtctcagcacctcgcgttggcgggaagaggtag

SEQ ID NO: 203607 - DNA, 453 bp, synthetic construct
  misc_feature 1..453: note = Description of Artificial Sequence: Synthetic coding sequence
  source 1..453: mol_type = other DNA
atgaaggtggagctgtgcagcttcagcggctacaagatctaccccggtcacggtcggcgctacgctcggacagacgggaaggtcttccagttcctcaatgccaagtgcgaaagcgcgttcctgtccaagcggaacccccggcagatcaattggaccgtgctctaccgaaggaaacacaaaaaggggcagagcgaagagatccaaaagaagcggacacgcagggcagttaagtttcaaagagctatcacgggagcctctctcgcagacattatggccaagcgaaatcagaagcctgaggtgaggaaagcccagagggaacaggcaatccgggctgccaaggaggccaaaaaagctaagcaagcgtctaagaaaaccgcaatggcggcggccaaagtaataatgggtttcctgtacttcctcgaacagtataatagaaaaatcttttttttttag

SEQ ID NO: 203608 - DNA, 438 bp, synthetic construct
  misc_feature 1..438: note = Description of Artificial Sequence: Synthetic coding sequence
  source 1..438: mol_type = other DNA
atgaagttcaaccccttcgtgaccagcgaccggagcaagaaccggaagcgacatttcaacgcccccagccacattagacgtaagattatgagctctccactgtccaaagaactccgacagaaatataatgtgcggagtatgcccatcaggaaagacgacgaagttcaagtcgttcgtgggcattataaggggcagcagatcgggaaggtcgtgcaagtctatagaaaaaaatacgttatctacatcgagagagtacaaagggagaaagctaacggtacaactgtgcatgtaggcattcatccctcaaaggtggtcatcaccagacttaaactcgacaaggaccggaaaaagatcctcgagaggaaggccaagtctcggcaagttggaaaagaaaaaggtaagtataaggaagaaaccatagaaaagatgcaggagtag

SEQ ID NO: 203609 - DNA, 411 bp, synthetic construct
  misc_feature 1..411: note = Description of Artificial Sequence: Synthetic coding sequence
  source 1..411: mol_type = other DNA
atgggcaagttcatgaagcccggcaaggtggtgctggtgctggccgggcggtattcaggtaggaaagcagtcatcgtaaagaatatagacgatggcaccagcgacaggccttattcacacgctctagtcgcgggaattgatagatacccacggaaggtcacagcagcaatgggcaaaaagaagatcgcaaagcgctcgaagatcaagagtttcgtgaaagtgtacaactataatcacctgatgcccacgcggtatagcgtggatatccctttggacaaaacagtggtcaacaaggacgtttttcgggatcctgccctcaagcggaaggccaggcgggaggccaaagtgaagtttgaggagcgctacaagactggtaagaacaaatggttctttcagaaactccggttttag

SEQ ID NO: 203610 - DNA, 447 bp, synthetic construct
  misc_feature 1..447: note = Description of Artificial Sequence: Synthetic coding sequence
  source 1..447: mol_type = other DNA
atgcccagccggctgcggaagacccggaagctgcggggccacgtgagtcacggccatggcaggattgggaagcaccgaaagcaccctggcggaaggggaaacgctggcggcttgcatcatcatcgaattaacttcgataaatatcaccctggttattttggcaaagtggggatgaagcactaccatctcaagcgaaaccagagcttctgccccacagtgaatctggacaaactgtggacgctcgtcagcgaacagaccagggtcaatgcagcaaaaaataagacgggggcggccccaatcatcgacgttgtaaggagtggttactataaagtcctgggcaaaggcaagctgccaaagcagccagtgattgtaaaggctaagtttttttcccgcagagccgaggagaagattaagtcagtggggggcgcctgcgtactggttgcctag

SEQ ID NO: 203611 - DNA, 327 bp, synthetic construct
  misc_feature 1..327: note = Description of Artificial Sequence: Synthetic coding sequence
  source 1..327: mol_type = other DNA
atgcccagccggctgcggaagacccggaagctgcggggccacgtgtctcatgggcatgggcgcattgggaaacaccgaaaacatcccgggggcaggggtaacgcaggggggctgcaccaccatagaatcaatttcgataagtatcatcccggctactttggtaaggtgggaatgaaacattaccacctaaaacggaatcagtccttttgcccaacagtgaatctggataagctgtggactcttgtctcagagcagacgagagtgaatgccgcaaagaataagacaggcgcagctccaataatcgacgtggtgcgatcagtctcctag

SEQ ID NO: 203612 - DNA, 414 bp, synthetic construct
  misc_feature 1..414: note = Description of Artificial Sequence: Synthetic coding sequence
  source 1..414: mol_type = other DNA
atgagcgcccacctgcagtggatggtggtgcggaactgcagcagctttctcattaaacggaacaagcagacctatagtaccgaacccaataatctgaaagcacgcaattccttcaggtacaacggcctgattcacaggaaaaccgtaggagtggagcctgctgcagacggaaagggggtcgtagtcgtaattaagagacgctccggccagcgcaagcctgctacaagttatgtgcggacaaccataaataagaacgccagagccaccctttcatccatccgtcatatgattcggaaaaacaagtatcgacccgatcttcgaatggccgcgatcagaagagctagtgcgatcctacgttcacaaaagccggtgatggtgaaacgcaagagaacccggcctaccaaatcaagctag

SEQ ID NO: 203613 - DNA, 210 bp, synthetic construct
  misc_feature 1..210: note = Description of Artificial Sequence: Synthetic coding sequence
  source 1..210: mol_type = other DNA
atgagcgcccacctgcagtggatggtggtgcggaactgcagcagcttcctcatcaaacgaaataagcagacttactcaaccgagccgaacaacctcaaggctcgcaattcttttcggtacaatgggttgatccataggaagaccgtgggcgtggaacctgctgcagacgggaagggggtcgtcgtggtcatcaaacgacgcagcgagtag

SEQ ID NO: 203614 - DNA, 264 bp, synthetic construct
  misc_feature 1..264: note = Description of Artificial Sequence: Synthetic coding sequence
  source 1..264: mol_type = other DNA
atgagcgcccacctgcagtggatggtggtgcggaactgcagcagctttctgatcaagagaaacaagcagacatactccaccgagcctaataatctaaaggcccgtaattcattccgctataatgggctgatacacaggaaaaccgtgggggtagaaccggccgctgacggtaaaggcgttgttgttgtgataaagcgccgtagcggggagttctgccttgtctgggcccgggagaggcccctgtccagggtgtgggaactgtag

SEQ ID NO: 203615 - DNA, 510 bp, synthetic construct
  misc_feature 1..510: note = Description of Artificial Sequence: Synthetic coding sequence
  source 1..510: mol_type = other DNA
atgagcgcccacctgcagtggatggtggtgcggaactgcagcagctttctgatcaaaagaaacaagcaaacctacagcacagagccaaacaacctgaaggcccgtaatagttttcggtataacggcctcatacatcggaaaacagtgggggtcgagcctgcggccgacggaaagggtgtcgtagtcgttattaaacggcgatcaggtcagaggaaaccagctacctcatatgtccgtacaactattaataagaacgccagggcgaccctcagcagtatacggcatatgatccgcaaaaacaagtatcggcctgatttgagaatggatatgcttgccagcactggttcaggcctctgttgttcggtcgccgtccagccttgggcatcctcatcaaccagtctgtgtttacgtacactgatatgtaatatgcgggtggacagaccttactacagcgggctgatgcggcggctgaacgtgcaaaacctgctcgactgtgcccacaaaagctag

SEQ ID NO: 203616 - DNA, 510 bp, synthetic construct
  misc_feature 1..510: note = Description of Artificial Sequence: Synthetic coding sequence
  source 1..510: mol_type = other DNA
atgagcgcccacctgcagtggatggtggtgcggaactgcagcagcttcctaatcaaaaggaacaagcagacttattccacggaacctaacaatttgaaggcgcggaatagtttccgatacaacggactcatacaccgtaagactgtgggagtcgagcccgcggctgacggtaagggagtggtggtggtcattaagcgaaggagcggacaacggaagcctgcaactagttatgttagaactaccattaacaaaaatgcccgagctactctctcctcaatacggcatatgattcgcaaaaataaataccgacccgacctccggatggatatgcttgccagtaccgggtctggactttgctgtagcgtggcagtgcaaccgtgggcttcaagtagcacaagtttatgtttacgcactctgatctgtaacatgagggtcgaccggccatactatagtggacttatgaggcggcttaacgtgcaaaacctactggactgtgctcataaaagctag

SEQ ID NO: 203617 - DNA, 414 bp, synthetic construct
  misc_feature 1..414: note = Description of Artificial Sequence: Synthetic coding sequence
  source 1..414: mol_type = other DNA
atgagcgcccacctgcagtggatggtggtgcggaactgcagcagctttctcatcaagaggaacaaacaaacatattccaccgagccaaataacctgaaggcgaggaactccttcaggtacaatggacttattcatcgcaagactgtcggtgtggagcctgccgcagacggcaagggggtggtggtggtgataaaaagaagatcaggtcagaggaagcccgctacttcatacgtgcgtaccactataaacaagaacgctagggcaaccctgtcttccatacggcatatgattcggaagaacaagtacagacccgacctgcggatggctgccattcgacgcgctagtgctatccttcgaagccagaagccggtgatggtgaagcggaagcggactcggcctaccaagtctagttag

SEQ ID NO: 203618 - DNA, 492 bp, synthetic construct
  misc_feature 1..492: note = Description of Artificial Sequence: Synthetic coding sequence
  source 1..492: mol_type = other DNA
atgagcgcccacctgcagtggatggtggtgcggaactgcagcagctttctcatcaagcggaataagcagacttactcgacagagcctaataacctgaaagccagaaacagtttcaggtacaacggcctgattcatcgcaagaccgtcggcgtggagccagctgcagacggtaagggtgtcgtcgtggtgatcaagcggaggagtggccagaggaagccagcaacatcctacgtgcgcacgaccataaataagaacgcccgtgctactctttcctccatcaggcacatgattcggaagaacaagtacaggcccgatctcagaatggtctcttggggtttagggattcgcctcggcgagaccggacagtgctgcggcgagggacccccgaccacaggctgcaacatgggatggcgcggcatggactcttgctttcaaccgactccgcacacacagcactggcccagaggcagacttgtggagtgtatgggttag

SEQ ID NO: 203619 - DNA, 480 bp, synthetic construct
  misc_feature 1..480: note = Description of Artificial Sequence: Synthetic coding sequence
  source 1..480: mol_type = other DNA
atggccaagagcaagaaccacaccacccacaaccagagccggaagtggcaccgaaatgggatcaagaagcccaggagccaaagatacgagagtttaaagggggtcgaccctaagttccttagaaacatgagattcgctaagaagcacaacaagaaaggcttgaaaaagatgcaagccaacaatgcaaaggcaatgagcgctcgtgcagaggctataaaagccctcgttaagcctaaggaggttaaaccaaaaatcccgaaaggagtatcaagaaagcttgataggctagcctacatcgcacatcctaaacttggaaaaagggctcgggcacggatcgcgaaagggctacgactgtgccgcccaaaggccaaggccaaggcaaaggccaaagaccagaccaaggctcaggccgccgctccagcgtcagtgccagctcaggcaccaaagaggacccaagccccaacgaaggcctctgagtag

SEQ ID NO: 203620 - DNA, 480 bp, synthetic construct
  misc_feature 1..480: note = Description of Artificial Sequence: Synthetic coding sequence
  source 1..480: mol_type = other DNA
atggccaagagcaagaaccacaccacccacaaccagagccggaagtggcaccggaacggcataaaaaagccccggtctcagagatatgagtctctcaagggagtggatcccaagtttcttagaaacatgcgctttgcaaaaaaacacaacaagaaaggattgaagaaaatgcaggctaataatgccaaggccatgagcgcgcgggcagaggcaattaaggccctggtcaaacccaaagaagtgaagccaaagatcccgaagggagtgtctcgtaagctggatcgcctggcttatatagcacaccccaagttaggcaagagggcacgcgcccggatcgccaaaggcctgaggctgtgccggccaaaggcgaaagctaaggctaaagccaaggaccagacaaaggcgcaagccgccgctccggcttctgttccggctcaagcgcccaaaaggacgcaggctccaacaaaggccagtgagtag

SEQ ID NO: 203621 - DNA, 480 bp, synthetic construct
  misc_feature 1..480: note = Description of Artificial Sequence: Synthetic coding sequence
  source 1..480: mol_type = other DNA
atggccaagagcaagaaccacaccacccacaaccagagccggaagtggcacaggaacggaataaagaaaccaaggtcacagagatacgagagtctgaagggggtcgaccctaaatttctaagaaatatgaggtttgcaaaaaaacataataaaaaagggttaaaaaagatgcaggcaaacaacgccaaagcgatgtccgctcgcgcggaagcaattaaggcactcgtgaagccaaaggaagtgaaaccaaagatccccaagggcgtgagccgaaagctcgacagactcgcatacatcgcccaccccaagctggggaaacgagcccgggcccgtattgcaaaaggtctccgtctgtgcagacccaaggccaaggccaaagccaaggcgaaggatcaaacaaaagcgcaggccgccgcaccagcatcggtgcccgcgcaggcccctaaacgaactcaggcccctactaaagcctcggagtag

SEQ ID NO: 203622 - DNA, 480 bp, synthetic construct
  misc_feature 1..480: note = Description of Artificial Sequence: Synthetic coding sequence
  source 1..480: mol_type = other DNA
atggccaagagcaagaaccacaccacccacaaccagagccggaagtggcacaggaacggcatcaagaaacctaggtctcagcggtacgagagcctcaagggcgtggaccccaagttcttaaggaacatgaggtttgcaaaaaaacataacaagaagggactcaaaaagatgcaggccaataacgctaaggccatgagcgccagagcggaagctattaaagcactggtgaagcccaaggaggtgaaacctaaaattccaaaaggcgtgagccgcaaattggacagactcgcctatatcgcgcaccccaaactcggaaaacgagcacgtgcgcggatcgccaagggcttgcgtctatgccgcccgaaggcaaaagcaaaggccaaggccaaagatcagactaaggcgcaagcagccgccccagcaagcgttccagcccaagccccaaaacgcacacaggctccaacgaaggcgagcgagtag

SEQ ID NO: 203623 - DNA, 480 bp, synthetic construct
  misc_feature 1..480: note = Description of Artificial Sequence: Synthetic coding sequence
  source 1..480: mol_type = other DNA
atggccaagagcaagaaccacaccacccacaaccagagccggaagtggcacagaaatggcattaaaaagcccaggagccagcggtatgagtccttgaaaggtgtcgacccaaagttcctgcgcaatatgagattcgcgaaaaagcacaataaaaagggcctgaagaaaatgcaggccaacaacgccaaggctatgagcgcacgcgccgaagctattaaggccttggtaaaacctaaggaggttaaacccaaaatccctaaaggagtatcccgcaaacttgataggctggcctacattgcccaccccaaactgggaaagagagctcgcgctcggatcgcaaagggactgcggctttgcaggccaaaggccaaagcaaaagccaaggcaaaagaccagactaaggctcaggccgctgccccagcctccgttccagcgcaggctcccaaacgcacacaagcgcctaccaaggccagtgaatag

SEQ ID NO: 203624 - DNA, 480 bp, synthetic construct
  misc_feature 1..480: note = Description of Artificial Sequence: Synthetic coding sequence
  source 1..480: mol_type = other DNA
atggccaagagcaagaaccacaccacccacaaccagagccggaagtggcacagaaatggtattaagaaacctagaagtcaaagatacgagtccctgaaaggagtcgaccccaaattcttgcgcaatatgaggttcgctaagaagcacaacaagaagggcttaaagaagatgcaagcaaataatgcaaaggcgatgagcgcaagagctgaggctattaaagcactcgtgaaaccaaaagaggttaagcccaagatcccaaagggcgtgagcagaaaattggacagactggcctacatcgctcaccccaagctggggaaacgagcacgagctagaatcgctaagggactaaggctatgccgacctaaggccaaagctaaagcaaaggctaaagaccaaacaaaagctcaagctgccgctcctgcaagtgttcctgcccaggctcctaagagaactcaggctcccacaaaagcctccgaatag

SEQ ID NO: 203625 - DNA, 648 bp, synthetic construct
  misc_feature 1..648: note = Description of Artificial Sequence: Synthetic coding sequence
  source 1..648: mol_type = other DNA
atgcccttccaccccgtgaccgccgccctgatgtaccggggcatctatacggtgcccaatctcttatctgagcagagacctgttgatataccagaggacgagctcgaagaaattagggaagcatttaaagtgtttgaccgggacgggaatggattcatttcaaaacaggagctgggtacggcaatgcgctctcttggctacatgcccaacgaagtggagctggaagtgattatccagcgactggacatggatggggatggccaggtcgatttcgaagaatttgtgacactgcttggcccaaaacttagcacaagcggtattcccgagaaattccacggtacggacttcgataccgtgttttggaaatgcgacatgcagaagctgacggtcgacgaactgaagcgtctcttatacgataccttctgcgaacatctgtcaatgaaagacatagagaatatcataatgactgaggaggagtcacatctgggaaccgctgaggagtgccctgttgacgtggagacgtgctccaatcaacaaataagacaaacctgcgtgcggaagtctttgatctgtgcgttcgcgatcgcatttataatcagcgtgatgttgatcgctgcaaaccaggtgctaaggagcggaatgaagtag

SEQ ID NO: 203626 - DNA, 1056 bp, synthetic construct
  misc_feature 1..1056: note = Description of Artificial Sequence: Synthetic coding sequence
  source 1..1056: mol_type = other DNA
atgacccacatcgtgcgggaggtggaccggcccggcagcaaggtgaacaaaaaggaagtggtggaggcagtgaccatcgttgagacgcctccaatggtagtggttggaatcgtgggatacgttgagacgcctagaggcctgagaacctttaaaacagtgttcgctgaacacataagcgatgagtgcaaacgacgcttttataagaactggcacaaatcgaagaaaaaagcctttaccaaatactgtaaaaagtggcaggatgaagatggaaagaagcaacttgaaaaggatttcagtagcatgaagaagtattgtcaggtcatccgggtcatagctcacacacaaatgcggttgctcccgctgagacaaaagaaggcacatctaatggagattcaggtgaacggtgggacagtggctgaaaagttagattgggcacgagagagattggagcaacaggtgcccgtcaaccaggtttttggacaggacgagatgattgatgtgatcggcgtcacgaaggggaagggctataagggagtgacttcccgttggcacaccaagaagcttcctagaaagacgcatcgaggtttacgaaaagtagcgtgtattggggcctggcaccccgctcgtgtcgcttttagcgtggcccgggccggccagaagggatatcaccacagaaccgaaatcaacaagaagatttataagattggccagggatacctcatcaaggacggcaaactaattaaaaacaatgcatccacagactatgatttgtcagacaaaagcatcaaccctttaggcggcttcgtgcattacggagaagtcaccaatgacttcgtgatgttaaagggatgtgtggtgggaacaaagaagagggttctcactctgcggaagtccctgctggtgcagaccaaaagaagagccctggagaaaatcgatttaaagtttatagacaccacgagtaagtttggacacggaaggttccagaccatggaggagaaaaaagccttcatgggccctctgaaaaaggacagaatagctaaagaggagggagcttag

SEQ ID NO: 203627 - DNA, 348 bp, synthetic construct
  misc_feature 1..348: note = Description of Artificial Sequence: Synthetic coding sequence
  source 1..348: mol_type = other DNA
atggtggccgccaagaagaccaagaagagcctggagagcatcaactctcggttacagctggtcatgaagtcagggaaatacgtgctcggatataaacaaacccttaagatgatacgacagggaaaagccaagctcgtgattctggccaacaattgccccgccctcagaaagagcgagatagagtactacgcgatgctggccaagaccggggtgcaccattatagcggcaacaatatcgagctaggcaccgcctgtggcaaatactaccgcgtttgcaccctggccataattgatccaggggactccgacattatacgctccatgccggagcagacaggggaaaagtag

SEQ ID NO: 203628 - DNA, 348 bp, synthetic construct
  misc_feature 1..348: note = Description of Artificial Sequence: Synthetic coding sequence
  source 1..348: mol_type = other DNA
atggtggccgccaagaagaccaagaagagcctggagagcatcaacagtaggctgcagctggtgatgaagagcggtaaatacgtgctaggctataaacagaccttgaagatgatccgacagggcaaagccaagctggtcatcctggctaacaattgccccgccctgagaaagtccgaaatcgagtactatgccatgctggctaaaactggagtgcaccactattcaggtaacaatatcgagctggggacagcctgcggaaagtactatcgcgtgtgtacattggccatcatcgatcccggcgacagcgacataattcgctctatgccggaacagactggcgagaaatag

SEQ ID NO: 203629 - DNA, 345 bp, synthetic construct
  misc_feature 1..345: note = Description of Artificial Sequence: Synthetic coding sequence
  source 1..345: mol_type = other DNA
atggtggccgccaagaagaccaagaagagcctggagagcatcaacagccgactgcagctggtcatgaagtccgggaaatatgtcctgggttacaaacaaacacttaagatgatccggcagggcaaagccaagctcgtgatcctagccaataactgtcctgcccttcggaagagtgagattgagtactatgctatgctcgctaagacaggagtgcaccactattctggtaacaatattgaattagggacggcttgcggtaaatactatagggtgtgtacactggccatcattgatcctggtgactctgacattatcaggtctatgcccgaacagacaggggaatag

SEQ ID NO: 203630 - DNA, 285 bp, synthetic construct
  misc_feature 1..285: note = Description of Artificial Sequence: Synthetic coding sequence
  source 1..285: mol_type = other DNA
atgagcggccggctgtggagcaaggccatcttcgccggctacaagcgcggcctccggaaccagcgggaacatacagcattgctaaaaattgaaggggtgtacgcaagagacgaaaccgagttctaccttggtaagaggtgcgcttacgtgtacaaagccaaaaataataccgtcacaccaggtggcaaacccaacaagacgcgggtaatctggggtaaagtgactagagctcacggcaactcaggcatggtgagggccaagttccggtccaatctgcccgcatag

SEQ ID NO: 203631 - DNA, 333 bp, synthetic construct
  misc_feature 1..333: note = Description of Artificial Sequence: Synthetic coding sequence
  source 1..333: mol_type = other DNA
atgagcggccggctgtggagcaaggccatcttcgccggctacaagcgcggactcaggaaccagagagaacatacggctctgcttaagattgaaggagtttatgcccgcgacgagacagaattttacctggggaagcgctgtgcctatgtgtacaaagctaagaataacacggtgacaccgggcggcaagcccaacaaaaccagagtcatttggggtaaagtcaccagggcccacggcaactccggaatggtgcgggcaaaattcaggtcgaacttgcctgcaaaagcaatcggccaccgcataagagtcatgttatatccgagcagaatctag

SEQ ID NO: 203632 - DNA, 333 bp, synthetic construct
  misc_feature 1..333: note = Description of Artificial Sequence: Synthetic coding sequence
  source 1..333: mol_type = other DNA
atgagcggccggctgtggagcaaggccatcttcgccggctacaagagagggttgcgaaatcagcgcgaacacaccgctttgctgaagatcgagggagtgtatgctagagacgagactgaattctacctcggcaaacgttgcgcttacgtttacaaggccaagaacaataccgtgacccccggtggaaaacctaacaaaacaagggtgatttggggcaaagtgacacgcgcgcacggaaactctggcatggtacgcgccaagtttcggtctaatctccctgcaaaggctataggccatagaatccgggttatgctctacccaagcaggatatag

SEQ ID NO: 203633 - DNA, 396 bp, synthetic construct
  misc_feature 1..396: note = Description of Artificial Sequence: Synthetic coding sequence
  source 1..396: mol_type = other DNA
tgactgcccttcgccagccggttcctgagcttccgggccgacagcgcacacgcttcgatggtgaacgtacccaagacacggagaactttttgtaagaagtgcggtaagcaccagccgcataaggtgactcagtataagaaaggtaaggacagcctttatgcccagggcaaaaggcgatacgaccgcaagcaaagcggctacgggggccagaccaaacccatcttccggaaaaaggctaaaaccaccaagaaaattgtgctgaggcttgaatgcgtggagccaaattgccgtagcaagaggatgctcgcgattaaaaggtgcaagcatttcgaactgggtggagataagaaacgcaaggtgtataattacggctggaaggtgcagagctttagctag

SEQ ID NO: 203634 - DNA, 429 bp, synthetic construct
  misc_feature 1..429: note = Description of Artificial Sequence: Synthetic coding sequence
  source 1..429: mol_type = other DNA
atgatcgcccccaccgacagccacgaggaggtgcggagcggcacctcctacatactgccattcgcgtcacgcttcctttcgttccgagccgattcggctcacgcaagtatggttaacgtccctaagactcgtcggacattttgcaagaagtgcggtaagcatcagccccacaaggtcacacagtacaagaaagggaaagactcgctgtatgcccagggaaaaaggcggtatgacaggaaacagtcagggtatggcgggcagacaaaacccattttccgtaaaaaagctaaaaccaccaaaaaaatagtgctcaggctagagtgcgtcgaaccgaactgcagatccaagcgcatgcttgcaataaagagatgcaaacacttcgagctcggtggagacaagaaacgcaaagggcaggtcatccagttctag

SEQ ID NO: 203635 - DNA, 321 bp, synthetic construct
  misc_feature 1..321: note = Description of Artificial Sequence: Synthetic coding sequence
  source 1..321: mol_type = other DNA
atggtgaacgtgcccaagacccggcggaccttctgcaagaagtgcgggaaacatcagcctcacaaggtcacacagtataaaaaagggaaggactctttatacgcacaggggaagaggcggtacgaccgcaagcagagcggctatggcggccagacgaagcctatctttaggaagaaagctaaaaccaccaaaaagatcgtgttgcggcttgagtgcgtggaaccaaactgccgaagcaaacgtatgcttgccatcaagagatgcaaacacttcgagctaggaggagacaaaaaaagaaaaggccaagtgattcagttctag

SEQ ID NO: 203636 - DNA, 321 bp, synthetic construct
  misc_feature 1..321: note = Description of Artificial Sequence: Synthetic coding sequence
  source 1..321: mol_type = other DNA
atggtgaacgtgcccaagacccggcggaccttctgcaagaagtgcgggaagcatcagccacataaggtgacccaatacaaaaaaggaaaagattcactttatgcacaaggccggagacgatacgaccgcaagcaaagtgggtacggaggccagaccaaacctatctttcggaagaaagctaagacaactaagaagattgtgttgagattggagtgcgtcgagccaaactgtagatccaaacggatgctggctattaaacgctgcaaacacttcgagctggggggggataagaaaaggaagggccaggtgatccaattttag

SEQ ID NO: 203637 - DNA, 294 bp, synthetic construct
  misc_feature 1..294: note = Description of Artificial Sequence: Synthetic coding sequence
  source 1..294: mol_type = other DNA
atgaccaagggcaccagcagcttcggcaagcggcggaacaagacccacacactctgcaggcgatgtggctctaaagcctaccatttacaaaaatctacctgtggaaaatgcggttaccctgccaaaagaaagaggaagtataattggtccgccaaggccaagcggagaaacactaccggaaccggacgcatgagacatctgaagatcgtgtatcgaagattccgtcacggattccgcgagggcacgacccccaagcccaaacgagccgccgttgctgcaagcagttcttcctag

SEQ ID NO: 203638 - DNA, 207 bp, synthetic construct
  misc_feature 1..207: note = Description of Artificial Sequence: Synthetic coding sequence
  source 1..207: mol_type = other DNA
atggtgaagaagatcgagatcagccagcacgccaagtacacctgctctttttgtggaaaaacgaaaatgaaacggagagctgtgggaatatggcactgcggttcctgtatgaagaccgtggcaggcggggcttggacctataatacaacatctgcagtgactgtaaagtctgctatccggcggctcaaggagttgaaggaccaatag

SEQ ID NO: 203639 - DNA, 279 bp, synthetic construct
  misc_feature 1..279: note = Description of Artificial Sequence: Synthetic coding sequence
  source 1..279: mol_type = other DNA
atggccaagcggaccaagaaggtgggcatcgtgggcaagtacggcacacggtatggggccagcctaaggaaaatggtcaagaaaatcgagatttctcagcacgccaagtacacatgctccttctgtggtaagacaaagatgaagaggagagctgtaggtatctggcattgcggctcctgtatgaagacagttgctggaggcgcttggacctacaataccacatccgctgtgaccgttaaatcagctatcagaaggttaaaagagcttaaagatcaatag

SEQ ID NO: 203640 - DNA, 213 bp, synthetic construct
  misc_feature 1..213: note = Description of Artificial Sequence: Synthetic coding sequence
  source 1..213: mol_type = other DNA
atgccccggaagatcgaggagatcaaggacttcctgctgaccgccaggaggaaagatgccaaaagcgtgaaaataaagaagaataaggataatgttaaattcaaggtgcgatgtagccggtatttgtatactctggttataaccgataaagagaaagccgagaaactgaaacagtcactaccaccaggtttggcggtgaaggaactcaagtag

SEQ ID NO: 203641 - DNA, 213 bp, synthetic construct
  misc_feature 1..213: note = Description of Artificial Sequence: Synthetic coding sequence
  source 1..213: mol_type = other DNA
atgccccggaagatcgaggagatcaaggacttcctgctgaccgccagaaggaaggatgctaagtcagtaaagattaaaaagaacaaagataacgtgaaattcaaagtgcgttgttcaagatacctatacacccttgtgatcaccgataaggagaaggctgagaagctgaagcagagtctgccaccaggcctggctgttaaggaactgaaatag

SEQ ID NO: 203642 - DNA, 213 bp, synthetic construct
  misc_feature 1..213: note = Description of Artificial Sequence: Synthetic coding sequence
  source 1..213: mol_type = other DNA
atgccccggaagatcgaggagatcaaggacttcctgctgaccgccaggcggaaagatgctaaatctgtcaagatcaaaaagaataaggataacgtcaaatttaaagtccgctgcagccgctatttgtatacactcgtaatcacggataaggagaaggccgaaaagctaaagcagagcctccctccaggcctggcggtgaaggaactgaaatag

SEQ ID NO: 203643 - DNA, 156 bp, synthetic construct
  misc_feature 1..156: note = Description of Artificial Sequence: Synthetic coding sequence
  source 1..156: mol_type = other DNA
atgagcagccacaagaccttcaccatcaagcggttcctggccaagaagcagaaacaaaatcgccctatcccacaatggatccaaatgaagccagggagtaagataaggtacaatagcaaacggagacattggaggcgcaccaaactgggcttatag

SEQ ID NO: 203644 - DNA, 156 bp, synthetic construct
  misc_feature 1..156: note = Description of Artificial Sequence: Synthetic coding sequence
  source 1..156: mol_type = other DNA
atgagcagccacaagaccttcaccatcaagcggttcctggccaagaaacagaagcagaacagaccgataccgcagtggatccagatgaaacctgggtccaagatccgctataattccaagagacgacactggcgacgcaccaaactgggcctttag

SEQ ID NO: 203645 - DNA, 156 bp, synthetic construct
  misc_feature 1..156: note = Description of Artificial Sequence: Synthetic coding sequence
  source 1..156: mol_type = other DNA
atgagcagccacaagaccttcaccatcaagcggttcctggccaagaagcagaagcagaatagaccaatcccacagtggatccagatgaaaccaggcagcaagatccgctataactccaaacggagacactggaggcggacaaaactgggtctgtag

SEQ ID NO: 203646 - DNA, 1284 bp, synthetic construct
  misc_feature 1..1284: note = Description of Artificial Sequence: Synthetic coding sequence
  source 1..1284: mol_type = other DNA
atggcctgcgcccggcccctgatcagcgtgtacagcgagaagggcgaatcgtccgggaaaaatgtcaccctgccagcagtattcaaggcccctatacgccctgacattgtgaacttcgtgcataccaatctgaggaagaataatcggcagccgtacgctgtttctgagctggcaggccaccagactagcgctgaaagttggggcaccggccgagctgtggccaggatacctcgcgtcagaggcggaggtacgcaccgcagcggacagggggcattcgggaacatgtgtcgcgggggaagaatgtttgcccccacaaagacctggagacgttggcaccgccgcgtcaatacaacacagaagagatatgctatttgtagtgcactggcagcttctgcccttccagccctagtcatgagcaaagggcataggatcgaggaggtgcccgagctccccctggtcgttgaggataaggtagaagggtataagaaaacgaaggaggcggtgcttcttctgaagaaattaaaagcatggaatgacatcaagaaagtctatgcctcacagcggatgcgggcagggaaggggaaaatgagaaaccgcaggcgcatccagaggaggggcccatgcatcatctataatgaggataacggaataatcaaggcgttccgcaatatcccggggatcaccctcctcaacgtgagcaaattaaatattctaaagctggctccaggggggcacgttggacgcttttgcatttggacagagagcgcctttagaaaacttgatgaactgtatggaacttggcgcaaagcggcctctttgaaatccaactataacttaccaatgcacaagatgataaacaccgacctctcccgaatccttaagtcacccgagatccagcgggcactgcgggcccccaggaagaaaattcaccgtcgagtgctgaaaaaaaaccctctcaaaaatttgaggattatgctaaaactgaatccttacgctaaaacaatgaggcgcaacaccatcctgcggcaggctagaaatcacaagcttagagtcgacaaagccgccgccgcggccgccgccctccaggccaaatccgacgaaaaggcggccgtggccgggaaaaagcccgttgtcggaaagaaaggaaagaaagcagcagttggcgtcaagaagcagaaaaaaccgctggtggggaagaaggcggctgccactaaaaagcctgcccctgagaaaaagcctgctgaaaagaagcctacaaccgaggagaagaagcccgccgcctag

SEQ ID NO: 203647 - DNA, 1221 bp, synthetic construct
  misc_feature 1..1221: note = Description of Artificial Sequence: Synthetic coding sequence
  source 1..1221: mol_type = other DNA
atggcctgcgcccggcccctgatcagcgtgtacagcgagaagggcgagtcaagtggcaagaacgtgacactgccagccgtgtttaaggctcccattcgccctgatattgtgaattttgttcatactaacctaaggaagaataatcgccagccttatgctgtgagcgaactcgctgggcatcagacctctgctgagtcttggggtactggacgggccgtggccaggattccccgggttcgcggagggggcacccacaggagcgggcaaggggcctttggcaacatgtgcagagggggccgcatgtttgccccaaccaaaacttggaggcggtggcaccggagagtgaacaccacgcagaaacgatacgccatctgttcggctctggcggcatccgctctccctgctctcgtgatgtcaaagggacaccgaatagaggaggtaccagagctcccactggtggtcgaggacaaggtggaaggatataagaagactaaagaggcagtgctgctcctcaagaagctcaaagcatggaacgatatcaagaaagtgtatgcctcccagcgcatgcgggccggcaaggggaaaatgagaaatcgccgacgcatccagcgccggggcccctgcattatctataacgaggacaacggaataataaaagcattccgaaacatccccggaattaccctcctgaacgtgagtaaacttaacatactgaaattggcccctggcggacacgtgggccgcttttgtatttggacagagagcgctttccgaaagttagacgagctctatggcacgtggcgcaaggccgcaagcctgaaaagtaattacaaccttcctatgcacaagatgattaacaccgacctgtctcggatcctgaagtctcccgagatccaaagggccctgcgggctccccgaaaaaaaattcatcggcgagttcttaaaaagaaccctttaaaaaatttgcgaatcatgctgaagctgaatccatacgcgaagaccatgcggcgcaatactatcctgcgtcaggctcgcaaccacaaactgcgggtggacaaagcagcagcagccgccgccgcgctgcaagcaaagagcgacgaaaaggcagcagtggccgggaagaaacccgtagttgggaagaaggggaagaaggccgccgtcggtgagaagaagcctgcggaaaaaaaacctacaaccgaggagaaaaagcctgccgcctag

SEQ ID NO: 203648 - DNA, 456 bp, synthetic construct
  misc_feature 1..456: note = Description of Artificial Sequence: Synthetic coding sequence
  source 1..456: mol_type = other DNA
atggcctgcgcccggcccctgatcagcgtgtacagcgagaagggcgagtcttccgggaagaatgtcactctcccagcagtattcaaggccccgatccgtccagatattgtgaattttgtgcatactaacctcaggaaaaacaacaggcaaccatatgccgtgtctgagcttgctggtcaccaaacaagcgccgagtcttgggggacaggcagggcagtggcaaggattccaagagttcgcggaggggggacacatcggagcggacagggcgcattcgggaatatgtgtagagggggtcgcatgtttgccccaaccaaaacttggaggaggtggcaccgccgagtgaacaccacacagaaactagagaatcatgtagaggccaaacctatatgcaaggatcacgcccctgaacatcatagtagccctggacaggaatcccaagcacccggtggctag

SEQ ID NO: 203649 - DNA, 78 bp, synthetic construct
  misc_feature 1..78: note = Description of Artificial Sequence: Synthetic coding sequence
  source 1..78: mol_type = other DNA
atgcgggccaagtggcggaagaagcggatgcggcggctgaagcggaagagaaggaaaatgaggcagcggtcgaagtag

SEQ ID NO: 203650 - DNA, 78 bp, synthetic construct
  misc_feature 1..78: note = Description of Artificial Sequence: Synthetic coding sequence
  source 1..78: mol_type = other DNA
atgcgggccaagtggcggaagaagcggatgcggcggctgaagcggaaacgacgcaaaatgcgccagagatctaagtag

SEQ ID NO: 203651 - DNA, 381 bp, synthetic construct
  misc_feature 1..381: note = Description of Artificial Sequence: Synthetic coding sequence
  source 1..381: mol_type = other DNA
atgatcgtgcgggtgaccaaccgggacatcatctgccagatcgcctacgccaggatcgaaggcgacatgatcgtgtgcgctgcgtatgcccatgaactgcctaagtacggcgtaaaggtgggcctcactaattatgccgcagcatattgtacaggtctccttctcgctcgaagacttcttaaccgcttcggaatggacaagatatacgaaggccaggttgaggttactggcgatgaatataatgttgagagtatagatggacaacccggcgctttcacttgctatttggacgctggtttggcacggacaacgaccggaaataaagtttttggtgccctcaagggggcggtcgacggtggattatcaattccgcaccgttag

SEQ ID NO: 203652 - DNA, 894 bp, synthetic construct
  misc_feature 1..894: note = Description of Artificial Sequence: Synthetic coding sequence
  source 1..894: mol_type = other DNA
atgggcttcgtgaaggtggtgaagaacaaggcctacttcaagcggtatcaggtgaaatttaggcggcgtagggaaggaaagacagactattacgcccgaaaaaggcttgttatccaggacaaaaataaatacaatacccccaaatatcgcatgatcgtgcgcgttaccaatcgagacatcatttgccaaattgcctatgcccgcattgagggtgacatgatcgtctgcgctgcgtatgcacacgaactgccaaagtacggcgttaaggtgggattaactaactatgcagccgcctactgtactggacttctgctagctaggcgcctattgaacaggtttggtatggacaaaatctacgaaggtcaggtagaagtgactggcgatgaatataatgtggagagtatcgacggacagcccggggcctttacgtgctacttagacgcagggcttgcgaggaccaccacgggcaacaaggtgtttggggccctgaaaggggcggtggatggtggcttgagcataccacacagtaccaagaggttcccaggatacgatagcgagtccaaggaattcaatgccgaggtgcaccgcaaacatataatgggtcagaacgtggcagactatatgagataccttatggaggaagacgaagacgcatataagaagcagttctcccagtatatcaaaaattcagtcaccccagatatgatggaagaaatgtataaaaaggcccacgcagccatacgggaaaatcctgtgtacgagaaaaagcccaagaaggaagtcaaaaagaagaggtggaacagaccgaaaatgtccctcgctcagaaaaaagacagagtcgcacagaaaaaggcgtcattcctccgagcccaggaacgcgcagccgagagctag

SEQ ID NO: 203653 - DNA, 744 bp, synthetic construct
  misc_feature 1..744: note = Description of Artificial Sequence: Synthetic coding sequence
  source 1..744: mol_type = other DNA
atgatcgtgcgggtgaccaaccgggacatcatctgccagatcgcctatgcccgcattgaaggcgatatgatcgtgtgtgccgcttatgcccacgagctgcccaagtacggggtcaaagtgggactcaccaactacgcagccgcgtactgtactgggctccttcttgcaaggagattgcttaatcgcttcggtatggataaaatctacgaaggccaggtggaagtaactggggacgaatataatgtggaatcaatagacggtcagcccggagccttcacctgttacttggatgctggattggctagaactacaacgggtaataaagtgttcggcgctctgaagggggccgttgacggaggcttgtctatacctcattcaaccaaacgctttcctggatatgactcagaatccaaggaattcaatgccgaggtgcaccggaagcatatcatgggacagaacgtcgccgattacatgagataccttatggaagaagacgaagacgcatacaagaagcagttcagccagtatatcaagaactctgtcactccagacatgatggaagagatgtataaaaaggcccacgccgctatccgagaaaaccctgtttatgagaagaaacctaagaaagaggtgaagaaaaagagatggaacaggccgaagatgagtctggctcagaagaaagacagagtagctcaaaagaaggcctctttccttagagctcaggaaagagccgcagagtcgtag

SEQ ID NO: 203654 - DNA, 867 bp, synthetic construct
  misc_feature 1..867: note = Description of Artificial Sequence: Synthetic coding sequence
  source 1..867: mol_type = other DNA
atggccggcgagaaggtggagaagcccgacaccaaggagaagaagcccgaggcaaaaaaggtggatgccggcggcaaggttaagaagggaaacctgaaggccaaaaagccgaagaagggcaagccacattgttcgagaaacccagtgctggtccgggggattgggcggtatagcagaagcgcgatgtattccagaaaagctatgtataaaagaaaatattctgctgcaaaatcaaaagtggaaaagaagaagaaagaaaaagtcctggccacggtgaccaagcccgttggcggggataaaaacggtggcactcgtgtcgtgaagctgcgaaagatgccacggtactacccaaccgaagacgtccctaggaagctcctgtctcatggtaaaaagcccttctctcagcatgtccgaaaacttagggccagtattactccaggtacgatcttgataatccttactggacgccaccggggcaaacgggtcgtctttctcaagcagttggccagcgggctactcctcgtgaccggaccattggtgctgaaccgcgtgcccttacgtcggactcatcagaagtttgtgatcgcgacctctaccaaaatcgacatcagcaacgtgaagatcccgaaacacttgacagacgcgtactttaagaaaaaaaaactgagaaagcctagacaccaggagggtgaaatcttcgataccgagaaagagaaatacgaaattacagagcagcgcaagattgatcagaaggctgtggatagccagattctgcccaagatcaaagcaatccctcagttacaggggtatctgcgttctgtttttgcactcactaatgggatctatccgcacaaactagtcttctag

SEQ ID NO: 203655 - DNA, 867 bp, synthetic construct
  misc_feature 1..867: note = Description of Artificial Sequence: Synthetic coding sequence
  source 1..867: mol_type = other DNA
atggccggcgagaaggtggagaagcccgacaccaaggagaagaagccagaggctaaaaaggtagacgccggcggaaaagtgaaaaaggggaacctcaaggccaaaaagccaaaaaaaggcaagccacattgttcaaggaacccagtactcgttcgaggcatcggccgatactcccggtctgccatgtattccaggaaggcaatgtacaagagaaaatactctgcagcaaagagcaaagttgagaagaagaaaaaagagaaggtgctggcaacggtgacgaagcccgtaggaggagataagaacggaggcacccgcgttgtcaaactccggaagatgcctagatattaccctaccgaagatgtcccaaggaagctgctcagccacgggaagaagccatttagccagcacgttcgaaagctccgggcatcaatcacacccggtactattttaataatccttacaggccgtcaccgcggcaaacgtgtggtgtttctgaaacaactggcctcaggcttgctcctcgtcacaggtcctttggtgctaaaccgggtgccattaagaaggacacaccagaagttcgtcatcgcaacaagcactaaaattgatatttctaacgtgaagattcctaagcatctgaccgacgcttactttaagaagaaaaaactgcgtaagcctcgtcaccaagagggtgagatcttcgatacagagaaggagaaatatgagattacggagcagcggaagattgatcaaaaggccgtagattcccaaattctgcctaaaatcaaagccatcccacagttacagggatatctcaggtcggtgttcgccctaaccaacggtatatatccacacaagctggtcttttag

SEQ ID NO: 203656 - DNA, 318 bp, synthetic construct
  misc_feature 1..318: note = Description of Artificial Sequence: Synthetic coding sequence
  source 1..318: mol_type = other DNA
atggccggcgagaaggtggagaagcccgacaccaaggagaagaagcccgaagccaaaaaagtggatgctggagggaaagtgaaaaagggaaacctcaaggcaaaaaaacccaagaaagggaagcctcactgcagccgcaacccggttcttgtgcggggcatagggaggtactctcgttcagcaatgtattccaggaaggccatgtacaagcggaagtatagcgcggctaagtcaaaggtggaaaagaagaagaaagagaaagtgttggccacagtgactaaacccgtgggcggtgacaagaatggcggaacccgctag

SEQ ID NO: 203657 - DNA, 219 bp, synthetic construct
  misc_feature 1..219: note = Description of Artificial Sequence: Synthetic coding sequence
  source 1..219: mol_type = other DNA
atggccggcgagaaggtggagaagcccgacaccaaggagaagaagccagaggcgaaaaaagtggacgccggggggaaagttaagaaaggcaacctaaaagctaaaaagccaaagaaaggcaaaccacattgctctcgaaaccctgtactagtgcggggaatcggccgctactcacgctcagctatgtattctcgcaaagccatgtacaaaagaaaatag

SEQ ID NO: 203658 - DNA, 480 bp, synthetic construct
  misc_feature 1..480: note = Description of Artificial Sequence: Synthetic coding sequence
  source 1..480: mol_type = other DNA
atggccggcgagaaggtggagaagcccgacaccaaggagaagaagcctgaagcaaagaaggtggatgcaggaggcaaagttaagaagggaaatttgaaggcgaagaaacccaagaagggcaaaccccattgcagccggaatccggtactcgtcagaggtataggacgctactctcgttcagcgatgtactcccggaaggccatgtacaagagaaaatatagcgctgcaaaaagcaaggttgagaagaagaaaaaagaaaaggtgcttgcgactgtgacaaagccggtggggggcgacaaaaatggcggaacaagagttgtgaagctgagaaaaatgccccgctattaccctaccgaagacgtcccaaggaaacttttatcgcatgggaagaagccgttcagccagcatgtccggaagctcagggccagcatcacgcccgggacgatcttgatcattctcacagggcgacaccgcggctag

SEQ ID NO: 203659 - DNA, 345 bp, synthetic construct
  misc_feature 1..345: note = Description of Artificial Sequence: Synthetic coding sequence
  source 1..345: mol_type = other DNA
atggccggcgagaaggtggagaagcccgacaccaaggagaagaagccagaggcgaagaaagttgacgcgggtggaaaggtgaaaaagggcaacctcaaagcgaagaagccaaagaaagggaaaccgcattgctcacggaacccagtcttggttcggggaattgggagatatagtagaagcgctatgtattctcggaaggccatgtacaaaaggaaatattccgccgcaaaatccaaagtggagaagaagaaaaaagagaaggtcctggcaacagttactaaaccagtcgggggagataagaatgggggcactcgtgtggtaaagcttcgcaaaatggtacggtag

SEQ ID NO: 203660 - DNA, 345 bp, synthetic construct
  misc_feature 1..345: note = Description of Artificial Sequence: Synthetic coding sequence
  source 1..345: mol_type = other DNA
atggccggcgagaaggtggagaagcccgacaccaaggagaagaagcccgaagctaagaaggtcgatgccggcggcaaggtaaaaaagggtaaccttaaagctaagaaacccaagaagggcaagcctcattgctcccggaatcccgtgctcgttcgcggaatcgggcggtatagccgctccgccatgtattctcggaaggccatgtataagcgcaagtattccgcagccaagtccaaggtcgagaagaagaagaaggagaaggtgctcgcaacagttactaagcctgtgggtggtgataagaatgggggaacaagagtcgtgaagctgcggaaaatggtgcgctag

SEQ ID NO: 203661 - DNA, 747 bp, synthetic construct
  misc_feature 1..747: note = Description of Artificial Sequence: Synthetic coding sequence
  source 1..747: mol_type = other DNA
atggagggcgtggaggagaagaagaaggaggtgcccgccgtgcccgaaaccctgaagaaaaaacgccgaaactttgccgagttgaaaattaaacgcctcagaaagaaatttgctcagaagatgttgcgtaaggctcggcgtaagctgatttacgagaaagcgaagcattaccacaaagagtatagacagatgtatcgcacggagatacgtatggcgcggatggcccggaaagccggcaatttctatgttcccgccgaacccaaattggctttcgtcatcaggatacggggcattaatggggtatccccgaaggtcaggaaggtccttcagctgctaagactgcgccagatcttcaatggtacattcgtgaaactgaataaagcatcaattaacatgctgaggattgtggaaccttatattgcttggggctaccctaacctcaagagtgtcaatgagttaatttataaaagagggtatggaaaaatcaacaaaaagagaatagctctcactgataatgcgctcattgcaaggtccctcggcaagtatggcatcatttgcatggaggatctgattcacgaaatttatacggtggggaagcggttcaaagaagctaacaatttcttatggccttttaagctgagcagccctcggggagggatgaagaagaagaccacccatttcgtcgagggcggagatgcaggcaacagagaagatcagatcaaccgcctgatccggcggatgaactag

SEQ ID NO: 203662 - DNA, 456 bp, synthetic construct
  misc_feature 1..456: note = Description of Artificial Sequence: Synthetic coding sequence
  source 1..456: mol_type = other DNA
atggcccccctgtaccaggccgccggcaagggcgacgtgcccaccaaaagacctccggtgcttagagcaggcgtcaacacagttacaaccctggtggagaacaaaaaagcccaattggtcgtgattgcgcacgatgtggatcccattgagctggtcgtattcctgcccgctctgtgccgaaaaatgggcgtaccctactgcataatcaaaggaaaggccaggctcggacgcctcgttcacagaaaaacgtgcaccactgttgccttcacccaggtcaacagtgaagacaagggcgctttggccaaactcgtagaagccatcaggaccaactacaatgaccgctacgacgaaattcgtaggcactggggcggcaatgtgctcgggcccaaatctgtggcccgaatcgcaaagcttgagaaagcaaaagctaaagagctagctactaagttggggtag

SEQ ID NO: 203663 - DNA, 801 bp, synthetic construct
  misc_feature 1..801: note = Description of Artificial Sequence: Synthetic coding sequence
  source 1..801: mol_type = other DNA
atgcccaagggcaagaaggccaagggcaagaaggtggcccccgcccccgctgtggttaaaaaacaggaggccaagaaagtggtgaacccgctgttcgagaaaagacccaaaaatttcggtattggtcaggacatacagccaaagcgggacctgacccgttttgttaaatggccacggtatatccgcctgcagaggcagcgggctattctgtacaaacgtctaaaagtgccccctgctatcaaccaatttactcaggccctggatcgccagaccgcaacgcagctgctcaagctcgctcacaagtatcggcccgagactaagcaggaaaagaaacaacggttactggcccgcgccgaaaaaaaagccgctggcaagggagacgtgcccaccaagcgcccacctgttctgcgggcgggggtaaataccgttaccacacttgtcgaaaataagaaagcgcagttggtggtgattgcgcatgacgtagaccccattgagcttgtcgtctttttgcccgcattatgcaggaagatgggggtcccgtactgtatcatcaagggaaaggcccgcctggggagattggttcacagaaaaacatgtacaactgttgcatttacccaagtgaactctgaggataagggtgctctggctaagctcgtagaggcgatcagaaccaactacaatgacagatacgatgagattcgccgacactggggtggaaatgtcctcggtcccaagtccgtggccaggatagccaagcttgagaaagcaaaggccaaagaattagctacgaagctgggatag

SEQ ID NO: 203664 - DNA, 576 bp, synthetic construct
  misc_feature 1..576: note = Description of Artificial Sequence: Synthetic coding sequence
  source 1..576: mol_type = other DNA
atgctggtgcggctgaacgtgcggtgcagctgccggggcgtggtgctgggcggctgtcgaaagctgttggcctccctggtgcagcctaaaggcaagaaagcaaaagggaagaaggtggctcccgcacccgcggtggtgaagaagcaggaggccaagaaggtggttaatccgctcttcgagaagcggccaaaaaattttggcatcggacaggacatccagccaaaacgagatttaacgaggtttgtgaagtggcctcggtacatccgcctccaaagacaaagggcaatcctttataaaagattaaaagtgcctcccgcaatcaaccaatttacacaagctcttgacagacagaccgctactcaactgctgaagttagcgcacaaataccggcccgaaaccaagcaagaaaagaaacaaaggttactggccagggcagaaaagaaggcggctggtaaaggcgatgtcccaactaaacgtccacctgtcttaagggctggcgtcaatactgtgactactttagtcgagaacaagaaagcccagctggttgtgattgctcatgacgtggatccaatatag

SEQ ID NO: 203665 - DNA, 774 bp, synthetic construct
  misc_feature 1..774: note = Description of Artificial Sequence: Synthetic coding sequence
  source 1..774: mol_type = other DNA
atgggccgggtgatccggggccagcggaagggcgccggcagcgtgttcagggcccacgtgaagcacagaaaaggggcagctcgccttcgagctgtggactttgccgaacggcacgggtatatcaaaggaattgtgaaagatatcatccacgatcctggccggggggctccattggccaaagtggtgtttagagacccctatcgattcaaaaagcgaacggagctcttcattgccgctgaggggattcatacagggcaattcgtgtattgcggaaagaaagctcagcttaacataggcaatgttctccccgtcgggactatgcctgaaggcactattgtgtgttgtctcgaagagaaaccaggggatcggggcaagctcgcacgggcgtccgggaactacgcaacagtgatctcccacaatccagagaccaaaaagacccgggtcaaactgcccagcggttcaaagaaagtcatatcatctgccaaccgggctgtagtgggtgtggtcgctggcggaggcagaattgacaagcctatcctcaaagcagggagagcctaccacaaatacaaggcaaagcggaactgttggccccgcgttcggggtgtggcaatgaatcctgtggagcacccctttggaggaggtaaccaccagcacatcggcaaaccaagtaccattcgcagggatgcaccagcagggagaaaggtggggctcatcgctgccaggaggacaggaaggctgaggggaacaaagacagttcaggaaaaggagaattag

SEQ ID NO: 203666 - DNA, 774 bp, synthetic construct
  misc_feature 1..774: note = Description of Artificial Sequence: Synthetic coding sequence
  source 1..774: mol_type = other DNA
atgggccgggtgatccggggccagcggaagggcgccggcagcgtgttcagagcccatgtgaaacaccggaagggagcagcccgactcagggcagtggattttgctgagcggcacggatacataaaaggtattgtgaaggacattatccatgatcccggccgcggcgcccccctagcaaaagtcgtgttcagggacccctacagatttaagaagaggaccgaactatttattgcggccgagggtattcacacggggcagtttgtgtactgcggtaagaaggcccagctcaatattggtaatgtgcttcctgtggggacaatgccggaaggcaccatcgtctgctgtttggaggaaaaacctggagatcgggggaaattggctcgagcctcaggcaattatgctaccgtgatcagtcataatcctgagacgaagaaaacccgcgtgaagctcccctccgggtctaagaaagtgatcagcagcgctaaccgcgcagtagtgggcgtggtggccggtggaggtagaatagacaaacccattctcaaagcaggaagagcctaccacaagtacaaggccaagcgcaactgttggccgcgggtccggggggtggccatgaacccggtggagcacccctttggaggcggcaaccaccagcacattggcaagccatccaccatccgtagggacgcacccgctgggagaaaggtcggcctcatcgcagcccgacgaaccggacggctcaggggtaccaagacagtgcaagaaaaagagaactag

SEQ ID NO: 203667 - DNA, 579 bp, synthetic construct
  misc_feature 1..579: note = Description of Artificial Sequence: Synthetic coding sequence
  source 1..579: mol_type = other DNA
atgaagaccatcctgagcaaccagaccgtggacatccccgagaacgtggatatcactctgaaaggccgcaccgtgatcgtaaagggaccacggggcaccctccgtagggacttcaaccacattaacgtggagttgtctctgctgggcaagaagaaaaagcgcctgcgagtggataagtggtggggaaataggaaggagctcgccaccgtccgcacaatttgttctcatgtacagaatatgatcaaaggcgtgaccctcggctttcgatataaaatgaggtccgtgtacgcccatttccccataaatgtcgtaattcaggagaatgggtccctcgtagaaattagaaatttcctaggcgaaaaatacattcggcgggtcaggatgcggcccggcgttgcatgttcagttagccaagcacaaaaagacgagctgatcctggagggaaacgacatagagttagtcagtaattcggccgccctgatacagcaggctacaaccgtgaagaacaaagatattagaaagtttctcgatggcatctatgtatccgagaaaggaacggtgcagcaagccgatgaatag

SEQ ID NO: 203668 - DNA, 444 bp, synthetic construct
  misc_feature 1..444: note = Description of Artificial Sequence: Synthetic coding sequence
  source 1..444: mol_type = other DNA
atgaagaccatcctgagcaaccagaccgtggacatccccgagaacgttgatatcaccctgaaaggaaggacagtgatcgtaaaagggccccggggcacattaagacgagactttaaccacatcaatgtcgagcttagcctgctgggtaaaaagaagaagcgattgcgtgttgataaatggtggggcaataggaaagaactggctaccgtgaggaccatctgtagccacgttcagaacatgatcaagggcgtgacgctgggttttaggtacaagatgcgcagtgtctacgcccacttccccattaatgtggtgattcaggaaaacggttcattagtcgagatcagaaacttcttaggggagaaatacattagaagggtcagaatgagacccggggtggcatgcttcaagttctctggatttgattctgcctctcataatagctag

SEQ ID NO: 203669 - DNA, 579 bp, synthetic construct
  misc_feature 1..579: note = Description of Artificial Sequence: Synthetic coding sequence
  source 1..579: mol_type = other DNA
atgaagaccatcctgagcaaccagaccgtggacatccccgagaacgtcgacatcaccctgaagggtcggaccgtaatcgtcaagggccccaggggaaccctgagacgggattttaatcatatcaatgtggagctgagtcttctgggcaagaagaagaagaggctgcgcgtggacaaatggtggggaaaccgaaaagaactggcaacggtgcggacaatttgttctcacgttcagaatatgataaagggtgtgactttgggtttcagatataaaatgcggagcgtgtacgcacactttcccatcaacgtggtaatccaggagaatggtagcttggtggaaatacgaaactttctgggggaaaagtatattcgaagagttcgtatgcggcctggcgtggcatgtagtgtctctcaggcgcaaaaggatgagctgattctggaaggtaatgatatcgagctggtatcgaactctgccgctctcattcagcaggctaccaccgtcaaaaacaaagatatccgaaagttcctggatggaatctacgtgagcgagaagggaaccgtccagcaggccgacgagtag

SEQ ID NO: 203670 - DNA, 501 bp, synthetic construct
  misc_feature 1..501: note = Description of Artificial Sequence: Synthetic coding sequence
  source 1..501: mol_type = other DNA
atgaagaccatcctgagcaaccagaccgtggacatccccgagaacgttgacatcacgttgaaaggtcgcacagtcattgttaaaggtcccagggggacactgcgtcgagattttaaccacattaacgtagaattgtcattactggggaagaaaaagaagagacttagggtcgacaagtggtggggaaaccggaaggagctagcaaccgtgagaactatatgctcacacgtgcaaaatatgattaagggtgttacacttgggttccgctataagatgcggagcgtctacgcgcattttcccattaacgtcgtgatacaagagaacgggagcctggtggaaattcgaaacttcctgggcgagaagtacatcagacgagtcagaatgcgccctggggttgcctgctccgtctctcaggcccagaaggacgaactgatcctcgaagggaacgacattgagctggtctccaactcagcagcattaatccaacaggctaccacgtag

SEQ ID NO: 203671 - DNA, 498 bp, synthetic construct
  misc_feature 1..498: note = Description of Artificial Sequence: Synthetic coding sequence
  source 1..498: mol_type = other DNA
atgctgatgcccaagaagaaccggatcgccatctacgagctgctgtttaaggagggggtcatggtagccaagaaggatgtacacatgccgaagcatccagaactcgccgacaaaaacgttccaaacttgcacgtcatgaaggccatgcagagtctgaagtcacgcggctacgtcaaggaacagtttgcatggaggcacttctactggtacctcaccaacgaaggcattcagtacctgcgagattacctgcacctacccccagaaatcgtgcccgcaaccttacgcagatctagaccagagaccggccgtccccggcctaagggacttgagggcgaaaggcctgccagactgacaaggggggaggcggatcgagacacctacagacggtccgctgtccctcctggggctgataagaaagcggaagcgggggccgggagcgctacagagtttcagttccgcggcggtttcggccggggacgtggacagcccccgcagtag

SEQ ID NO: 203672 - DNA, 477 bp, synthetic construct
  misc_feature 1..477: note = Description of Artificial Sequence: Synthetic coding sequence
  source 1..477: mol_type = other DNA
atggccgacatccagaccgagcgggcctaccagaagcagcccaccatttttcagaataaaaaacgggtgctgctaggcgagacaggaaaggagaaacttcccagatactacaagaacattggcctgggctttaaaaccccaaaagaggcgatcgaaggcacttacatagataaaaaatgtcctttcacgggcaatgttagtatccgcggtcggatcctgagcggtgtagtcacgaaaatgaaaatgcaaagaaccattgttatccgcagggactacctccactacattcgtaagtacaataggttcgagaagaggcacaaaaacatgtctgtgcacctatccccctgcttccgtgacgtgcagattggagatattgtgacggtgggcgagtgccgacctttgagcaagaccgtcaggttcaatgtcttgaaggtgacaaaggctgccgggaccaagaagcagtttcaaaaattttag

SEQ ID NO: 203673 - DNA, 423 bp, synthetic construct
  misc_feature 1..423: note = Description of Artificial Sequence: Synthetic coding sequence
  source 1..423: mol_type = other DNA
atgaccagcatgacccagagcctgcgggaggtgatcaaggccatgaccaaggcacgcaacttcgagcgcgtgctggggaagatcactctggtgtccgctgcccctgggaaggtgatatgcgaaatgaaagtcgaagaagaacataccaacgctattggtaccctgcacggaggccttaccgctaccttggtagacaacatctccaccatggcgttactctgcacggaacgaggtgcgccaggcgtttccgtagatatgaatatcacgtatatgtcccctgcgaagctcggcgaggacatagtgatcaccgcccacgttctgaagcagggaaaaacactggcctttacaagcgtggacttaaccaataaagctacaggtaagttgatcgcccaaggtcgtcatactaaacatctgggaaactag

SEQ ID NO: 203674 - DNA, 456 bp, synthetic construct
  misc_feature 1..456: note = Description of Artificial Sequence: Synthetic coding sequence
  source 1..456: mol_type = other DNA
atgggccggatgcacgcccccggcaagggcctgagccagagcgcccttccctaccgtcgctctgttcctacgtggcttaaactgacctccgacgatgtgaaggaacagatttacaaactagccaaaaagggccttacgccaagccagatcggagttatactccgggactcacatggagtggcccaggtgcggttcgtgacaggtaacaagattttaagaattctgaaaagtaaaggcttggcccccgatttgccagaagacctttaccatctgatcaagaaagccgttgctgtgcgcaagcacctggagcgcaaccggaaagataaagatgcaaagtttcgcttgatcctgatcgaatccaggattcaccggttggcccgctattataaaacaaagcgggtcctcccacccaactggaaatatgagagctccaccgcctccgcccttgtggcatag

SEQ ID NO: 203675 - DNA, 456 bp, synthetic construct
  misc_feature 1..456: note = Description of Artificial Sequence: Synthetic coding sequence
  source 1..456: mol_type = other DNA
atggccccccggaagggcaaggagaagaaggaggagcaggtgatcagcttaggtccccaggtggctgaaggggaaaatgtattcggcgtttgtcatattttcgctagctttaacgacacatttgtacatgtgaccgacctttctggtaaggaaaccatttgcagggtaactggcggcatgaaagttaaggcggaccgcgacgaatccagcccttacgcagccatgctggccgctcaggatgtggcacagaggtgcaaagaacttgggattaccgcactgcatattaagttgcgcgctaccggcggaaaccgcaccaagacgcccggaccgggtgcgcaatctgccctccgagccctggcaagaagtgggatgaagatcggacgtatcgaagacgttacgcctataccttctgacagcacccggcgaaagggcggcagaagaggcagacgcctgtag

SEQ ID NO: 203676 - DNA, 456 bp, synthetic construct
  misc_feature 1..456: note = Description of Artificial Sequence: Synthetic coding sequence
  source 1..456: mol_type = other DNA
atggccccccggaagggcaaggagaagaaggaggagcaggtgatcagcttggggcctcaggtggcagagggcgaaaatgtctttggggtatgccatatctttgcaagcttcaatgatacctttgtgcacgtcacagacttgtctggaaaagagaccatctgtcgcgttacaggagggatgaaggtgaaggctgatcgcgacgaaagctcaccatatgctgccatgctcgcagcgcaggatgtggcacaacgctgcaaggagctgggcatcactgccttgcatataaaattgcgggctaccggaggcaaccggacaaaaactccaggacctggtgcccagagcgccctgcgggcactggcccgctcagggatgaaaataggcaggatcgaagacgtgacccccattccgagtgattccacccgacggaaaggaggccggcgggggcggcggctgtag

SEQ ID NO: 203677 - DNA, 456 bp, synthetic construct
  misc_feature 1..456: note = Description of Artificial Sequence: Synthetic coding sequence
  source 1..456: mol_type = other DNA
atggccccccggaagggcaaggagaagaaggaggagcaggtgatcagcctagggccccaggtggccgaaggcgagaacgtctttggcgtttgccacatctttgctagcttcaatgatacgtttgtgcatgtcaccgatctttccggtaaggagaccatctgtagggtcactggcggaatgaaggtgaaggctgaccgtgatgagtcgtctccgtatgccgcaatgctcgcagcacaggatgtcgcccagagatgcaaggaacttggaattacggccctgcacatcaaactgcgagccacaggagggaatagaacaaaaacaccgggccctggggcacaatccgctctgcgcgctcttgcccgatccgggatgaagatcggccgaattgaggatgtgacccctatcccttccgatagcacacggcgaaagggagggaggcgagggagacgtctttag

SEQ ID NO: 203678 - DNA, 456 bp, synthetic construct
  misc_feature 1..456: note = Description of Artificial Sequence: Synthetic coding sequence
  source 1..456: mol_type = other DNA
atggccccccggaagggcaaggagaagaaggaggagcaggtgatcagcctgggtcctcaggtagctgagggcgagaacgtgttcggggtgtgccatatttttgcatcttttaatgacaccttcgtacacgtgactgacctctccgggaaagaaactatttgtcgtgtgaccggaggcatgaaagtcaaggccgatagggatgagagctctccttacgcagccatgcttgctgcccaggatgtggcccagcgatgcaaagaattagggattaccgccttacacatcaaattaagggccaccggcggaaacagaacaaaaacccccggccctggcgcccagtcagccctgagagctttggcccggtcgggcatgaaaattgggcggatcgaagatgtgacaccaattcctagcgactccacaaggcgaaaaggaggacggagagggcgcagactgtag

SEQ ID NO: 203679 - DNA, 6912 bp, synthetic construct
  misc_feature 1..6912: note = Description of Artificial Sequence: Synthetic coding sequence
  source 1..6912: mol_type = other DNA
atggccagcagcgtggccccctacgagcagctggtgcggcaggtggaggccctgaaagccgagaacagccatctcagacaggaacttcgcgacaacagcagccatttaagtaaactagaaacagaaacaagtggaatgaaggaagtgctcaaacatcttcagggaaagcttgaacaggaggctcgagtgctcgtcagttccgggcagacggaggtcctggagcagctcaaagcactgcagatggatatcacatccctgtataacctgaagtttcagccccctacactggggccagaacccgcggctaggacaccagagggctcccctgtgcacggatctggcccaagcaaagacagtttcggcgagttatccagggctacgattcgactgctggaagaattggatcgcgaacgctgtttcttgctgaacgagattgaaaaagaggagaaggaaaagctctggtattattcccagctgcaggggctgagcaaaagattggatgagttgccccacgtggaaacacaattctccatgcagatggacctcatccggcagcaactggagttcgaggcacaacatattcgctcacttatggaagagcgttttggcacaagcgatgaaatggtccaaagagcccagatccgagcgtccaggctcgaacagattgataaagagctgctggaggctcaggaccgggttcaacagaccgagcctcaagccctgttggcagtcaagagtgtgccggtggacgaggatccggagacggaggttccaacacacccggaggacggcacaccacagccgggcaattctaaagtagaagttgtgttttggctgctttccatgctcgccaccagagaccaggaagacactgcgaggactctcttggctatgtcgtcctctccagaatcatgtgttgctatgaggcggagcggctgcctacccctgctattacaaattttacacggaacggaggccgccgccggcgggagagcaggagccccaggcgcccccggcgccaaagatgctcgtatgcgtgccaatgccgcactgcataacatagttttctcccagcccgaccaagggctggctaggaaagagatgcgcgtactgcacgttctcgaacagatccgagcctattgtgagacctgctgggactggctgcaggcacgggacggtgggcctgagggagggggcgctggatcggcaccgattccaatagaaccccagatttgccaagcgacttgtgctgtgatgaagctgagctttgacgaagaataccgcagggcaatgaacgagctaggagggcttcaggctgtggctgagctcctccaggtagactatgagatgcataagatgactcgtgaccctttgaatttagccttgcggcgctacgccggaatgacgctgaccaatctgacctttggggatgtggccaataaagctacactgtgcgctaggaggggttgcatggaagccattgtcgcccagctggcatcagacagcgaagagctgcatcaggtggtgtccagcatcttgagaaacctttcatggagggcagacatcaacagcaaaaaagtgctgcgagaggcaggcagtgtcacggctcttgtgcagtgcgtccttagagcgaccaaggagtctactcttaagtcagtgttatctgcgctctggaatctgtctgctcactctactgaaaataaggcagctatttgccaagtggatggggctttagggttcctcgtctctacccttacctataagtgccagagcaattccctagcaataattgagtctggaggcggaatattacggaatgtcagcagtctggttgccactagggaagattaccgacaggttctgcgggatcataactgcctccaaaccctgctgcagcacctaaccagtcatagcctgacaatcgtgagtaatgcatgtggaactctgtggaaccttagcgcacggtctgcccgggatcaagagctactgtgggatctgggcgccgtgggcatgctacggaacttggtacattctaagcacaagatgatagccatgggaagcgcggccgccctcagaaacctccttgcccaccggcccgcaaaacatcaggccgccgcaactgccgtgtcccctggttcctgcgtgccatctctgtatgtgagaaagcagagagctctggaagctgagctggatgcaagacatcttgctcaagccttagaacacctggaaaaacagggtcctcccgcggccgaggccgcgactaaaaaacccctgcctcctctgaggcacttggatggtctagcgcaggactacgcttcagattccgggtgttttgacgatgacgatgctccatcaagtttagccgctgccgccgcaaccggcgagccagccagccccgcagccttaagtttattcctgggcagtccgttcctccaagggcaagcgctcgctcggaccccacctacacggagaggaggcaaagaggcggaaaaggatactagcggagaggccgccgtggcggctaaagctaaggctaaactggcgctggccgttgcccgaattgatcaattggtggaagacatctctgcacttcacacctccagtgacgatagcttcagtctatcttcgggcgacccagggcaggaggccccccgtgaggggcgagcccagtcttgtagtccatgtagaggccctgagggaggccggagggaggcaggctcacgggcacaccccctgctcaggctgaaggctgcccacgcgtctttatccaacgatagtctcaacagtggttctgccagcgatggttattgtcctagggagcatatgctcccctgccccctcgccgccctggcctctagaagagaggacccccgctgtgggcagcctaggccttctaggctggatctggatctccctgggtgtcaggccgaaccacctgcacgcgaggctacttcggctgacgcaagagtgagaactataaagctgagtcctacataccagcacgtgccattgctggagggcgccagcagggccggcgccgaacctttggccggtccaggcatcagtcccggcgcaagaaaacaggcctggctgcctgctgaccatttgtctaaagtccccgagaaactcgccgccgcccctctgtcagttgcctccaaggcccttcaaaagttggctgcccaagaaggaccattaagtctgtcccggtgcagcagtctgagttcactgagctctgccggccggccagggccaagcgaaggcggagatcttgacgacagtgatagctccctagagggcctagaagaggccggccccagcgaagccgaactggatagcacgtggcgagccccaggcgctacaagcctgccagttgcaatcccggcacctcgtagaaacagaggtagaggtctaggagtagaagatgcaaccccgagttcctcgagtgaaaactacgtccaagagactcccctggtgctgagccgatgctcgtcagtctcaagtttggggtcatttgagtccccatcgatcgctagctctattccctctgagccctgtagcggacagggctctgggacaatttccccttcagagctccctgacagtcccggtcagacgatgcccccgtcacggtccaagaccccacctcttgccccagccccgcagggacctccagaggctacacagttctctttgcaatgggagtcatatgtcaagcggtttctcgacattgctgactgccgagagcgttgccgtttgcccagtgaattggatgcgggctccgtaaggttcactgtggagaagccggacgaaaatttttcctgtgcaagctccctttccgcacttgccctgcacgagcattacgtccagcaggatgtggagctgcgcctgctcccttctgcctgccccgagcgaggtggcggagctggaggtgctgggctccacttcgctggacacaggcgcagagaggaaggacccgctcccacgggctctaggccccgcggcgcggccgaccaggaactcgagcttctccgggaatgcctgggggcggctgttcccgcaagattgagaaaggtcgcttcagcactggtcccgggccgccgtgccctccctgtgcctgtgtacatgctggtccctgctccagcacctgcgcaggaagacgacagctgcacagattcagctgaaggcacccccgttaacttttcctctgctgccagcctttccgatgagactctgcagggaccccctagagatcagccaggtgggcctgcagggaggcagcggcccactggcagaccaaccagcgcccggcaagccatgggtcatcgccataaagcaggaggcgcaggacggtctgccgaacagagccggggggccggtaagaatagggccgggctcgagctgcctctggggcggcccccaagcgcacccgctgacaaagacggaagtaaaccagggcgtacacgtggcgacggcgccctacagtctttgtgcttaactactcctacggaggaggccgtttactgtttttacggcaacgactcagatgaggaaccgcccgctgcagcacccacccccacccaccgccgcacgagcgcgatcccgcgggctttcactcgcgagcgcccacagggacgtaaagaggcccctgcgccaagtaaggctgcgcccgcagcaccacctcccgcccggactcaaccatcccttatcgccgatgaaacacccccttgttactcactgagttcctccgcatcttcactgagcgaacccgagccaagcgagcccccagccgtgcacccgaggggccgagaaccagccgtcacaaaggatcctggtcccggcgggggccgtgactcatccccatcccctagggcagctgaggagctcttgcaacgctgcataagctccgcacttccaagacggcggcccccagtgagtggtctgcgaagacgtaaaccgcgcgcaaccaggctggacgagagaccggcagaagggagtagggaacgtggggaggaggccgctggctctgacagagcatccgatctggattctgtagagtggagggctattcaagagggcgctaactcaattgtgacctggctgcaccaggccgcagccgctactcgggaagcctccagcgagtccgattccatactgtctttcgtctcaggtctaagtgtcgggtccaccctgcagcctcctaagcataggaagggaagacaggctgagggtgagatggggtcagcgaggcgacctgaaaagcgcggcgccgcgtcagtgaaaacaagcggtagtcctcgctctcccgctgggcccgaaaaacctcgaggtactcagaaaacaacaccaggtgtacccgcagtgctgcgcggcagaacagtcatctacgttcccagtccagcccctcgtgcccagcctaagggaacccctggaccccgcgccacacctaggaaggtggccccaccttgtctagcccaaccggctgcacctgccaaagtgccaagccctggacagcagcgctctcgctcccttcacaggccagccaaaacttctgaactggctactctgtctcagcctccccgatcagccacccctcctgcccgcttggccaaaactcccagctcatcctcctctcagacctcaccagcaagccaaccactgccgcggaagaggcccccagtgacgcaggccgccggcgcccttccagggccaggcgccagtcccgtgcctaagacccctgcaaggaccctgctggccaagcagcacaaaacccagaggagccctgtgcgaattccctttatgcagagaccagcaagacgtgggcccccccctctcgcgcgagctgtacctgagccagggccacgcggaagagcaggaacagaggcaggcccaggtgctcgggggggtagactcggcctggttagggtggcctccgctctctcttcaggaagtgaatcctccgacaggtccgggttccgaagacagcttaccttcataaaagagagcccaggattgcgacgcagaagatcagagctgagcagtgcagagagcgcagctagcgctcctcagggggcctcaccacggaggggtcgtcccgctctccctgctgtgttcctatgctcaagccgatgtgaagagctgcgcgccgcgccaaggcagggacccgctccagctagacaacggccaccagcggcgaggccctcaccaggcgagagacctgcccggaggaccaccagtgagtcccccagtagactgccagttagagccccggccgcccggcctgagactgtcaagcggtacgcctctctgcctcatatcagtgtagctcgaagacctgatggcgccgtaccagctgcccccgcgtcagctgacgctgcccgccgtagtagcgacggggaaccacgccctctgccacgagtcgctgcccctgggacaacttggaggcgcattagggatgaggacgtgcctcacatcttgcggtctactcttcctgccactgcactgccacttcgagggtcaaccccagaggatgcacctgcaggccccccccctcggaaaacttcagacgccgtagtgcagacggaggaagttgccgctcccaagaccaatagtagcacatccccatccctggaaacacgggagcctcccggagcccccgccgggggccagctgtcgctcctggggagcgacgtcgacggacctagcctggctaaggccccaatttctgctccattcgtccacgagggcttgggcgtggcagtaggaggctttcccgcctctcggcacgggtcaccatccaggtctgctcgggtcccgccgtttaattacgtgccctctcctatggtcgtggccgctacaacagactctgccgctgagaaggcacctgctacagcaagcgcaactctgctggagtag

SEQ ID NO: 203680 - DNA, 438 bp, synthetic construct
  misc_feature 1..438: note = Description of Artificial Sequence: Synthetic coding sequence
  source 1..438: mol_type = other DNA
atggccgaggtggagcagaagaagaagcggaccttccggaagttcacttacagaggagttgatcttgaccaattactggacatgagctacgagcagcttatgcagctatatagtgcccggcagcggcggcggctcaaccgagggctgcgcaggaagcagcactcgcttctgaaacgtctgcgaaaggcgaaaaaagaagctcctcctatggagaaacccgaggtggtcaagacccaccttcgagatatgattatcttgccggagatggtgggtagcatggtcggggtgtataacggtaaaacctttaaccaggtagagattaaaccagaaatgattggccattacctcggagaattttcaattacgtataaacccgtgaagcacggcagaccaggaatcggggcgacccacagctcaaggttcattcctctcaaatag

SEQ ID NO: 203681 - DNA, 393 bp, synthetic construct
  misc_feature 1..393: note = Description of Artificial Sequence: Synthetic coding sequence
  source 1..393: mol_type = other DNA
atggtgcggatgaacgtgctggccgacgccctgaagagcatcaacaacgccgaaaaacgcgggaaacgtcaggtgttgattagaccttgctcaaaggtcatcgtgaggtttttgactgtgatgatgaagcacggctacattggcgaattcgagatcattgacgaccatagagcgggcaagattgtcgtcaatttgacgggtagactgaacaagtgcggcgtaatcagtcccaggtttgatgtccagctgaaggacctcgagaagtggcagaacaatctcctaccaagccggcagtttgggtttatcgtgttgaccacttctgctggaataatggatcacgaggaagccaggcggaagcacactggcgggaagattctgggctttttcttttag

SEQ ID NO: 203682 - DNA, 393 bp, synthetic construct
  misc_feature 1..393: note = Description of Artificial Sequence: Synthetic coding sequence
  source 1..393: mol_type = other DNA
atggtgcggatgaacgtgctggccgacgccctgaagagcatcaacaatgccgaaaaacgcggcaagcgtcaagttctcatccgaccatgttcaaaggtgatcgttaggttcctgacggtcatgatgaagcacggatacatcggcgaatttgaaatcatagacgaccatagggcagggaaaattgtcgttaatctcacaggaaggctgaataaatgcggcgttatcagcccccgcttcgacgtccagcttaaagaccttgagaaatggcagaacaacttgttacccagccgccaattcggctttatcgtgctgacaacgtccgctggcattatggatcatgaggaggcccggcggaagcatactgggggtaaaatcctgggattctttttttag

SEQ ID NO: 203683 - DNA, 441 bp, synthetic construct
  misc_feature 1..441: note = Description of Artificial Sequence: Synthetic coding sequence
  source 1..441: mol_type = other DNA
atgcccagcaagggccccctgcagagcgtgcaggtgttcggccggaaaaagactgctaccgcagtcgcccactgtaagagaggaaatggcctcatcaaagtgaatgggagaccattagagatgatcgagccccggaccctacagtacaagctgctcgagccggtgctgctactgggaaaagagagatttgcaggcgtggacatcagagttagggttaagggtggaggtcatgtagctcagatctacgctatcaggcaaagtatatctaaggcccttgtggcatactaccaaaaatatgttgacgaggcctctaagaaagaaatcaaagacatactcatccagtacgataggacattgctggtcgccgatcccagaagatgtgagagtaagaaatttggcggccctggtgcacgcgcaagataccagaagtcctacagatag

SEQ ID NO: 203684 - DNA, 459 bp, synthetic construct
  misc_feature 1..459: note = Description of Artificial Sequence: Synthetic coding sequence
  source 1..459: mol_type = other DNA
atgcccagcaagggccccctgcagagcgtgcaggtgttcggccggaaaaaaacagcaactgcggtcgctcattgcaaacgagggaacgggctgatcaaagtgaacggtcggccactcgaaatgatagagccccggactttgcagtataaactcctcgaacccgtcctgttgctgggaaaagaacggttcgccggcgtggacattagagtccgagtgaagggagggggacacgtggcccaaatctacggagaaagtcaggagctcggcgcctggcgaagatggctgtgggagggtgggctgcacagcgcccctgtacctttcaattgcgtgtcttttagccagctctctgtctctccatctccgaagccttggtggcccatcactagaaatatgtggatgcgcttaccccggagacggtctaagacctcatcatctagtatgacaggcccctgttggtag

SEQ ID NO: 203685 - DNA, 408 bp, synthetic construct
  misc_feature 1..408: note = Description of Artificial Sequence: Synthetic coding sequence
  source 1..408: mol_type = other DNA
atgggccgggtgcggaccaagaccgtgaagaaggccgcccgggtgataatcgaaaagtactacacacgattgggcaatgattttcacactaataaaagagtgtgcgaagagatagccataatcccatctaagaaattaaggaataaaatagccggatacgtaacccacctgatgaagcgtatccaacgtggccctgtgcgggggatctccattaaactccaggaggaagaacgagagaggagggataattacgtgcctgaggtttccgccctggatcaggaaattattgaagttgaccccgatactaaggaaatgctgaagctgctggactttggatcgcttagtaaccttcaggttacccagcccacagtgggaatgaactttaagacacccagagggcctgtttag

SEQ ID NO: 203686 - DNA, 300 bp, synthetic construct
  misc_feature 1..300: note = Description of Artificial Sequence: Synthetic coding sequence
  source 1..300: mol_type = other DNA
atggacctgatcggcttcggctacgccgccctggtgaccttcggcagtatttttggatacaagcgaaggggcggcgtgcccagcttgatcgccgggttgtttgtgggctgccttgccggctacggagcctatagagtcagcaatgacaaacgggacgtcaaagttagcctctttacagcattttttctggctactataatgggagttagatttaaaaggtctaaaaagatcatgccggctgggctcgtcgccggcctgtcacttatgatgattcttagactagtcctcctgttattatag

SEQ ID NO: 203687 - DNA, 459 bp, synthetic construct
  misc_feature 1..459: note = Description of Artificial Sequence: Synthetic coding sequence
  source 1..459: mol_type = other DNA
atgagcctggtgatccccgagaagttccagcacatcctgcgggtgttgaacacaaacatcgacgggcgtcgcaagatagcctttgccatcacagccatcaaaggcgtagggcgacggtacgcccatgtggtcctacgtaaggcagacattgacctaacgaaacgggcaggggaactaaccgaggacgaagttgagagagtcattacgatcatgcagaatccccgccagtacaagattcccgattggttcctcaaccgacagaaggacgtcaaagacggcaaatacagtcaggttctcgccaatgggttagataataaattgcgcgaagacctggagagacttaagaagattcgggcacaccggggcctgcgccatttctggggtttacgggtgaggggacagcataccaaaactaccggccggcgtggccgcacggtgggcgtgtcaaaaaagaaatag

SEQ ID NO: 203688 - DNA, 459 bp, synthetic construct
  misc_feature 1..459: note = Description of Artificial Sequence: Synthetic coding sequence
  source 1..459: mol_type = other DNA
atgagcctggtgatccccgagaagttccagcacatcctgcgggtgctgaacaccaatatcgacggtaggcgtaaaatcgctttcgctatcactgccataaaaggcgtcggacgtcgttacgcccacgtggtcttgcggaaggcagatattgatctgacgaaaagagccggcgagctgactgaggacgaagtggagagagtgatcaccataatgcaaaacccgcgccagtacaaaatccctgattggttcctcaatcggcagaaggacgtgaaagatggaaagtactcccaggttttggctaatggactggacaataaattaagagaggatttggagagactcaagaagattcgcgcacaccgagggctgcggcacttttggggcctgcgggtgcgggggcagcataccaaaacaaccggacggcgcggccgaaccgtcggcgtttctaagaagaaatag

SEQ ID NO: 203689 - DNA, 105 bp, synthetic construct
  misc_feature 1..105: note = Description of Artificial Sequence: Synthetic coding sequence
  source 1..105: mol_type = other DNA
atgagcctggtgatccccgagaagttccagcacatcctgcgggtgctcaataccaatatcgacggcagaaggaagatagcatttgctattaccgccataaaatag

SEQ ID NO: 203690 - DNA, 459 bp, synthetic construct
  misc_feature 1..459: note = Description of Artificial Sequence: Synthetic coding sequence
  source 1..459: mol_type = other DNA
atgagcctggtgatccccgagaagttccagcacatcctgcgggtgctgaacacaaatatcgacggccgtcgtaaaatcgccttcgccatcacggctattaagggagtggggcgcaggtacgctcacgtcgttctgcgaaaagctgacatcgacttaacgaagagagcaggcgagctgactgaagacgaggttgaacgcgttataacaatcatgcagaatcctcgccagtacaagatccctgactggtttttaaatcgccagaaagacgtcaaggatggcaaatactcacaggtcctcgcaaacgggctagacaataagctccgtgaagacttggagagattgaaaaagatccgggctcacaggggattgagacacttctggggtctgagagtgcgtggccagcataccaaaacaacaggccgccggggtcggaccgtgggcgtgtccaaaaaaaaatag

SEQ ID NO: 203691 - DNA, 459 bp, synthetic construct
  misc_feature 1..459: note = Description of Artificial Sequence: Synthetic coding sequence
  source 1..459: mol_type = other DNA
atgagcctggtgatccccgagaagttccagcacatcctgcgggtgctgaatactaacattgacggaagaaggaaaatcgcctttgccatcactgccatcaagggcgtcggaaggaggtatgctcatgtcgtcctgcgaaaggccgatatcgacttgacaaagagggctggcgaactgacggaagatgaggtggagagagtgataaccataatgcagaacccacggcagtataagattccagactggttcctgaacaggcaaaaagatgtgaaagacggcaagtactcccaagttctcgcaaatgggctcgacaacaagcttagagaggacttggagaggcttaagaagataagggcccacagggggcttcgtcatttttggggcttaagagtgagaggccaacacacaaagacaaccggaagaagagggcgcaccgtgggtgtatctaaaaagaagtag

SEQ ID NO: 203692 - DNA, 249 bp, synthetic construct
  misc_feature 1..249: note = Description of Artificial Sequence: Synthetic coding sequence
  source 1..249: mol_type = other DNA
atgcagaacccccggcagtacaagatccccgactggttcctgaacagacaaaaggatgtaaaagacggaaaatattcacaggtcctcgctaacggactggataacaaattacgagaggacctggagcggttgaagaaaatccgggctcatcggggattgagacatttctgggggttgcgggtgcggggacagcacaccaagacaaccggaagaagaggaagaactgtgggcgtgtctaaaaagaaatag

SEQ ID NO: 203693 - DNA, 249 bp, synthetic construct
  misc_feature 1..249: note = Description of Artificial Sequence: Synthetic coding sequence
  source 1..249: mol_type = other DNA
atgcagaacccccggcagtacaagatccccgactggttcctgaacagacagaaggatgtaaaggatggcaaatatagccaagttttggccaacgggttggataataagttgagagaagatttagagcgattgaagaagataagagcacaccgcggcctgagacatttctgggggctacgggtaagaggtcagcacactaaaacgaccggccgtcgaggtcgcacagtgggagtgtccaagaagaaatag

SEQ ID NO: 203694 - DNA, 249 bp, synthetic construct
  misc_feature 1..249: note = Description of Artificial Sequence: Synthetic coding sequence
  source 1..249: mol_type = other DNA
atgcagaacccccggcagtacaagatccccgactggttcctgaacagacagaaagatgtcaaggacgggaaatactcacaggttctggccaatggattggataacaaacttcgtgaggatctagaacgactgaaaaagatcagggcgcatagggggttaagacacttctgggggctccgggtgcgggggcagcatacaaaaaccaccggccgccggggaaggaccgttggggttagcaagaagaaatag

SEQ ID NO: 203695 - DNA, 249 bp, synthetic construct
  misc_feature 1..249: note = Description of Artificial Sequence: Synthetic coding sequence
  source 1..249: mol_type = other DNA
atgcagaacccccggcagtacaagatccccgactggttcctgaacaggcagaaagatgtgaaggatgggaaatatagccaggtgctagctaatggactcgataacaagctgcgcgaggacctcgaaaggctaaagaagattcgggctcacagaggtctccgccatttctggggacttagagtgcgaggacagcacactaaaactactggccgtcggggtagaaccgtgggcgtgagtaaaaagaagtag

SEQ ID NO: 203696 - DNA, 249 bp, synthetic construct
  misc_feature 1..249: note = Description of Artificial Sequence: Synthetic coding sequence
  source 1..249: mol_type = other DNA
atgcagaacccccggcagtacaagatccccgactggttcctgaaccgtcaaaaggacgtgaaagatggtaagtattcacaggtgttagccaacggactcgataacaagctgagggaagacttagaacgactgaagaagatacgggcacatcgcggtctcagacatttttggggtttgcgagtgcgcgggcaacatactaagactacaggcagacgcggaaggactgtgggggtcagcaagaagaagtag

SEQ ID NO: 203697 - DNA, 648 bp, synthetic construct
  misc_feature 1..648: note = Description of Artificial Sequence: Synthetic coding sequence
  source 1..648: mol_type = other DNA
atgtacagcttcatgggcggcggcctgttctgcgcctgggtgggcaccattctgttagtggtggcgatggccactgatcattggatgcaataccgactgtccggtagcttcgctcaccaaggactgtggcgctattgcctgggcaataagtgttacctgcagaccgactcgatcggcgaaccgcctggacaggggccaggacgcgcatggggaaagagtcgggctgatctgggagcacagggacacttgtactcccgatggagaacgctacggctcaaagaaggaaaaggcgcgactcaggcctactggaacgctaccagggcatttatgattctgtccgcactgtgtgccatttccggcattatcatgggtatcatggccttcgcccatcaacccactttctctaggatatccagaccattcagcgccggcattatgttttttagctcaactctgttcgtggttctggccctggctatatacaccggagtgactgttagctttttgggcaggagattcggggattggagattcagttggagctacattctgggatgggtggctgtgctgatgaccttctttgctgggatcttctatatgtgcgcgtaccgcgtgcacgagtgccggcgtttgtccacccctcgctag

SEQ ID NO: 203698 - DNA, 438 bp, synthetic construct
  misc_feature 1..438: note = Description of Artificial Sequence: Synthetic coding sequence
  source 1..438: mol_type = other DNA
atgcccggcgtgaccgtgaaggacgtgaaccagcaggagttcgtgcgggcactcgccgcatttctgaagaagtccggaaagctcaaggttccagagtgggtggacactgtgaaactagctaaacataaggaactggctccatacgacgagaactggttttacacccgagccgcctcaaccgcccgccacctctacctccgcgggggcgccggagtcggaagcatgacgaagatttatggagggcgccaacggaacggagtaatgccctctcatttttctaggggaagcaagtcagtcgcgcgacgagtgttgcaggccctagaaggtctgaagatggttgaaaaagaccaggatggtggtaggaaacttaccccccagggtcaaagagacctggacaggatcgccggtcaggtagcagcagccaataaaaagcattag

SEQ ID NO: 203699 - DNA, 411 bp, synthetic construct
  misc_feature 1..411: note = Description of Artificial Sequence: Synthetic coding sequence
  source 1..411: mol_type = other DNA
atgagcgccgccctgctgcggcggggcctggagctgctggccgcctccgaagcaccacgcgatccacctggccaggccaaaccgagaggggctcctgtcaaacggcctcgaaaaacgaaagccattcaggctcagaagcttagaaactccgctaaaggcaaagtgccaaaatctgccctggatgagtatcgaaagagggagtgccgcgatcatctgcgggtcaaccttaaattcttgacccgaacccggtcaacagtagctgaatccgtttcacagcaaatcctcaggcagaatcgagggcgaaaagcatgcgacagacccgtggccaaaacaaaaaagaagaaggctgaaggaacagtgttcacggaggaagatttccagaaatttcagcaggagtacttcgggagctag

SEQ ID NO: 203700 - DNA, 882 bp, synthetic construct
  misc_feature 1..882: note = Description of Artificial Sequence: Synthetic coding sequence
  source 1..882: mol_type = other DNA
atggccgacgacgccggcgccgccggcggccccggcggccccggcgggcccggaatgggaaatcgtgggggatttcggggtggtttcggcagcggcattagggggaggggacgcggacgggggagggggcgggggagggggcgtggagcaagaggtggaaaggccgaagataaggaatggatgcccgtcaccaagttaggtcgactggttaaggatatgaaaatcaagagcctcgaagaaatctatcttttcagtttgccgattaaggagagcgaaatcatcgacttttttctgggagccagcctcaaagacgaagtgctcaaaatcatgcccgtacaaaagcagaccagagcagggcaacgaacacgctttaaggctttcgtggcaattggcgactataatggccacgtggggctcggagtcaagtgctctaaggaggttgcaaccgccattaggggggctataatcctggctaagctcagtatcgtgccagtgagacgagggtactggggcaacaagattggtaagcctcataccgtaccctgtaaagtaaccgggcggtgtgggtccgtgttggttcgcctgatcccagcaccacgtgggacaggcattgtgtcagcacccgtgccaaaaaaattgttgatgatggcaggtatagatgactgctatacctccgctaggggctgcacagctacgctaggcaattttgccaaggctacattcgacgcaatcagcaagacctattcctacctgactccagatctttggaaagaaacagtgttcaccaaaagcccttaccaggagttcaccgaccacctcgtgaagacccacacacgagtgagtgtacagagaacccaggctcctgccgtggcaacgacatag

SEQ ID NO: 203701 - DNA, 708 bp, synthetic construct
  misc_feature 1..708: note = Description of Artificial Sequence: Synthetic coding sequence
  source 1..708: mol_type = other DNA
atggccgacgacgccggcgccgccggcggccccggcggccccggcggccctggcatggggaatagagggggctttaggggaggattcggaagcggtatcaggggtaggggcagaggtcgtgggcgtggccgaggcagaggtcggggggcccggggggggaaagccgaggataaggaatggatgcccgttacaaagctgggtcgcctcgtgaaggacatgaaaattaagagcctcgaagaaatttatctgttcagtttgcctatcaaggagagcgagataattgatttttttctgggcgcctctctgaaagatgaggtcctcaaaatcatgcccgtccaaaagcagacgagagctggacagagaactcgcttcaaagtgactggacgctgtggcagtgtattggtccgattaatcccggcacctcgcggcactggaatagtttcggcgcctgtgcctaaaaaattgttgatgatggctggaattgacgactgttatacgtcggcgagaggttgtactgcaacactgggaaacttcgcaaaagccacatttgacgccatttccaagacatacagttacttaaccccggatttgtggaaagagactgtgttcactaaatctccctaccaagagtttacagaccacttagtgaagacgcatactagagtatctgtgcaacggactcaggcccccgcggttgccactacatag

SEQ ID NO: 203702 - DNA, 537 bp, synthetic construct
  misc_feature 1..537: note = Description of Artificial Sequence: Synthetic coding sequence
  source 1..537: mol_type = other DNA
atggccgacgacgccggcgccgccggcggccccggcggccccggcggaccaggtatgggaaaccgcggtggcttcaggggcggatttggctctggaattagagggcgtggccgcggacgtggtcggggccgaggaaggggacgcggagcccggggcggaaaggctgaagataaagagtggatgccagtcacgaaactgggaagacttgttaaggatatgaaaatcaagtccctggaagaaatctatctgttctccttgccaattaaggaatccgaaattatagacttttttctcggagcttccctgaaagacgaagtgttgaagattatgccggtccaaaagcagaccagggctgggcagcgcacgaggttcaaagtgcccggctgtcccgggggaggatgtgctgggttagccgggactcttagcgccttgcactcgtgcacatggttgcacccatgtgacttccggaacggcgagcgcgagaagaggtctcctcaagaccttggctgggcacttctgtggcctctgtttccctag

SEQ ID NO: 203703 - DNA, 588 bp, synthetic construct
  misc_feature 1..588: note = Description of Artificial Sequence: Synthetic coding sequence
  source 1..588: mol_type = other DNA
gtgaccaagctgggccggctggtgaaggacatgaagatcaagagcctcgaggagatctacctctttagcctgcctattaaggctttcgtggccattggcgattataacgggcacgtgggcttgggcgtgaagtgtagtaaggaagttgctaccgccataagaggggcaatcatcttggcaaagctatccattgtccctgtgcgacgcggttactggggaaacaagataggaaagccccacacggtcccctgtaaggtgaccggcagatgtggcagcgtgctggtcaggctaatacccgccccccgagggaccggtattgtgagtgccccggtgccaaaaaagctcctcatgatggctggcatcgacgactgctacacatccgcaagaggctgtacggctaccctggggaactttgctaaggctacattcgacgcgatttcaaagacatactcctacctcactcccgatctctggaaagagactgtgttcactaagtctccctaccaggaattcactgaccatctggtgaaaacacatacacgcgtctctgtacagaggacccaggcccctgccgtggccacgacgtag

SEQ ID NO: 203704 - DNA, 360 bp, synthetic construct
  misc_feature 1..360: note = Description of Artificial Sequence: Synthetic coding sequence
  source 1..360: mol_type = other DNA
atggccttcaaggacaccggcaagacccccgtggagcccgaggtggccatacaccggataagaattactctgactagccgcaacgtgaaatcactcgagaaggtgtgcgctgatctgatccggggagctaaggagaagaacctgaaagtgaaagggcccgtaagaatgcccacaaaaactctccggattaccacacggaagactccttgtggagagggcagtaaaacctgggacagatttcaaatgcggattcataagcgtctgatagatctgcatagtccttcagagatcgtcaagcagatcacgagcatctccatagagcccggcgtggaggtggaagttaccatcgctgacgcgtag

SEQ ID NO: 203705 - DNA, 429 bp, synthetic construct
  misc_feature 1..429: note = Description of Artificial Sequence: Synthetic coding sequence
  source 1..429: mol_type = other DNA
atggccttcaaggacaccggcaagacccccgtggagcccgaggtggcaatccataggatccgtattacacttaccagtcgcaacgtgaagtctctggagaaagtttgcgccgacttgatcaggggcgctaaagaaaagaacctgaaggtcaaaggacctgtgagaatgccaaccaaaactctgaggattaccaccaggaaaaccccatgtggggagggatctaaaacttgggatcgatttcagatgagaatccataaacgccttatcgacttacatagtcctagcgagatcgttaagcaaataacctcaatctccatcgaacctggcgttgaactcatcgaaagtactgacgcagagcctatggacactgaagggcaacagtacaccctgcggtctgtgttcgagagtccaggtacttgtcctttctag

SEQ ID NO: 203706 - DNA, 360 bp, synthetic construct
  misc_feature 1..360: note = Description of Artificial Sequence: Synthetic coding sequence
  source 1..360: mol_type = other DNA
atggccttcaaggacaccggcaagacccccgtggagcccgaggtggccatccataggattagaataacccttactagtcgcaacgtgaaatcactcgagaaggtatgtgctgatttgattcggggggcaaaggaaaagaacctcaaggttaaaggtcccgtaaggatgcccacaaagacactgaggattactaccaggaaaacaccgtgcggggaggggtctaagacctgggaccggtttcagatgcgcatccataagaggctaatcgatctgcattcccccagcgaaattgtgaagcagatcacatccatttcaatcgagcccggtgtggaagtcgaggtgacaatcgccgatgcatag

SEQ ID NO: 203707 - DNA, 252 bp, synthetic construct
  misc_feature 1..252: note = Description of Artificial Sequence: Synthetic coding sequence
  source 1..252: mol_type = other DNA
atgcagaacgacgccggcgagttcgtggacctgtacgtgccccggaaatgttccgcctctaacagaattatcggcgcaaaggatcacgcttccatccagatgaacgttgcagaagtggacaaggtcacgggcagatttaacggtcaattcaagacttatgctatctgtggggcgatacggcggatgggggagtcagatgacagcattctccgtcttgcaaaggccgacggaattgtgtccaagaacttctag

SEQ ID NO: 203708 - DNA, 294 bp, synthetic construct
  misc_feature 1..294: note = Description of Artificial Sequence: Synthetic coding sequence
  source 1..294: mol_type = other DNA
atgcagaacgacgccggcgagttcgtggacctgtacgtgccccggaagtgttctgcctcaaaccgcattatcggggcaaaggaccacgctagcatccagatgaatgttgccagactcacacgctcacaagctgggcttatggcgtctctgaagctcatgctgagtgctgggccctttgtcggatgggtaagccaaatgatccctttttcagactggccgcggcggtggcacaggctaaaagaactcctgaccggcgaaaatcaccgatgtggcattttcgtcattaataaatag

SEQ ID NO: 203709 - DNA, 252 bp, synthetic construct
  misc_feature 1..252: note = Description of Artificial Sequence: Synthetic coding sequence
  source 1..252: mol_type = other DNA
atgcagaacgacgccggcgagttcgtggacctgtacgtgccccggaagtgcagtgcctccaatcgaatcattggagcaaaggatcacgcctctatccagatgaatgtggcggaagtggataaggtcactggacgcttcaatggacagtttaaaacttatgctatctgtggagctatccgccggatgggcgaatcagatgacagtatcctgcgcctcgcaaaagcggatgggatcgtttccaagaatttttag

SEQ ID NO: 203710 - DNA, 201 bp, synthetic construct
  misc_feature 1..201: note = Description of Artificial Sequence: Synthetic coding sequence
  source 1..201: mol_type = other DNA
atgcagaacgacgccggcgagttcgtggacctgtacgtgccccggaagtgctctgcgtccaaccgcatcattggcgcaaaagatcatgcaagtatccagatgaacgtggctgaagtctcttgggagccaggaaggagagaaggatgtgatatctgtgcagggaaggccgggtgtcctattgtagaggagcccctcgggtag

SEQ ID NO: 203711 - DNA, 273 bp, synthetic construct
  misc_feature 1..273: note = Description of Artificial Sequence: Synthetic coding sequence
  source 1..273: mol_type = other DNA
atgcagaacgacgccggcgagttcgtggacctgtacgtgccccggaagtgcagtgcgtccaatcgcataattggtgctaaagaccacgcgagtatccagatgaacgtggctgaggtggacaaggtgacaggccgattcaatggacagttcaaaacatatgccatttgcggagccatccgcagaatggtgtccgtgagcctgggcttcgcccaccatttcggtaccagctggaccttgccatgcgccctcgaatgtgtaatggtccccgagtag

SEQ ID NO: 203712 - DNA, 246 bp, synthetic construct
  misc_feature 1..246: note = Description of Artificial Sequence: Synthetic coding sequence
  source 1..246: mol_type = other DNA
atgcagaacgacgccggcgagttcgtggacctgtacgtgccccggaagtgttcagccagcaataggattataggggcaaaagatcacgcaagcattcagatgaacgtagccgaggttgacaaggttacaggccgattcaacggccaattcaagacctatgctatatgtggtgctatacgacgaatgggggaatcagacgatagtatcctcagactggccaaagctgacggaatcgtatcaaagtag

SEQ ID NO: 203713 - DNA, 432 bp, synthetic construct
  misc_feature 1..432: note = Description of Artificial Sequence: Synthetic coding sequence
  source 1..432: mol_type = other DNA
atgggcaagtgccggggcctgcggaccgcccggaagctgcggagccatcggcgtgaccagaagtggcacgacaagcaatataagaaagcccacctaggaacagccctcaaggccaatccattcgggggcgccagccatgccaagggtattgtcctggagaaagtaggagttgaagctaaacagcccaactccgccattagaaagtgcgtgcgcgtgcagttaataaagaacgggaagaaaatcaccgcctttgtgccaaatgacggctgtcttaattttattgaagagaacgatgaggtactcgtcgccggattcgggaggaagggacatgcagtcggcgacattccaggggtgcggttcaaggtggttaaagtggcgaatgtaagcctgctggcgctgtacaagggcaagaaggaacgccctaggtcctag

SEQ ID NO: 203714 - DNA, 393 bp, synthetic construct
  misc_feature 1..393: note = Description of Artificial Sequence: Synthetic coding sequence
  source 1..393: mol_type = other DNA
atgaacgacaccgtgaccatccggacccggaagttcatgaccaaccgcctcctccaacgcaagcagatggtgatcgatgtgcttcaccctgggaaggccaccgtcccaaagaccgagatacgtgagaagctggccaagatgtacaaaacaacaccagacgtgatattcgtctttgggttcagaactcactttggcggcggcaaaaccactggcttcggcatgatatacgactcattggactacgccaaaaagaatgaaccaaagcatcgcttagcgaggcacgggctgtacgaaaaaaaaaagacaagccgcaagcaacgcaaagaaaggaaaaacagaatgaaaaaagtcagggggactgctaaggctaacgtgggggccgggaagaaatag

SEQ ID NO: 203715 - DNA, 402 bp, synthetic construct
  misc_feature 1..402: note = Description of Artificial Sequence: Synthetic coding sequence
  source 1..402: mol_type = other DNA
atgaacgacaccgtgaccatccggacccggaagttcatgaccaaccgactgcttcagagaaagcagatggtgattgatgtccttcatcctggaaaagcaacggtccccaaaaccgaaatccgcgaaaagctagccaagatgtacaagacaaccccggacgtgatctttgtgttcggattcaggacacattttggaggcggaaaaacgacaggattcggcatgatatacgacagtcttgactatgccaaaaaaaatgaaccaaagcatcggctcgcacggcacggtctttatgagaagaagaagacttccagaaaacagaggaaagaaagaaaaaaccggatgaaaaaagtgagaggcaccgccaaagccaacgttggggcgggtaagaagcctaaggagtag

SEQ ID NO: 203716 - DNA, 399 bp, synthetic construct
  misc_feature 1..399: note = Description of Artificial Sequence: Synthetic coding sequence
  source 1..399: mol_type = other DNA
atgaacgacaccgtgaccatccggacccggaagttcatgaccaaccggttactgcagcggaagcagatggttattgacgtgctgcaccctggcaaggcaaccgtacccaagaccgagattcgggagaagctggcaaaaatgtacaagactacccctgatgtgatcttcgtatttggcttccgcactcacttcggaggtgggaaaacgaccgggttcgggatgatctacgacagcctagactacgcaaagaaaaacgagcccaagcatcggctggcacgtcacggactgtacgaaaaaaagaagacgagtcgaaagcagcgtaaagaaaggaaaaacaggatgaagaaggttaggggcaccgcaaaagccaatgttggtgccggaaagaaacagaagtag

SEQ ID NO: 203717 - DNA, 396 bp, synthetic construct
  misc_feature 1..396: note = Description of Artificial Sequence: Synthetic coding sequence
  source 1..396: mol_type = other DNA
atgaacgacaccgtgaccatccggacccggaagttcatgaccaaccgcctgttgcagcgaaagcaaatggtcatagatgtgctccatcctggcaaggctacagtgccgaaaacagaaattagggagaagctggccaaaatgtataaaactacgcccgacgtgatttttgtttttggtttccgcacccactttggcggaggaaaaacaactggatttggtatgatctatgattcattggactatgccaaaaagaacgagcccaagcatcggctggctcgacacgggctgtacgagaagaagaagacttcacggaagcaaagaaaggaacggaagaacagaatgaagaaggtaaggggtaccgccaaggccaacgtcggcgccggcaaaaagcagtag

SEQ ID NO: 203718 - DNA, 870 bp, synthetic construct
  misc_feature 1..870: note = Description of Artificial Sequence: Synthetic coding sequence
  source 1..870: mol_type = other DNA
atgaacgacaccgtgaccatccggacccggaagttcatgaccaaccggctgctccaaagaaaacagatggtgatagacgtcctgcacccaggaaaggccaccgtacccaaaactgaaatccgagagaaactggcgaaaatgtacaagacgacaccagatgtgatattcgtattcgggtttaggacacatttcgggggtgggaagactaccgggtttggaatgatctatgactctcttgactatgcgaaaaagaacgaaccaaaacatcgtttggctaggcacggattgtacgagaaaaaaaaaacgtcaaggaaacagcgtaaggagagaaaaaatcgcatgaaaaaagtgcgcggcacagcaaaagcaaatgtcggcgctgggaagaagatgcgggagctggggctcggcgttcaagcgctgggacggatttcccaagaggagaggtgtactgatgtgaaaaacagcaaggcccgagaatccaggggagttgtttggcaagtagaggttcccggcccatggtccgtttggacatgtggtcgactaagaagagggtgtggaaaatatctccaggtcgccgtaacctggagaaaaacggaaaatcgtgaacagtgttgccaggcttgtctcctcgaaagggctctggttcgcaacggagctttcatgagtcctgcctctccagcccccgcgggtagcccgcatcctgttgatggagacctagtgctacacctacccgaggctctatctgcaacattaaccctgtcaccacatatacaagcaatcaacaagtcctttggcccctttttcgagatccatcaggagagtagttgcttctctccgccaagctgcttgagcgggctgggccattag

SEQ ID NO: 203719 - DNA, 378 bp, synthetic construct
  misc_feature 1..378: note = Description of Artificial Sequence: Synthetic coding sequence
  source 1..378: mol_type = other DNA
atgccccccaaggacgacaagaagaagaaggacgccggcaagagcgctaagaaggataaggatcccgtgaacaagtcaggcggtaaggcaaagaagaaaaagtggtcgaaaggcaaggtacgcgacaagctgaacaatttagtgttgttcgacaaggcaacctacgataagctgtgcaaagaggtccccaactacaagttaattacccctgcggtcgtttcagagcgcctcaaaatccggggcagtctcgcacgggcagcccttcaggaactgttgagtaagggccttattaaactggtctctaagcatagggctcaggtaatctacactcggaataccaaagggggagatgctcccgcggctggtgaggatgcctag

SEQ ID NO: 203720 - DNA, 348 bp, synthetic construct
  misc_feature 1..348: note = Description of Artificial Sequence: Synthetic coding sequence
  source 1..348: mol_type = other DNA
atgaccaagaagcggcggaacaacggccgggccaagaagggccggggtcatgtccagcctattagatgcacaaactgtgccagatgcgttccaaaggataaagctattaagaaattcgtcatcaggaacatcgttgaggctgccgccgtgcgcgacatatcggaggcaagcgtattcgacgcgtacgtattgcccaaactttacgtgaagctgcactactgtgtatcatgtgcaattcacagcaaagtcgtgcgtaatcgctcacgggaggcccggaaagataggactccaccccctagattccggccggccggcgctgcgccaagacctcctcccaagccaatgtag

SEQ ID NO: 203721 - DNA, 348 bp, synthetic construct
  misc_feature 1..348: note = Description of Artificial Sequence: Synthetic coding sequence
  source 1..348: mol_type = other DNA
atgaccaagaagcggcggaacaacggccgggccaagaagggccggggccatgtccagcccattagatgcactaattgcgccagatgcgtccctaaggacaaagcaataaaaaaatttgtgatccggaacattgtggaggctgctgcagtgcgagacatttctgaagcgagcgtgttcgacgcgtacgtcctcccaaagctttacgtgaagttacattattgtgtgagctgcgctatccatagtaaggtggtgcgcaatcgtagcagagaggctagaaaagaccgtacaccacctcccaggttccggcctgccggagccgccccccggcccccccccaaacccatgtag

SEQ ID NO: 203722 - DNA, 255 bp, synthetic construct
  misc_feature 1..255: note = Description of Artificial Sequence: Synthetic coding sequence
  source 1..255: mol_type = other DNA
atgcccctggccaaggacctgctgcaccccagccccgaggaggagaagaggaaacataaaaagaaaaggttggtgcagagcccaaatagctacttcatggacgtgaagtgtcccgggtgttacaagattaccaccgtgttctctcacgcacaaactgtggtgctgtgcgtcggctgctccaccgttttatgccagcctacaggaggtaaagcgaggctcacagaaggatgctcgttcaggagaaagcagcactag

SEQ ID NO: 203723 - DNA, 201 bp, synthetic construct
  misc_feature 1..201: note = Description of Artificial Sequence: Synthetic coding sequence
  source 1..201: mol_type = other DNA
atgcccctggccaaggacctgctgcaccccagccccgaggaggagaagcggaaacacaagaaaaagcgcctggtgcagagccccaattcctacttcatggacgtgaagtgccccggcgaagaaactgcatgctgctctggggagagcaccggaccccagcagctggagaatgtggtagtgcttgccgtgagttacccgtag

SEQ ID NO: 203724 - DNA, 255 bp, synthetic construct
  misc_feature 1..255: note = Description of Artificial Sequence: Synthetic coding sequence
  source 1..255: mol_type = other DNA
atgcccctggcccgggacctgctgcaccccagcctggaggaggagaaaaagaagcacaagaagaaacgcctggtccagtcaccaaatagctattttatggatgttaagtgcccaggatgttacaaaattacaactgtcttttcgcatgcccaaactgtggtgctatgcgtcggttgttctacagtgctttgccaacctacaggcggtaaggcccggcttaccgaggggtgttcattcaggcggaagcagcattag

SEQ ID NO: 203725 - DNA, 159 bp, synthetic construct
  misc_feature 1..159: note = Description of Artificial Sequence: Synthetic coding sequence
  source 1..159: mol_type = other DNA
atggacgtgaagtgccccggctgctacaagatcaccaccgtgttctctcacgctcagacagtagtgctctgtgtgggctgttctacagtgctgtgccagcccacagggggaaaggctcgactaacagagggatgttccttccgccggaagcagcattag

SEQ ID NO: 203726 - DNA, 159 bp, synthetic construct
  misc_feature 1..159: note = Description of Artificial Sequence: Synthetic coding sequence
  source 1..159: mol_type = other DNA
atggacgtgaagtgccccggctgctacaagatcaccaccgtgttctcacatgcacagaccgttgtgctctgcgtggggtgctcaactgtcctctgccagcctactgggggcaaggctcgcctgacagagggatgcagttttaggcgcaaacagcactag

SEQ ID NO: 203727 - DNA, 303 bp, synthetic construct
  misc_feature 1..303: note = Description of Artificial Sequence: Synthetic coding sequence
  source 1..303: mol_type = other DNA
atgtgccagcggtgcggcctgaagctgatcgtgatcatctgcttcttcgtccagctagcaagggatttgcttcacccttctttggaggaggagaagaaaaagcacaagaagaaaagattggtgcagagtcctaacagctacttcatggatgtgaagtgtcccggttgctacaagatcaccactgtattttcgcatgctcagacggttgttctctgtgtgggatgttcaacggtgttgtgtcagccaaccgggggtaaggcccgcctcactgaggggtgttctttcaggcgaaagcaacattag

SEQ ID NO: 203728 - DNA, 210 bp, synthetic construct
  misc_feature 1..210: note = Description of Artificial Sequence: Synthetic coding sequence
  source 1..210: mol_type = other DNA
atggacaccagccgggtgcagcccatcaagctggcccgggtgaccaaggtactgggtcggaccggttcgcaaggccaatgcacccaggtccgggtcgaatttatggatgacaccagcaggtcaataatccggaatgtcaagggtccggtacgcgagggcgacgtgctgaccctattggaatccgaacgcgaagcccggaggctcaggtag

SEQ ID NO: 203729 - DNA, 366 bp, synthetic construct
  misc_feature 1..366: note = Description of Artificial Sequence: Synthetic coding sequence
  source 1..366: mol_type = other DNA
atggtgcccttcaacgacctgtacagcggccccgacaccttcagcgagttcatctcagcctcacactccgccgtgccattccgggggccacccctgctcctaccccctcttcgttggggacccgtgggagcaaggggtatacacggacgccacgagccaatccaccatccacaatgtaaacgtccccgtgcgcgcggccgtagggcccacccctttggcgtgcgggccaggagcccagaggtggcgctttcgctggcggctcgatgggtcttggacgttggcttcgatcacttggctgacgggaacgggctgtcccagagcgcaccttttttctgtccaccacatgttaccgagatgcttctttag

SEQ ID NO: 203730 - DNA, 210 bp, synthetic construct
  misc_feature 1..210: note = Description of Artificial Sequence: Synthetic coding sequence
  source 1..210: mol_type = other DNA
atggacaccagccgggtgcagcccatcaagctggcccgggtgaccaaggtcctaggacggactggaagtcaaggacagtgcacacaagtgagagtggagttcatggacgacaccagccgatccattataaggaatgtgaagggcccagtccgggagggggacgtgctcacgctcctggagagcgaacgcgaggcgcgtcggctccggtag

SEQ ID NO: 203731 - DNA, 171 bp, synthetic construct
  misc_feature 1..171: note = Description of Artificial Sequence: Synthetic coding sequence
  source 1..171: mol_type = other DNA
atgggccaccagcagctgtactggagccacccccggaagttcggccaggggagtcggagctgtcgagtgtgttcaaatagacacggtttgataaggaaatacgggctgaatatgtgcagacaatgcttcaggcagtatgctaaagacatcggatttataaaacttgactag

SEQ ID NO: 203732 - DNA, 204 bp, synthetic construct
  misc_feature 1..204: note = Description of Artificial Sequence: Synthetic coding sequence
  source 1..204: mol_type = other DNA
atgggccaccagcagctgtactggagccacccccggaagttcggccagggatcccggtcgtgccgagtctgttcaaataggcacggtctgataaggaaatacggactcaatatgtgtaggcagtgttttcgtcagtacgcaaaggatattgggtttatcaaaaaggacctgtcctgcctgccatggcactgcctgtggcgttag

SEQ ID NO: 203733 - DNA, 780 bp, synthetic construct
  misc_feature 1..780: note = Description of Artificial Sequence: Synthetic coding sequence
  source 1..780: mol_type = other DNA
atggccgtgcagatcagcaagaagcggaagttcgtggccgacggcatcttcaaagctgaacttaatgagtttctcaccagggagctggccgaagatggatactcaggcgtagaggtacgagtgacaccaacaagaacggagatcatcatactcgcaactagaacacaaaatgtgttgggtgaaaaagggagacgcataagggagctgacggctgttgtacagaaaaggtttgggttcccggaaggatccgtcgagttgaaaattatggtaatggtgacaggctaccctcttctgcccctgaaactgtatgccgagaaggtggcaacccgcggcctgtgcgccattgcgcaggctgagagcctccgttacaagttactcggagggctggcagtccgcagggcctgttatggagtcctgaggttcattatggagtccggagcaaagggctgcgaggttgtcgtgagcgggaagctgcgcggacaacgggctaagtcgatgaagtttgtcgacggcttaatgatccatagcggggatccagtcaattattatgtggatactgcagttcggcatgtgctcctaaggcaaggagtcctggggatcaaggtcaagattatgctaccctgggatccaaccgggaaaatcggcccgaaaaaaccactacctgatcacgttagtatcgtggaacccaaagacgagatactgccgaccaccccgatcagcgaacagaaaggggggaagccagaacctccggccatgccacagcctgttccaacagcgtag

SEQ ID NO: 203734 - DNA, 732 bp, synthetic construct
  misc_feature 1..732: note = Description of Artificial Sequence: Synthetic coding sequence
  source 1..732: mol_type = other DNA
atggccgtgcagatcagcaagaagcggaagttcgtggccgacggcatctttaaagccgaacttaacgaatttctcaccagggagctggccgaggatgggtactccggcgtagaagtgcgggtgactcccactagaacggagataatcattctagcgacccggacacagaacgtgctaggtgagaaaggtcgtagaatccgggaactgacggctgtagtgcaaaaaaggttcggttttcccgaaggttctgtggaactctacgcggagaaagtggccaccagggggctgtgcgcaatcgcccaggcggaaagcctacggtataaattgttaggtggactggctgtgcgccgcgcctgttacggcgtacttcgctttatcatggagtccggagctaagggctgcgaagtggtagtgtctggaaagctacgaggacaacgggctaagtccatgaagtttgtggacggtctcatgatacatagcggcgatcccgtgaattactacgtagataccgccgtgaggcacgtgcttctgcgccagggggtgctgggaataaaagtgaaaataatgctgccatgggatcctaccggaaaaataggcccaaagaaacccctacccgaccatgtctctatcgttgaacccaaggatgagattctgccaaccaccccaatctctgaacagaaaggcggcaaacctgaacccccagctatgcctcaacccgtcccgaccgcgtag

SEQ ID NO: 203735 - DNA, 732 bp, synthetic construct
  misc_feature 1..732: note = Description of Artificial Sequence: Synthetic coding sequence
  source 1..732: mol_type = other DNA
atggccgtgcagatcagcaagaagcggaagttcgtggccgacggcatcttcaaggctgaactaaacgagttcctgactagagagctggcagaggatggttactccggcgtggaggtacgcgtgaccccaacaagaactgagattatcatcctcgccacacggacgcagaacgtattaggggagaagggacgcagaatcagggaactcactgccgtggtccaaaagaggttcgggtttcctgagggctccgtcgagctgtatgccgagaaagtcgccacccgcgggctgtgcgcaattgcccaagccgagagtttgcggtataagctactgggcgggctggcagtgaggagagcatgttacggcgttctgcggttcatcatggagtccggggccaagggctgtgaggtggttgtgtccggcaaactgagggggcagagggcaaaaagcatgaagttcgtcgacgggttaatgatccattcaggcgacccagtaaactactatgtcgataccgccgtgaggcacgtgctcctcagacagggcgtcttaggaatcaaggttaaaattatgttgccatgggatccgacgggtaaaattggcccgaaaaagccgttgcccgatcacgtcagtatcgtcgagccaaaagatgaaattctaccaaccaccccgatttccgagcagaaaggtggcaaaccagagccaccagcaatgcctcagccagtgcccacggcttag

SEQ ID NO: 203736 - DNA, 732 bp, synthetic construct
  misc_feature 1..732: note = Description of Artificial Sequence: Synthetic coding sequence
  source 1..732: mol_type = other DNA
atggccgtgcagatcagcaagaagcggaagttcgtggccgacggcatctttaaggcagagctaaacgagtttctcacaagggaactggcggaggacggatattctggcgttgaggtcagagtcacccccacaaggacagagatcatcatcctggctactcggacccagaatgtgctcggcgagaaggggcgtagaatacgggagttaactgccgtcgtgcagaaacggttcggattcccagaaggcagtgtagagctgtacgctgaaaaggtcgcaacaagggggctctgtgccattgcgcaagctgaaagcctcaggtataagcttttaggcggcctggccgtgaggagagcgtgttacggcgtgttgagattcatcatggagtccggggcaaagggatgtgaagtggtcgtctcaggaaagctgaggggtcagcgcgctaagagcatgaagtttgtggatggcttgatgatccacagtggtgatccggttaattattacgtcgacactgccgtgaggcacgtactgttaagacagggagtgctgggtataaaggtgaaaattatgctgccctgggacccaaccggaaagataggccccaaaaaacccttgcccgaccacgtgtccatcgtggagcccaaagatgaaatactccccaccacacctatttccgaacagaaggggggcaagcctgagcccccagcaatgccgcagcccgttcctacggcctag

SEQ ID NO: 203737 - DNA, 795 bp, synthetic construct
  misc_feature 1..795: note = Description of Artificial Sequence: Synthetic coding sequence
  source 1..795: mol_type = other DNA
atggccgtgggcaagaacaagcggctgaccaagggcggcaagaagggcgcaaagaagaaggtggtggacccctttagtaagaaagactggtatgacgtcaaggctccggctatgttcaatattcgtaatatcggcaagacactggtgactcgcacacagggaacaaaaattgcaagcgacggactcaaagggcgcgtttttgaggtctctctggcggacttgcagaacgatgaggtggccttcagaaagtttaagctcattacagaagatgtgcagggcaaaaattgtctgacaaattttcatggaatggacctgaccagggacaagatgtgcagtatggtcaaaaagtggcaaaccatgatcgaggcccacgtggatgtgaagacaacagacggctatttgttgaggctgttttgtgtaggtttcacaaagaaacggaataaccagatccggaagacaagttacgctcaacatcaacaggtccgacagattcggaaaaaaatgatggaaatcatgactcgcgaggtccagaccaacgacttgaaggaggtggtgaacaagttgatcccggactctattgggaaggatatcgaaaaagcttgccagagtatatatccccttcatgatgtcttcgtgaggaaggtgaagatgctaaaaaagccaaagtttgaactgggaaaactcatggagttacacggggagggaagcagtagcggcaaagctaccggggacgagacgggcgccaaggtggagcgcgccgacggctacgagcctcccgtccaggagtcagtttag

SEQ ID NO: 203738 - DNA, 528 bp, synthetic construct
  misc_feature 1..528: note = Description of Artificial Sequence: Synthetic coding sequence
  source 1..528: mol_type = other DNA
atggccgtggccaagaagaaggtggtggaccccttcagcaagaaggactggtatgatgtcaaagcaccagcaatgttcaatatacggaacatcggtaaaacactggtgactagaacacaaggaaccaagatcgcatcggacgggttgaagggtcgcgtctttgaggtatccctcgccgaccttcagaacgacgaggtagcattccggaagttcaagttgatcacagaggatgtccaggggaagaattgcttgaccaacttccatggcatggatctgacaagagataaaatgtgctccatggtgaaaaagtggcagacgatgatagaggcacacgttgatgtgaaaacaaccgacggttatcttctgcgtctcttttgtgtaggatttaccaagaaacggaataaccagattagaaaaacctcctatgcccaacaccagcaagtccggcagatccgtaaaaagatgatggaaattatgacccgcgaagttcagaccaacgaccttaaggaagtagttaacaagctgtag

SEQ ID NO: 203739 - DNA, 684 bp, synthetic construct
  misc_feature 1..684: note = Description of Artificial Sequence: Synthetic coding sequence
  source 1..684: mol_type = other DNA
atgttcaacatccggaacatcggcaagaccctggtgacccggacccagggcaccaaaatcgcttctgacggtcttaagggacgggtgttcgaagtgagccttgctgacctacaaaatgacgaggtcgcatttcgcaagtttaaattgattacggaggatgttcagggaaaaaattgccttactaacttccacggcatggacctaacacgtgacaagatgtgctctatggtgaaaaagtggcagactatgatcgaagcccatgtggatgtgaagaccacagacggttacctacttaggctgttctgcgtgggtttcactaaaaagcgtaataaccagatcaggaaaacgtcatatgcccagcatcagcaagttaggcagatacggaagaaaatgatggagatcatgacgcgagaggtgcagacaaatgacctgaaagaggttgtgaacaaactgattcctgatagtatcggcaaagacattgaaaaggcttgccagagtatctaccccctacatgacgtcttcgtgcgtaaggttaaaatgctcaaaaagcccaagttcgagcttggcaaactcatggaactgcacggggagggcagctctagtgggaaggccactggcgatgaaacaggagccaaagtagagcgagcagacggctacgaaccgccggttcaggagtccgtgtag

SEQ ID NO: 203740 - DNA, 438 bp, synthetic construct
  misc_feature 1..438: note = Description of Artificial Sequence: Synthetic coding sequence
  source 1..438: mol_type = other DNA
atgatcgaggcccacgtggacgtgaagaccaccgacggctacctgttgcgtctgttctgcgtgggattcaccaagaagcgcaacaaccagatcagaaagactagctacgcccaacaccagcaggtccgccagatcaggaaaaagatgatggaaattatgactcgggaagtgcaaacaaacgatttaaaagaggtcgtgaacaagttgatccccgacagcataggcaaagacatcgagaaagcctgtcagtcaatttaccctctacatgacgtgtttgtcaggaaagttaagatgttgaaaaagccaaagtttgagctcgggaaactgatggaactccacggagaggggtccagctctgggaaagccaccggcgacgagacgggcgccaaggttgagcgtgccgatggatacgagccccctgttcaggagtccgtgtag

SEQ ID NO: 203741 - DNA, 684 bp, synthetic construct
  misc_feature 1..684: note = Description of Artificial Sequence: Synthetic coding sequence
  source 1..684: mol_type = other DNA
atgttcaacatccggaacatcggcaagaccctggtgacccggacccaaggcaccaaaattgccagtgatggcttaaaaggaagggtcttcgaggtctcactcgccgatttgcagaatgatgaggtggcctttcgaaaattcaaactgataaccgaggacgtgcagggaaaaaattgcttgaccaacttccacggcatggaccttactagggataaaatgtgcagcatggtcaagaagtggcagaccatgatcgaggcacacgtggatgtgaaaacaaccgatggatacctcctgcggttattttgtgttggatttacaaaaaaaaggaataaccaaatacgtaaaaccagctatgcgcagcaccagcaggtcaggcagattagaaaaaaaatgatggagattatgacacgagaagtgcagacaaatgatcttaaggaagttgtcaacaagctgatccctgactccataggtaaagacatcgaaaaagcctgccagagcatttacccccttcacgacgtcttcgtaagaaaggtaaagatgttgaagaagcccaaatttgagttgggcaaattgatggagctgcacggtgaagggagcagttccggcaaagctactggagacgagacaggagctaaagtcgaacgcgccgacgggtatgagccaccagtgcaagagagcgtttag

SEQ ID NO: 203742 - DNA, 627 bp, synthetic construct
  misc_feature 1..627: note = Description of Artificial Sequence: Synthetic coding sequence
  source 1..627: mol_type = other DNA
aagcggctgaccaagggcggcaagaagggcgccaagaagaaggtggtggaccccttctcaaagaaagactggtacgacgtcaaagcccctgctatgtttaacatccggaacattggcaagactctcgtgaccagaacacagggcacgaaaatcgcttctgatggcctgaaagggagggtgttcgagaccatgattgaagcacacgtcgacgtgaagacaaccgatggttacctgctgagattgttttgcgtcggctttaccaagaaacggaataaccagatccggaaaaccagttacgcacaacaccaacaagtcaggcagatccgcaagaaaatgatggagatcatgaccagagaggttcagacgaacgaccttaaggaggttgtaaataagctcatccccgactcaattgggaaggatattgagaaagcgtgtcagagcatttacccgctccacgatgtctttgtccgaaaggttaagatgctgaagaagcccaaattcgagctaggcaaactgatggagttacatggtgagggttcaagcagcggcaaggcgactggggacgagactggcgcaaaggttgagcgtgccgatggatacgagccgccagtgcaggaaagcgtatag

SEQ ID NO: 203743 - DNA, 792 bp, synthetic construct
  misc_feature 1..792: note = Description of Artificial Sequence: Synthetic coding sequence
  source 1..792: mol_type = other DNA
atggcccggggccccaagaagcacctgaagcgggtggccgcccccaaacattggatgttggacaaactgactggcgtcttcgcacccagaccttcaacaggaccacacaaactaagagaatgcctccctctaatcatattcttgcggaataggctaaagtatgcactgactggagacgaggtgaaaaaaatttgcatgcagcggttcatcaagattgatgggaaggtgcgaaccgacatcacctacccggctggcttcatggacgtaattagcatagacaaaacaggtgagaatttcaggttaatatacgacactaaggggagatttgccgtgcatcggattacccccgaagaggctaagtataaactgtgtaaagtgcgaaaaatttttgtgggtacaaaggggatcccgcatctggttactcacgacgccagaaccatccgctatccagatcctcttatcaaagtgaatgacaccatccaaattgatttggaaacaggaaagataacagactttattaaattcgacacaggtaatttatgtatggttactggcggggccaatttgggccgcatcggagtgattacaaaccgcgaaagacaccccggtagctttgatgtcgtccacgtaaaggacgccaatggaaattctttcgccaccagactatccaatatttttgttattggtaaaggaaataaaccttggatatcgctccccagaggtaagggaatcaggctgacaatcgctgaagagagagacaagaggctcgcggccaagcaaagtagcggatag

SEQ ID NO: 203744 - DNA, 369 bp, synthetic construct
  misc_feature 1..369: note = Description of Artificial Sequence: Synthetic coding sequence
  source 1..369: mol_type = other DNA
atggcccggggccccaagaagcacctgaagcgggtggccgcccccaagcattggatgctggacaaactgaccggagtgttcgcgccacgcccctctacagggccccacaagcttcgggagtgcctacccctcattatcttccttcgcaaccgactgaaatacgccttaacaggggacgaggtcaaaaaaatttgtatgcaacgcttcataaaaattgacggtaaggttcgtactgacataacataccccgctggctttatggacgtgattagcatcgataagacaggagaaaacttccggctgatctacgataccaagggtcggtttgccgtccaccggattacccctgaggaggctaaaccctgctag

SEQ ID NO: 203745 - DNA, 792 bp, synthetic construct
  misc_feature 1..792: note = Description of Artificial Sequence: Synthetic coding sequence
  source 1..792: mol_type = other DNA
atggcccggggccccaagaagcacctgaagcgggtggccgcccccaagcattggatgctagataaattaacaggagtctttgcgccccgacctagcacaggcccgcacaagctgcgtgagtgtctgcccctgatagtttttctgcgcaaccgccttaaatatgcgctaaccggggacgaggtcaagaaaatatgtatgcagcggttcattaaaatagatgggaaagtgcgggttgacgttacttacccggccggatttatggacgtgatctccatagaaaagactggtgaacatttccgcctcgtgtatgataccaaaggtcgttttgccgtacatcgaattaccgtggaggaggccaagtacaaactctgtaaggtaagaaaaattacagtgggggtgaagggcatcccacacctcgtgacacacgacgcacgcaccattagatacccagatcctgtaatcaaagtgaacgacacggtccagatcgatctgggtacaggtaaaattattaattttattaagttcgacacaggaaacctgtgcatggtcataggaggggccaacctggggagagtcggtgtgataactaatcgcgagaggcaccctgggtcctttgatgtggtgcatgttaaagacgctaatggaaattcatttgctacccggctgagtaatatcttcgtcattggcaacggcaataaaccttggatctcgctcccccgtggcaaggggatcaggctgactgtggcagaggaacgggacaaacgtttagcgacgaagcagagttctgggtag

SEQ ID NO: 203746 - DNA, 789 bp, synthetic construct
  misc_feature 1..789: note = Description of Artificial Sequence: Synthetic coding sequence
  source 1..789: mol_type = other DNA
atgctgggccggcccgccaagttcagcaaggcccggggccccaagaagcatttgaagcgggttgctgctcctaagcactggatgttagacaaactgacgggagtgtttgcaccacggccaagtacgggcccacataaattacgggaatgtttgccgcttatcgtgtttctgagaaaccgtttgaaatacgccctcactggcgacgaagttaagaagatctgtatgcagcgctttataaagatagatggtaaggtcagagtcgatgtgacataccccgccggctttatggacgtgatttccatcgagaaaaccggggagcactttagactcgtctacgataccaaaggaagattcgctgttcacagaattactgtggaggaagcaaagtacaaattgtgtaaagtcagaaaaattaccgttggggtgaagggcataccacatctagtcacgcacgacgcgcgcacaattcgctaccccgacccagtcattaaggttaacgataccgtgcaaatcgaccttgggaccggaaaaattatcaattttataaaattcgatacaggcaatctctgtatggttattgggggggctaacctgggccgtgtcggcgtcatcacaaatcgcgagaggcatcctggttcgtttgacgtggtccacgtgaaggatgccaacgggaacagcttcgcaacaagactgagtaatattttcgtgatcggaaatggtaataaaccctggattagcctgcctaggggcaagggaataaggttgacagtggcggaggagagggactag

SEQ ID NO: 203747 - DNA, 792 bp, synthetic construct
  misc_feature 1..792: note = Description of Artificial Sequence: Synthetic coding sequence
  source 1..792: mol_type = other DNA
atggcccggggccccaagaagcacctgaagcgggtggccgcccccaagcattggatgctggataagctgactggggtgttcgcgccaagaccttctactgggcctcacaagctcagagaatgcctacccctgattgtgttcttaagaaataggctgaagtacgcgttaacaggcgatgaagttaaaaagatatgcatgcagcactttctgaagatcgacggcaaggtcagggtagatatcacctacccagcagggtttatcgatgtgatcagcattgaaaaaaccggggagcactttcgcctcgtgtacaataccaaggggtgctttgccgtgcaccgtattactgtggaagaggctaagtataaactgtgcaaggtgcgcaaaattaccgttggaacgaagggcataccgcacctcgtgactcatgacgctagaaccatacgatatcctgatcctctcatcaaagtcaatgacacagtacagattgatttaggaactggaaagattaccagcttcatcaaattcgataccggaaacgtctgtatggtcattgctggcgccaacctgggaagagtgggcgtcattaccaaccgagagagacaccctggatcttgcgacgtggttcatgtcaaggacgcaaatgggaatagctttgcgacaaggatcagcaatattttcgttattggcaatgggaacaagccctggatctcattgcctcgggggaaaggaataagattgaccatcgctgaagagagggacaagcggttggccgctaagcagtcttcagggtag

SEQ ID NO: 203748 - DNA, 615 bp, synthetic construct
  misc_feature 1..615: note = Description of Artificial Sequence: Synthetic coding sequence
  source 1..615: mol_type = other DNA
atgaccgagtgggagaccgccgcccccgccgtggccgagacccccgatattaaactgttcggcaagtggagtaccgatgacgtgcagatcaacgacatcagtttgcaagattacatcgccgtgaaagagaaatatgcaaagtacctcccacacagcgccggccggtatgctgccaagcgcttccgcaaagcgcaatgccctatcgtcgaaaggctcactaatagcatgatgatgcacggcaggaataacggaaagaagctcatgaccgtacgcatcgtcaagcatgccttcgaaatcatacatctgttgactggagagaacccattgcaggtgctggtgaacgcaatcatcaactcaggccctcgggaagactcaacaaggataggccgtgctggtaccgttcgacggcaagctgtggacgtcagtcccctacgaagagttaaccaggcgatctggctcttatgcacaggcgctcgagaggccgctttccgcaatattaagaccattgctgagtgtctggccgacgagctaattaacgcggccaagggttcatctaactcatacgccattaagaagaaagatgagttagagcgggtcgccaagtcgaaccgctag

SEQ ID NO: 203749 - DNA, 615 bp, synthetic construct
  misc_feature 1..615: note = Description of Artificial Sequence: Synthetic coding sequence
  source 1..615: mol_type = other DNA
atgaccgagtgggagaccgccgcccccgccgtggccgagacccccgatatcaaacttttcggaaagtggtcaaccgatgacgtccagataaacgacatatcactacaggattacatagcagtaaaggagaagtatgctaagtacctacctcacagcgccgggcggtatgccgcaaagaggttcaggaaggctcagtgtccgatcgtcgagcgcttgactaactcaatgatgatgcacggcaggaacaacggtaagaaactaatgacagtgaggatagtcaaacacgcatttgagataattcaccttctcaccggcgaaaatccgctccaggtcctcgtcaatgctatcatcaactctggcccccgcgaagatagtactcggatcggccgagctggtaccgttcggcgccaggccgtggacgtatcccccctccgccgagtaaatcaggctatttggttactctgcacgggcgctcgcgaggccgcctttcggaacattaagaccattgctgagtgcctggccgacgaactcattaacgccgctaaaggctcttccaacagctatgccattaagaagaaagacgagctggaaagagtagctaagagcaacaggtag

SEQ ID NO: 203750 - DNA, 657 bp, synthetic construct
  misc_feature 1..657: note = Description of Artificial Sequence: Synthetic coding sequence
  source 1..657: mol_type = other DNA
atggccaccgaggtggccgccgacgccctgggcgaggagtggaagggctacgttgtgcgtatatccggcggcaacgataagcagggattccctatgaagcagggtgttctgactcacggaagagtgcgacttttactgtctaagggccatagctgttacagacccaggaggacgggagagaggaagcggaagtccgtgagagggtgcattgtggacgcaaacctgtcagtgctgaatctggtgattgtgaagaagggtgaaaaggatatccccggactcaccgacaccaccgtgcccaggcgactgggaccgaagcgggcgagccggatacggaaactgttcaacctcagcaaggaggacgacgtgcgccagtatgtcgtccgcaaaccgcttaataaggaagggaaaaaaccccggacaaaggctcctaagattcagcgtctcgtgacccccagggtgctccagcataagcgccgccggatcgctctcaaaaagcaacgaactaagaaaaacaaggaagaggcagctgaatatgcaaagctcctcgccaagcgtatgaaggaggccaaggaaaagagacaggagcagattgcaaaaaggaggagattatcaagtttaagggcttcaacctcaaagagtgagagttcgcagaagtag

SEQ ID NO: 203751 - DNA, 276 bp, synthetic construct
  misc_feature 1..276: note = Description of Artificial Sequence: Synthetic coding sequence
  source 1..276: mol_type = other DNA
atgaagctgaacatcagcttccccgccaccggctgccagaagctgatcgaggtggatgacgagaggaagctgcgcacattttacgagaagcgtatggccacggaggtcgcggcggatgcactgggcgaagaatggaaagtgaaagtcgacaaactgttgcaagtcttcaagtccgaaaccgtcaacgccatcggcaactggtacttggagtggggttccgattccggtttctggttgcttacatttggcaaactgctccctaatgctaccctctag

SEQ ID NO: 203752 - DNA, 657 bp, synthetic construct
  misc_feature 1..657: note = Description of Artificial Sequence: Synthetic coding sequence
  source 1..657: mol_type = other DNA
atggccaccgaggtggccgccgacgccctgggcgaggagtggaagggatatgtggtgcgcatatccggtggtaacgataagcaggggtttccgatgaaacagggcgttctgacccacggacgcgtgagactgctcttgagcaagggccattcttgttatcgaccgcgcaggaccggagagcggaagcggaagtccgtgcgcggctgtatagttgacgctaatctgagcgtcttgaacctagtaatcgttaaaaaaggagagaaggatatccccgggctgaccgacacaaccgtaccacgtcggctggggccgaaacgtgcctcacgcattcgaaagttgttcaatctgagcaaggaggacgatgtgcggcagtatgtcgtgaggaagcccctgaacaaagaagggaaaaagccaagaacaaaggcaccgaagattcagcgtctggttacccccagagtgttgcaacacaagcggcgccggattgctctgaagaaacagagaaccaaaaagaataaggaggaggccgctgagtacgccaaacttcttgcaaaaaggatgaaggaagccaaggaaaagaggcaggagcagattgccaagaggaggcgactctcctcgctcagggcttcgacaagcaaatcagagagcagccagaaatag

SEQ ID NO: 203753 - DNA, 750 bp, synthetic construct
  misc_feature 1..750: note = Description of Artificial Sequence: Synthetic coding sequence
  source 1..750: mol_type = other DNA
atgaagctgaacatcagcttccccgccaccggctgccagaagctgattgaggtggatgacgaacgcaaactgaggaccttctatgagaaacgcatggccaccgaggtcgcagctgacgccctgggtgaagagtggaaaggctatgtggtacgaatttctggcggcaatgacaaacaaggtttccctatgaagcagggggtcttgacacacggcagagtccggcttctgctgagcaagggccacagttgctaccggccacggcggactggcgagcggaagagaaagagtgtccgcgggtgtatcgtggacgccaacctgtctgtgctcaatttagtcatcgtaaaaaaaggggagaaggacatacctggattgaccgacactaccgtgccaagaagacttggacccaaacgcgcctcccggatacgcaagctgtttaatctgagtaaggaggatgatgtaaggcagtacgtggtgagaaaacccctgaacaaagaggggaaaaaacccaggaccaaagcccctaagatccagagacttgttacgcctcgggttcttcagcacaagagacgaaggattgccctgaagaagcagcgtaccaagaagaacaaagaggaagccgccgagtacgccaagcttctcgccaagcggatgaaagaggccaaagaaaaaaggcaggagcagattgctaagcgacgcaggctgtctagtctgagggctagcaccagcaagtcagaaagcagtcaaaagtag

SEQ ID NO: 203754 - DNA, 585 bp, synthetic construct
  misc_feature 1..585: note = Description of Artificial Sequence: Synthetic coding sequence
  source 1..585: mol_type = other DNA
atgttcagcagcagcgccaagatcgtgaagcccaacggcgagaagccagatgaattcgaaagcggcatctcacaggccctgctagagttggagatgaatagtgacctgaaggcccagttgagggaactgaacatcactgcagcaaaggagattgaggtgggcggcgggcgtaaagctattataattttcgttcctgtgcctcagctgaagtcctttcagaaaattcaagtgcggctggttcgggagctcgaaaaaaaattctcgggtaaacacgtggtgttcatcgctcagcgcaggatactgcccaagccaacacggaagagtcgaaccaagaacaaacagaaaaggccccggagccggacactaacggctgtccatgatgccatcctcgaggatctcgtcttccctagtgagattgtggggaaaaggatccgtgttaagcttgacggcagcaggttgatcaaagtccatctggataaagcacagcagaataacgtggagcataaggttgagactttcagcggcgtgtacaaaaagctaactggtaaagacgttaatttcgagtttccagagttccagctctag

SEQ ID NO: 203755 - DNA, 585 bp, synthetic construct
  misc_feature 1..585: note = Description of Artificial Sequence: Synthetic coding sequence
  source 1..585: mol_type = other DNA
atgttcagcagcagcgccaagatcgtgaagcccaacggcgagaagcccgatgagtttgagagtggcattagtcaggctttgctggaactcgagatgaactcggaccttaaggctcagctgcgcgagttaaatataaccgctgccaaggaaattgaggtgggaggaggaaggaaggctatcatcattttcgttcccgtgccacagctgaaatcatttcagaaaattcaggtgagactcgtgcgggagttggagaaaaaattttcaggaaaacatgtcgtgtttatcgcccagcgaaggatcctgcccaagcccaccagaaaatccagaactaagaacaaacagaaaagacctaggagtcgcaccctcactgccgtacacgatgcgatccttgaggacttggtgttccctagcgaaattgtagggaagcgcatcagagtcaaattggacggcagtagacttatcaaagtgcacctggacaaggcacagcagaataacgtggagcataaggtggagacattctcgggggtgtataaaaagttaaccgggaaagacgttaactttgagtttccagagttccagctgtag

SEQ ID NO: 203756 - DNA, 585 bp, synthetic construct
  misc_feature 1..585: note = Description of Artificial Sequence: Synthetic coding sequence
  source 1..585: mol_type = other DNA
atgttcagcagcagcgccaagatcgtgaagcccaacggcgagaagcctgatgaatttgaatctggcatttcacaggccctgctcgagttggaaatgaactccgatttaaaggcccaactgagggagcttaacatcaccgctgcgaaggaaatcgaagtgggaggcggccggaaagccattatcatcttcgtgccggtgccacagttgaaatcttttcagaaaatacaggtgcgtctggtgagggaattagagaaaaaattttcaggaaagcacgtcgtttttatcgcccagcggcggattctcccgaagcctacaagaaaaagccgtaccaagaacaagcagaaaagacctaggagtcggaccctgactgccgttcatgacgccattcttgaagatctggtgttcccaagtgagatcgttggaaagaggatcagagtgaagctggatgggtctaggctgatcaaagtgcatcttgataaggcacagcagaacaacgtggaacacaaggttgaaactttttctggggtgtataagaagcttactggaaaggacgttaacttcgagttccctgaattccagctttag

SEQ ID NO: 203757 - DNA, 567 bp, synthetic construct
  misc_feature 1..567: note = Description of Artificial Sequence: Synthetic coding sequence
  source 1..567: mol_type = other DNA
atgggcatcagccgggacaactggcacaagcggcggaagaccggcggaaagagaaagccataccacaagaagcgcaagtacgagttgggaaggcccgctgctaacactaagataggtcctaggcgaatacataccgtgcgtgtacggggagggtgcacaagaaagacacggattatcgacgttgtctacaacgcctccaataacgaattggtcaggaccaagactcttgtcaagaattgtatcgtgctcattgacagcactccctaccgacagtggtatgagagtcactatgccctgccacttgggagaaaaaagggtgcaaagcttacaccggaggaggaagaaattctcaacaagaagcgcagcaagaagatccagaagaaatacgacgaacgcaagaagaacgctaagatcagctccttgctagaagagcagtttcaacagggtaaactgctggcgtgcattgcctctcgccctggacagtgcgggagggccgacggttatgtgctagaaggaaaggagctggagttttatctgcgcaagatcaaagcacggaaggggaaatag

SEQ ID NO: 203758 - DNA, 627 bp, synthetic construct
  misc_feature 1..627: note = Description of Artificial Sequence: Synthetic coding sequence
  source 1..627: mol_type = other DNA
atgggcatcagccgggacaactggcacaagcggcggaagaccggcggcaaacgcaagccctatcacaagaagagaaagtacgaactgggccggccagccgcaaataccaagattggcccaagacgtatccatactgtgagggttagaggcggcaacaaaaaatatcgcgcattgcgcctggatgtgggaaatttctcttggggcagcgagtgctgcacccgcaagacacggataatcgacgttgtttacaatgcttcgaacaatgaattagtgcggaccaaaacattggtgaagaactgcattgtgctgatcgacagcacgccttatcggcagtggtatgagtcccattatgccctccctctgggccgaaaaaaaggcgcaaagctcaccccagaagaggaggagattctcaataagaagagaagcaagaaaattcagaagaaatatgatgagagaaagaaaaatgcaaaaattagcagtctgctggaggagcagttccagcagggaaagctgttagcatgcatagccagccgccccgggcagtgcggccgagccgatggatacgtgctcgagggcaaggagctcgagttttacctcaggaagatcaaagcccgtaagggaaagtag

SEQ ID NO: 203759 - DNA, 585 bp, synthetic construct
  misc_feature 1..585: note = Description of Artificial Sequence: Synthetic coding sequence
  source 1..585: mol_type = other DNA
atgcccgtggcccggagctgggtgtgccggaagacctacgtgaccccacgccggccttttgagaagtccagactggaccaggaattaaagctcattggggaatatggactcaggaataaaagggaggtgtggcgggtgaagtttactcttgccaagattcggaaggcagcgcgggagctgctgactctagacgaaaaagaccctcgcaggctattcgagggtaatgcgctcctccgcaggctggtccgtatcggagtattagatgagggcaagatgaaactcgattatatattgggactcaaaatcgaggatttcctagagcgccgcctgcaaacacaggtgttcaaactcggactggccaagtccattcaccacgctagggtactcatccgtcagcgacatatcagggtgaggaaacaggtggtgaacatcccttcattcatagtccggcttgactcacagaagcacatcgatttttcgctccggtccccgtatgggggtggcaggcctggtagggtgaagcgaaaaaatgccaagaaaggacagggaggcgccggggctggagatgatgaggaggaagactag

SEQ ID NO: 203760 - DNA, 585 bp, synthetic construct
  misc_feature 1..585: note = Description of Artificial Sequence: Synthetic coding sequence
  source 1..585: mol_type = other DNA
atgcccgtggcccggagctgggtgtgccggaagacctacgtgaccccacgacggccctttgagaagtcccgactggatcaggaattgaaactcataggtgagtatggcctgagaaacaagagggaggtctggagagtcaaattcacattggctaaaattcgcaaagcagcccgcgagttactgaccctggacgagaaagatcctcggcgcctgttcgagggaaatgcactcctgcgcagactggtgcggatcggagttctagatgaaggcaagatgaagctcgattacatcctcggcctcaagatcgaggactttttagagcggcgtctccaaacccaggtcttcaagctcggacttgctaaaagcatccatcatgcaagggtgctgatacgtcagagacacatcagagtgcgcaagcaagtcgtaaacatacccagtttcatagtccgcctcgactcgcagaagcatatcgattttagcttgaggtccccctacggaggaggcagaccgggaagagtcaagcggaaaaatgcgaagaagggtcagggaggagcaggcgccggtgatgacgaagaggaagactag

SEQ ID NO: 203761 - DNA, 585 bp, synthetic construct
  misc_feature 1..585: note = Description of Artificial Sequence: Synthetic coding sequence
  source 1..585: mol_type = other DNA
atgcccgtggcccggagctgggtgtgccggaagacctacgtgaccccaagacgaccctttgaaaaatcacgcctggatcaggagcttaaactcatcggggaatacggtctccggaataagagggaagtttggagggtgaaattcacacttgctaaaatcagaaaagctgccagggaactactgaccctggatgagaaggatccccgccggctcttcgagggaaacgcactgttgagacgccttgtgcgaattggcgtcctggacgagggaaagatgaaacttgactacatcctaggcttgaagattgaggatttccttgaacggcgcctccagacccaggtattcaagctaggccttgcaaaatccattcatcatgctagagtcctgatacgccagcgacacataagagtacggaagcaggttgtcaacataccctcctttatcgtcagactggacagccagaagcacattgacttttctctccgctcaccctacggcgggggcagacctggtagggtgaagagaaaaaacgccaagaagggacaaggcggtgcaggggccggagacgacgaggaggaggattag

SEQ ID NO: 203762 - DNA, 420 bp, synthetic construct
  misc_feature 1..420: note = Description of Artificial Sequence: Synthetic coding sequence
  source 1..420: mol_type = other DNA
atgcccgtggcccggagctgggtgtgccggaagacctacgtgacccctagacgaccctttgaaaagtctagactcgaccaggaactcaagctcattggggagtacgggctgaggaataagagagaggtttggcgcgttaaatttaccctggccaaaatcaggaaagccgctagggaacttctaacgttagacgagaaagatccacggcggctatttgaagggaatgccctcctgaggcgtcttgtgcggattggcgtccttgacgaggggaaaatgaaactggattacatactaggtctcaaaattgaagatttcctggaacggaggctgcagacacaggtgtttaagcttggtctggcaaagtccatacaccacgctagagttctcatccggcagcgacatattagccctcggagatag

SEQ ID NO: 203763 - DNA, 420 bp, synthetic construct
  misc_feature 1..420: note = Description of Artificial Sequence: Synthetic coding sequence
  source 1..420: mol_type = other DNA
atgcccgtggcccggagctgggtgtgccggaagacctacgtgaccccacgtcgcccgttcgagaagtctagattggatcaggagctgaaactgatcggtgagtacgggttgagaaacaagagagaggtgtggcgcgtgaagtttaccctggcaaaaatcaggaaggctgccagggaattgctcacattagatgagaaggatccgaggaggctatttgaaggtaatgcactgctgaggagactcgttagaatcggagtgttagacgaaggcaagatgaaacttgactatattctggggcttaagatagaggattttcttgagcgacggttgcagacgcaagttttcaaactgggattggccaagtccatacaccatgctcgcgttttgatacgccagcgacacatctcccctcgtcggtag

SEQ ID NO: 203764 - DNA, 471 bp, synthetic construct
  misc_feature 1..471: note = Description of Artificial Sequence: Synthetic coding sequence
  source 1..471: mol_type = other DNA
atgcccgtggcccggagctgggtgtgccggaagacctacgtgaccccccggaggccattcgagaagagcaggctagaccaggagctcaagttaatcggcgagtacgggttgcggaacaagcgtgaggtctggcgagtgaaattcaccctggccaagattaggaaggccgccagggaattactgaccctggatgagaaggaccctcgcaggttatttgagggtaacgccctcctgcgtagacttgtgaggatcggagtgctagatgagggtaaaatgaaattagactatattctcggcctgaagattgaggacttccttgagcgccgcctccagacgcaagtcttcaaactcggtctcgctaagagcatccaccatgccagggttctgatcagacagcgtcacattcggtaccacctcggttgggctccagaatccagtagcacatgcccaagtgatgggtgcccacactag

SEQ ID NO: 203765 - DNA, 420 bp, synthetic construct
  misc_feature 1..420: note = Description of Artificial Sequence: Synthetic coding sequence
  source 1..420: mol_type = other DNA
atgcccgtggcccggagctgggtgtgccggaagacctacgtgaccccccggcgaccttttgagaaatcaaggctggatcaggagttgaagttgatcggtgagtatggcctcagaaacaaacgcgaggtttggcgtgtcaaatttacgctcgccaagataaggaaagccgcacgagaactgctcacattggatgaaaaggatccacggcgcctgttcgaggggaatgccttgctgcggcggctggtgcggatcggcgtgttagatgagggcaaaatgaagctggactatatactcggtctcaaaatagaagatttcctggagcgacgcctgcagacccaggtgttcaagctgggcttggcaaagtcaatccaccatgcacgcgttctgattcgccagcgccacatttccccacggaggtag

SEQ ID NO: 203766 - DNA, 2844 bp, synthetic construct
  misc_feature 1..2844: note = Description of Artificial Sequence: Synthetic coding sequence
  source 1..2844: mol_type = other DNA
atggccacccgggtgcggaccgccagcatctgggtgccccccctgcaggagaggaactcctcgtgggataggattaggaagttacaaggacaggagagcatcctgggtcagggcacgccaggcctgcaacctctccccggaacacccaggcaaaagcagaaatctcggaggatcgagaaggtactggagtggctatttattagtcaggagcagccgaaaattacaaaatcctggggccctctgtcatttatggacgtcttcgtggactttacctgggaagagtggcaactgctggatccagcacagaagtgtctgtatcgttcggttatgctcgagaactactctaacttggtgtcactaggttaccagcacacaaagcccgacataatctttaaactggaacaaggagaggagctatgtatggtgcaggcccaggtgccgaaccagacatgtccaaacactgtgtggaagatcgatgacctaatggactggcatcaggaaaacaaagacaagctggggagtactgctaaatctttcgagtgtacaaccttcgggaaactctgcctcctgagcaccaaatacctctctcgtcagaagccccacaagtgcggaacccatggcaaaagtctcaaatacatagatttcacttccgattacgccagaaataacccgaatggctttcaggtccacggaaaatctttttttcacagtaagcacgagcaaaccgtgattggcatcaaatactgcgagtcaatcgaaagcgggaagaccgtgaacaagaagtcacagcttatgtgtcagcagatgtatatgggagaaaaaccctttggctgttcatgttgcgaaaaagcatttagttccaagagctacttgctcgttcaccagcagacacacgccgaggagaaaccttacggctgtaatgagtgtggcaaagacttctctagtaaaagttatttgatcgttcatcaaaggattcacactggagagaagctccatgagtgctctgagtgccgcaaaactttcagctttcattcgcagctagtgatacaccagagaatccacacaggggaaaacccctacgagtgttgtgaatgtggtaaagtttttagccggaaagaccagttggtgtcccaccaaaaaacccacagcgggcagaagccctacgtgtgtaacgagtgtggaaaggccttcggcctaaagagtcagctgataattcatgagaggatacacactggggagaaaccttatgagtgcaacgagtgtcaaaaagcgtttaataccaagtctaacctgatggtgcaccagcgcacccatacaggcgaaaagccctacgtctgtagcgattgcggcaaggcttttacttttaagtctcagttgatcgtccatcaggggatacacaccggcgtgaagccgtatggctgcatccagtgtggaaaaggttttagcctcaagtctcaattaatcgtccaccagagatcacatacagggatgaaaccatacgtatgcaacgagtgtggcaaggcctttcggagtaagagctacttgatcatccatacccggacgcacactggcgagaaactgcacgaatgtaacaactgcgggaaggcatttagctttaaatctcagttaattatacaccagcgaatccataccggagagaatccgtacgagtgtcacgagtgcgggaaggccttctctaggaaatatcagttaatcagccatcagcgtactcacgcaggcgaaaagccttacgagtgtactgactgcggaaaggcttttggcttgaaaagtcagttgattatccaccagcgcacccataccggcgagaagcctttcgaatgtagcgaatgccaaaaggcttttaacacgaaaagtaacctcattgtccatcagcgtacacacactggcgaaaagccttactcgtgcaacgagtgtggcaaggctttcacattcaaaagccaactcatcgttcacaaaggggtgcacaccggtgttaaaccatacggatgcagccagtgtgccaaaactttctcacttaaatcacaactgattgtacaccaacgaagccatactggggtcaaaccctatggctgcagtgaatgtggcaaggcttttcgctctaaatcttacctgatcattcacatgcgcacacacacgggagaaaagccccatgagtgtcgggagtgcggtaagtcctttagcttcaattcgcaactgatcgtccatcaacgcattcacacgggcgaaaacccatacgaatgctccgagtgcggcaaggcgtttaaccgcaaagatcagctcatctcacatcagaggactcacgccggagagaaaccctacggctgctctgagtgcggcaaagcctttagctcaaagagctatctgatcattcatatgagaacccatagcggagagaaaccctatgagtgcaatgaatgtggcaaagcctttatttggaagtccctgctgattgtccacgagcgcacccacgccggagtaaatccctataagtgttcccagtgcgagaaatcattctcaggaaagctaaggctgctggtgcatcagaggatgcatacacgcgagaaaccgtatgaatgcagtgaatgcggcaaagctttcatccgaaattcccaactgatcgtccaccagcgtacacactcaggggaaaaaccttacggctgtaacgagtgcggaaagactttctcacaaaaaagtatactttcagcgcaccaacgcacacatacgggggagaagccctgtaagtgtactgaatgcggaaaggccttctgctggaagagccagttaattatgcaccaaagaacacacgtggatgacaaacattag

SEQ ID NO: 203767 - DNA, 768 bp, synthetic construct
  misc_feature 1..768: note = Description of Artificial Sequence: Synthetic coding sequence
  source 1..768: mol_type = other DNA
atgccccgggaggaccgggccacctggaagagcaactacttcctgaagataatacagcttctggatgactaccctaagtgcttcatcgtcggcgcagacaatgtaggctcaaaacagatgcagcagattcgaatgagcttgagaggaaaggccgtagttttgatggggaaaaacacaatgatgcgcaaagccatacgcggacacctagagaacaaccccgcactcgagaaactgctgccacacatccggggtaatgtgggctttgtgtttacaaaggaggatctgaccgagatccgggacatgctgctcgctaataaggtgcctgctgccgctagagctggggccatcgcgccctgcgaggtcaccgtgccagcccaaaacactggcctgggccctgagaagacatcatttttccaggcgttgggcattaccactaagatctccaggggcaccatcgaaattttgggcgtgcgcaacgtggctagtgtatgcctccagatcgggtacccgacagtggcctcagtcccgcatagtatcatcaacggctataagcgggttttggctttgtccgtggaaacagactatacattcccacttgcagagaaggtcaaggcctttttagctgaccccagcgctttcgttgcagctgctcccgtcgctgctgcaactactgcagcacccgcggcagctgcagcaccagccaaagtggaagccaaggaggagtctgaggaatcagacgaagatatggggttcggcttgttcgactag

SEQ ID NO: 203768 - DNA, 954 bp, synthetic construct
  misc_feature 1..954: note = Description of Artificial Sequence: Synthetic coding sequence
  source 1..954: mol_type = other DNA
atgccccgggaggaccgggccacctggaagagcaactacttcctgaagatcatccagctgttggacgattaccctaagtgcttcatcgtcggcgcggacaatgtggggtcaaagcagatgcaacagatcaggatgtctttacgtggcaaagccgtggtgttgatgggtaagaacaccatgatgaggaaagctattagagggcatctcgagaataacccggcgctggaaaagctgctccctcacattcgtggtaacgtaggctttgtcttcacgaaggaagacctaaccgagatccgggacatgctgttggcgaataaggtacctgcagccgctagggcgggcgcaatcgccccctgcgaggtgacggtgccagcacagaacactgggctcggaccggagaagacatcctttttccaggccttggggatcacaaccaaaatttcccgtggaaccatcgaaatcctcagcgatgtacagttgatcaaaaccggcgacaaagtgggggcttcagaggcaacacttttgaacatgctgaacatctctcccttttcgttcggcctcgttatccaacaggtattcgataacggcagtatttataaccctgaggtgctagatatcacagaggagacactgcactcaaggttcctggagggcgtcagaaatgttgcctctgtgtgcctgcagattggctaccccaccgtggcctcagtgcctcactcgatcattaatggttacaaaagagtgctcgctttatcagtcgaaacggactacacctttcccctggccgagaaagtgaaggctttccttgcagatccttccgcttttgtagctgccgcgccggtagccgccgccacaactgctgctccagccgctgccgctgcccctgcgaaggtagaagctaaggaggaatctgaagagtccgatgaggacatgggattcggcctctttgattag

SEQ ID NO: 203769 - DNA, 954 bp, synthetic construct
  misc_feature 1..954: note = Description of Artificial Sequence: Synthetic coding sequence
  source 1..954: mol_type = other DNA
atgccccgggaggaccgggccacctggaagagcaactacttcctgaagatcattcaactactggacgactatccaaagtgttttatcgtgggggccgacaatgtagggtccaagcagatgcaacaaatccgaatgagcttgcgtggcaaggctgtggtcctgatgggaaaaaacaccatgatgcggaaggcgatccgaggccaccttgaaaataatccagcactggaaaaactgctgcctcatatccgagggaatgtcggcttcgtctttacaaaggaggatttgacggagatccgggacatgcttctggcgaacaaagtgcccgccgctgctcgggctggggccattgcaccctgtgaagttactgtgcccgcccagaatacgggacttggccccgaaaaaacgagtttctttcaagcccttgggataactacaaaaattagcagggggaccatcgagattctgtccgatgtacagcttatcaagaccggcgataaggtcggcgcttctgaagctacactgttgaatatgctgaacattagtcccttctctttcgggcttgttatccaacaggtttttgataacggttctatatataatcccgaagtactggatattaccgaggagacacttcactccagattcctggaaggcgtgaggaatgtggccagcgtctgtctacagatcggataccctacagtagctagtgtgccccattctattataaacggctacaagcgtgtcctagccttatccgtggagaccgattatacctttcctctcgcagaaaaggtcaaggctttccttgccgacccctcggccttcgtggcggctgccccagttgccgcagccactactgccgcccccgcagccgctgcagctcccgcgaaggttgaggccaaagaggaaagcgaagagtccgatgaggacatggggttcggtctgttcgactag

SEQ ID NO: 203770 - DNA, 345 bp, synthetic construct
  misc_feature 1..345: note = Description of Artificial Sequence: Synthetic coding sequence
  source 1..345: mol_type = other DNA
atggccagcgtgagcgagctggcctgcatctacagcgccctgatcctccacgacgatgaggttactgtgactgaagataagatcaacgctttgataaaagccgcaggggttaatgttgaaccattttggccaggcctgttcgccaaggccttggcaaatgtgaatataggcagtctgatttgcaacgtcggcgctggcggaccagctcctgccgctggtgcagcgcccgcaggggggcccgcaccatccacagccgcggcaccagcagaggagaaaaaagtcgaagcaaagaaggaggagagcgaagagtctgacgacgatatgggttttgggctcttcgattag

SEQ ID NO: 203771 - DNA, 270 bp, synthetic construct
  misc_feature 1..270: note = Description of Artificial Sequence: Synthetic coding sequence
  source 1..270: mol_type = other DNA
atggccagcgtgagcgagctggcctgcatctacagcgccctgatccttcacgacgacgaggtcacggtgaccgctttggccaatgttaatatcggttccttgatatgcaacgtcggcgcaggaggtccggccccggctgctggagccgctccagctgggggacccgctcctagcacggccgcggcaccggccgaagaaaaaaaagtggaagctaagaaagaagagtccgaggagagcgacgatgatatggggttcgggttattcgactag

SEQ ID NO: 203772 - DNA, 2277 bp, synthetic construct
  misc_feature 1..2277: note = Description of Artificial Sequence: Synthetic coding sequence
  source 1..2277: mol_type = other DNA
atggcccccgccatgcagcccgccgagatccagttcgcccagcggctggccagctcagagaagggcatacgagaccgagcggttaagaagctgcgacagtacatcagcgtgaagacacaacgcgagactggaggcttctcccaggaagaactcctgaagatctggaagggtctgttctactgtatgtgggtacaagacgaacccctgctccaagaagaactggccaatacgatcgcccaactggtgcatgccgtgaacaattctgcagctcagcacctgttcatacagaccttttggcagaccatgaatcgtgagtggaagggcatcgaccggctgcgcttggataaatactatatgctgatcaggctggtgcttagacagtcatttgaggtgctgaaacgcaatggctgggaggaaagccgtatcaaggtctttctggacgttctgatgaaggaggtgctctgccccgaatcgcagagccccaatggggttcggttccactttattgacatataccttgatgagttgtcaaaggttggcggtaaggaactgctggccgaccagaacttaaaatttattgatccattttgtaagatagctgccaaaacaaaagaccacactcttgtacagacgattgcccgcggtgtgttcgaggccatcgtggatcagtcccccttcgtgcccgaggagactatggaagagcagaagaccaaggtgggcgatggtgatctgtctgcagaggaaattccagagaatgaggtgagccttcgaagggcggtctccaagaaaaaaacagctttaggcaagaatcactcgcgtaaagacggtctgagcgatgaacgggggagagacgactgcggtacattcgaggatactgggcctctactgcagtttgattacaaggctgtggccgaccggctgctcgagatgacttcaagaaagaacaccccgcacttcaatcgcaagcggctgagcaaactgatcaagaagttccaagacctgtctgagggatcctccatttctcagcttagcttcgcagaagacatttccgcggatgaagatgaccagatcctttcccaaggtaaacacaagaagaaggggaacaagcttctcgaaaagacgaatttagaaaaggagaaggggagccgcgtcttttgtgtggaagaggaagattcagagtcaagcctgcagaaacgacggaggaagaagaaaaagaaacatcaccttcaaccggaaaaccctggaccaggaggcgccgctccgtctttggaacagaaccggggaagagagccagaggcctccggactcaaggccttaaaggcccgtgttgcagaacccggcgccgaagcgacctcctccaccggggaggagtccggatctgaacatccccccgcggtacctatgcacaataaacggaagagacctaggaaaaagagtccacgcgcacaccgggaaatgctggagtccgctgtcctgccaccggaagatatgagtcaatccggtccttccggttcacaccctcagggtcctaggggaagtcccactgggggcgcgcagctgctgaagcgcaaaaggaagctcggggtagtgcctgtgaacggatcaggccttagcacccctgcatggcctcctcttcagcaggaaggcccccctacaggaccagctgaaggggcgaattcccacacaacactcccccaaagacggcggctgcagaaaaaaaaagctgggcctggaagcctggagctgtgcggcctgccttcccagaagacagctagtttgaagaagagaaagaagatgcgggttatgagcaacctagtggaacacaatggcgtgctagagagcgaggccggtcaaccccaggccctgggcagttccggtacgtgcagcagcttaaagaagcagaagctgcgagccgagtccgattttgtcaaatttgacactccattccttcccaagcccctgttctttcgacgcgccaaatcaagcaccgctacacatcccccaggtcctgcagtgcagctgaataagaccccaagctcgagcaagaaggtcacgttcggactcaatagaaatatgaccgccgagttcaaaaaaacggacaaatccatcttggtttccccgacgggaccatcaagggtggcattcgacccagagcagaagcccctgcatggggttctcaagacacccacttcatcccccgcctcgtcgccccttgttgccaaaaaacctctcacaacaactccaaggcgccggcccagggccatggactttttttag

SEQ ID NO: 203773 - DNA, 780 bp, synthetic construct
  misc_feature 1..780: note = Description of Artificial Sequence: Synthetic coding sequence
  source 1..780: mol_type = other DNA
atgcccggcgccaactaccgggccggcgccggcgccggcgccggcgcccggcgaccacgcggagcgcgcgatagagaagaggacggaggtggcctggaacctgcagccgttgctcgcgatctgttaaggggcacatccaacatgtcattcgaggaactgctcgagctgcagtctcaggtaggtactaagacctacaaacagcttgtggcaggcaactcaccaaaaaagcaggcttctagacctccgatccagaatgcctgcgtcgccgacaagcatagaccgttggaaatgtcagccaagatcagggtccctttcttacgccaagtcgttcccatttcaaaaaaggtggcaagggatccacggttcgatgatctcagtggggaatacaaccctgaggtgtttgataaaacctatcagtttctgaatgacatccgtgcaaaagaaaaggaactggtcaaaaagcagctgaaaaagcacctgtcaggcgaggaacatgaaaagttacagcagttgctgcagcggatggagcagcaagagatggcacagcaagagcggaaacagcagcaggagctacatttagctttgaaacaagagcgacgcgcccaggcccagcagggccatagaccttacttccttaaaaaatcagagcagcgccagctagctctggcagagaaatttaaagagttaaaaagatcaaagaagctggaaaattttctgagtagaaagcgtcggcgcaacgctggaaaagatcggcggcatctgcccctgagcaaagaatag

SEQ ID NO: 203774 - DNA, 4233 bp, synthetic construct
  misc_feature 1..4233: note = Description of Artificial Sequence: Synthetic coding sequence
  source 1..4233: mol_type = other DNA
atggacatctacgacacccagaccctgggcgtggtggtgttcggcggattcatggtcgtgtccgccataggcattttcctcgtgagcactttctccatgaaggagacgtcttatgaagaggccctcgccaatcagcgtaaggaaatggcaaagacacatcaccagaaggtagagaaaaagaaaaaagaaaagactgtcgagaagaagggtaaaactaaaaagaaagaagaaaaacctaatggaaaaatacctgatcacgacccagcccctaatgtaacggtattgctgagggagccagtgcgagctcctgcagtggccgtagccccgacccccgttcaaccccctattatcgtggcaccggtggccaccgtacctgcaatgcctcaggagaaactggctagctctcctaaagacaagaaaaaaaaagagaagaaggttgccaaggtagaaccggctgtgtcgtcagtagtaaattctatccaagtgctgacttccaaggccgccattttagaaactgcccctaaggaagtcccaatggtagtggtgccccccgtgggagccaagggaaatactcctgctacaggaactactcagggaaaaaaggccgagggaactcagaaccagtcgaagaaagccgagggcgctccaaatcagggtagaaaggctgagggcacccccaatcagggcaagaagacggaaggaacacctaaccaaggcaagaaagccgagggcaccccgaaccagggaaagaaagctgagggaaccccgaaccagggcaagaaggcggagggcgcccagaatcagggaaagaaggttgacaccactccaaatcagggtaagaaagtggaaggggcacctacacagggcagaaaagcagaaggcgcccagaatcaggccaagaaagttgagggcgcccagaatcaagggaaaaaggccgagggcgcacagaaccaaggaaaaaaaggcgagggtgcccagaatcagggtaaaaaggctgagggcgcccagaaccaagggaagaaggcggagggcgcccagaaccagggtaaaaaagccgaaggcgcccagaatcaaggcaagaaagccgagggtgcacagaaccagggcaaaaaggccgaaggcgctcaaaaccaaggcaagaaaagcgaaggcgcacagaaccagggtaagaaagtggagggagcccagaaccagggtaaaaaagccgaaggagcccaaaatcagggtaagaaagctgaaggcgctcagaatcagggcaaaaaagccgagggggcccagaatcaggggaaaaaagctgaaggggcgcaaaatcagggaaaaaaagccgagggcgcccagaaccagggaaagaaggcagagggtgcacagaatcagggcaagaaggctgaaggagcacagaaccagggtaagaaagtggaaggagctcagaaccaggggaagaaagccgaaggggcacagaaccaaggaaagaaagccgaaggggcccaaaaccagggaaagaaggccgagggtgcgcagaaccagggccagaagggcgagggtgcccagaaccagggtaaaaagaccgagggcgctcagggaaagaaggccgaacgttcccccaaccaaggcaagaaaggggaaggtgcccctattcaggggaaaaaggccgattcggttgcgaatcaaggtacaaaagtcgagggaatcaccaatcaggggaagaaggcggagggatcgccaagcgaaggcaaaaaggccgagggctctccaaatcaggggaagaaagcagacgctgcggctaaccagggaaaaaaaacagaatctgcttcggtccaaggtagaaatacggacgttgcccagagccccgaggcccccaagcaggaggctcctgctaagaaaaagtctggatctaaaaagaaaggcgaaccggggccgcccgatgccgacggtccactctaccttccatacaagacgttggtgtccaccgtgggaagcatggtgtttaatgaaggagaagcccagcgcctcatcgaaatactgtctgagaaagcaggcatcatacaagacacttggcacaaggccacccagaagggtgaccctgtagccatcctgaagcggcagttagaggagaaagagaagcttctggcgacggagcaggaagatgcagctgtggctaagtctaaactccgcgaactgaacaaggaaatggcagccgaaaaagccaaggctgccgcaggcgaagcaaaagttaagaaacagctcgtggctagggagcaggagataactgccgtgcaggcccggatgcaggcctcctatcgagagcatgtcaaggaggtgcagcaactgcagggtaagattaggactcttcaggaacaactggagaatggacccaatacccagctggcccgactccaacaggaaaattctattcttcgggacgccttgaatcaggcaacatctcaggtcgaatccaagcagaatgcagaactagccaagctccgtcaggagttatctaaggtatcgaaggaactggttgaaaagtccgaggcggtccggcaggacgagcagcaaaggaaagcgctcgaggctaaggccgccgctttcgaaaagcaagttctacagctgcaggcttcacaccgagaatccgaagaggccctgcagaaacgtctggacgaagtgagcagggaactctgtcatactcagtcatcacatgccagcctccgggctgacgccgaaaaggcccaggaacagcagcagcaaatggcggagctgcactccaaactgcagtctagtgaagctgaagtcagatctaaatgcgaggagctttcagggctccatggtcagctgcaggaggcccgggccgagaactctcagcttacagagcgcatccgcagtatcgaagcactcctggaggccggccaggcccgggacgcccaggacgtacaagccagtcaagcagaagcagatcagcagcagacccgactgaaagaactggaatcccaagtaagcggcctagagaaggaagccattgaactgcgcgaggctgtggagcagcagaaagtcaagaataatgatcttcgggagaagaactggaaggcgatggaggcattggctactgctgaacaggcttgtaaggaaaagctcctgagcctcacacaggctaaggaggagtccgaaaagcaactctgcttgatcgaggcacaaactatggaggccctgctggctcttctgccagagctttccgtcttggcccagcagaattacacagaatggctacaggatttaaaggaaaagggacccactcttctcaagcatcctcctgctcccgctgagccgtcatctgatttagcctccaaactgcgagaagccgaggagacccagtctacactgcaggccgagtgcgaccagtataggagcattctggccgagactgaggggatgctgagggacctccagaagtcagtggaagaggaagagcaggtttggagagctaaggtgggtgccgctgaggaggagctacagaagagtcgggtgaccgttaaacatcttgaggagatcgtggagaagctgaaaggggagctggaaagttctgatcaggtcagggagcacacatcacacttggaagcagaacttgagaagcacatggccgctgcttctgcagaatgccagaactacgcaaaagaagttgctgggctgagacagcttctcttggaatcccagagtcagctcgacgcggccaaaagcgaagcccagaagcagtccgacgaactagctctggtgcgtcagcagctgtcagagatgaagtcccacgtggaggacggtgatatagcgggcgctccggcctcttcccccgaagctcctcctgccgaacaggaccctgtgcaactcaagactcagctggaatggacggaagcaattttggaagatgagcaaacccagagacagaaacttacggcggagttcgaggaggcacagactagcgcctgccggcttcaggaagagctggagaagctccgcactgctggacctttagaaagctccgaaacagaggaggcctcccaactgaaggagcgtctggagaaagagaaaaagctcacatctgatctcgggagagccgccacacgcctgcaggagcttcttaagaccactcaagagcagttagctcgagagaaagatacagtgaagaagttacaggaacagcttgagaaggctgaggatggatcttcttccaaggaagggacttctgtttag

SEQ ID NO: 203775 - DNA, 2934 bp, synthetic construct
  misc_feature 1..2934: note = Description of Artificial Sequence: Synthetic coding sequence
  source 1..2934: mol_type = other DNA
atggacatctacgacacccagaccctgggcgtggtggtgttcggcggcttcatggttgtaagcgcaatcgggatctttctggtttccaccttcagcatgaaggagaccagctacgaggaggcactggccaaccagcggaaagagatggctaagacccaccatcaaaaggtcgagaagaaaaagaaagagaagaccgttgagaagaagggaaaaacgaagaaaaaagaggaaaaaccaaacgggaagatacccgatcacgacccggcgccgaatgtgactgtgctgctccgcgaacccgtgcgcgccccagccgtcgccgtggctccaactccagttcaaccccccatcatagtcgcccccgtggccacagtgccggcgatgcctcaggaaaaactcgcatctagcccaaaggacaaaaagaaaaaagaaaaaaaggtggccaaggtagagcctgctgtctctagcgtggtaaatagcattcaggtcctcacctcgaaagccgccatcctggagactgccccaaaggagggaaggaatacagacgtggcgcaatcacctgaagcgccaaagcaagaggctcccgctaaaaaaaagtcgggcagtaagaaaaaagggccacctgatgctgacgggccattgtatcttccttataagactctggtttctacagtggggtctatggtcttcaacgagggcgaggcgcagagactgatcgaaatcttgagtgagaaggcaggtataattcaggatacatggcacaaggcaacccagaagggggatcccgtggcaatcttaaaacgccagcttgaggagaaggagaagctcctggctacagagcaagaggatgccgccgttgctaagtccaaacttagggaattaaacaaggagatggcagctgaaaaagctaaggcagccgccggtgaagcgaaggtgaagaaacaactggttgcccgcgagcaagagatcaccgctgtccaggccaggatgcaggccagctacagggagcatgtaaaagaggtgcagcagttgcaaggaaagattagaacactccaagaacagctggagaacgggcccaacacacagctggcgcggttgcagcaagaaaacagcattctgcgcgatgcattgaaccaggctaccagccaggtggagtctaaacagaacgccgagcttgcaaaactcagacaggagttatctaaagtaagcaaagaactggtcgagaaatccgaagctgttcggcaggatgagcagcagcggaaagctctcgaggccaaggccgctgccttcgaaaaacaggtcctgcagctacaggcttcacaccgagagagcgaggaggcactacagaagcgcctcgacgaggtgagcagagagctgtgccatacgcagagctcccatgccagcctcagggccgatgcagagaaggcacaagaacaacagcagcagatggcagaattgcacagtaaactgcagtcctctgaggcagaggtccgctctaagtgcgaagaattgagtggactgcacggccagcttcaggaagcacgcgcagaaaattctcaacttactgaaagaattaggagcattgaggcgctgctcgaagcaggacaggcccgcgacgctcaggacgtccaggcctctcaggccgaggcagaccagcagcagacaagattaaaagagttagaatcccaggtttccgggctggagaaggaagctattgagctgcgggaggctgtggaacaacaaaaggtgaaaaacaacgatttaagagagaaaaattggaaggctatggaggcattagctacagccgaacaggcctgcaaagaaaaactcctaagcctgacacaggccaaagaggagagcgaaaagcaactgtgtctgatcgaggctcagaccatggaagccttactagcactccttcctgaactctccgttcttgctcagcagaactacactgagtggctccaggatctgaaagagaaggggccaacgctattgaagcaccccccagcacctgccgaacctagtagcgaccttgccagcaaactccgtgaagctgaagagacccagtcgactcttcaggcggagtgtgaccagtatcggtctatactcgcagagactgagggaatgctccgtgaccttcagaaatcggtggaagaagaagaacaggtttggcgggcgaaagtcggagcagctgaggaagagctgcagaaatcgagagtaaccgtgaagcacctggaagagattgtggagaagctgaagggcgaattggaaagtagtgaccaggtgcgcgagcacacctcccatttggaggccgagttggagaagcacatggctgctgcttccgctgagtgccaaaactatgccaaagaggtcgccgggctccgacaactgctgctggagagccagtcccaactggacgctgccaaatctgaggcccagaagcagtcagacgaattggccctggtgcgacagcaactgagtgagatgaagtcccatgtcgaggatggcgatatcgccggggctccagcctccagccctgaagcccctccagccgagcaggatccagtacaactgaaaacccagttagagtggaccgaagcaatcttggaggatgagcaaacccagaggcagaagttgacggcagaatttgaagaagcccagacttccgcttgccgtttgcaagaagaactggagaagctgcgcacggccggtcccttagagtcgtccgagactgaggaagcgtctcagcttaaggagagactggaaaaagagaagaaactgacaagcgaccttggtcgcgccgctacaagattgcaggaactgctgaaaacgacccaggaacagctggctcgggaaaaagacaccgtgaagaagctgcaggagcaactggagaaagcagaagacggcagctcttcaaaagaaggcaccagcgtatag

SEQ ID NO: 203776 - DNA, 2934 bp, synthetic construct
  misc_feature 1..2934: note = Description of Artificial Sequence: Synthetic coding sequence
  source 1..2934: mol_type = other DNA
atggacatctacgacacccagaccctgggcgtggtggtgttcggcggctttatggtggtgtctgccatcggaatctttctcgtgagcactttctctatgaaggagacgagctacgaagaggccttagccaaccagagaaaggagatggccaaaacgcatcaccagaaggtcgaaaagaaaaaaaaggaaaagacggtggagaagaagggcaagactaagaaaaaggaggagaagcctaatggtaaaatccctgatcatgatcccgctcccaacgtgactgtgctccttcgtgagcccgtgcgcgctcctgcagtggccgtagcccctacaccagtccagccgccaattatcgtggcaccagttgccactgtacctgccatgccacaggagaagctcgccagtagcccgaaagataagaaaaagaaggagaagaaggtcgcaaaggttgaacctgccgtctctagtgtcgtgaacagcattcaagtcttgacttcgaaagctgcaatactggaaaccgcgcccaaagaaggtcgcaacacggacgtcgcccagagtcccgaggcccctaagcaggaagcccctgccaaaaagaaatctggtagtaagaaaaagggtcccccagacgcggacggaccactgtacttgccctacaagacgctagtgagcactgtgggatctatggtgttcaacgagggagaggctcagagattaatcgaaatcctttctgagaaggccgggatcatacaggacacgtggcacaaagcaacccaaaaaggtgatccagtcgccatcttaaagcgccaactggaggagaaagagaagcttctggccactgagcaggaggacgccgcagtggctaaaagcaagctaagagagttaaataaagaaatggctgctgaaaaggccaaagcagcagcaggtgaagctaaggtgaagaaacagctggtcgcaagggaacaagagatcaccgctgttcaggcccgcatgcaggccagctaccgcgaacatgtgaaagaagtccagcagctgcagggaaaaatccgaactctgcaggaacagctcgaaaatggtcccaacactcaactggccagactgcagcaggaaaactctatcctccgtgacgcgctcaatcaggccacttctcaggtcgagtccaagcagaatgccgagctggcaaaactgcgccaggaattgagcaaggtgtctaaggagctggtcgagaagtcagaagctgtgcgccaagacgagcaacaaaggaaggccctcgaggccaaggcagcagcattcgagaagcaggtcttacagcttcaggcctcacaccgggaatcagaggaagccctgcagaaacgtttggatgaggtttccagagagctgtgccatacccagtcaagccacgcttcgttgcgggctgacgcagagaaagcccaggaacagcagcagcagatggcagaactacatagcaagttgcagagctccgaagcagaagtcaggagcaaatgtgaagaactgtccggtcttcatggtcaactgcaggaagcccgagcagagaattcacaactgaccgaacggatcaggtcaattgaggcgcttttggaggccggccaggcgagggatgcgcaggatgtgcaggccagtcaggcagaggctgatcagcagcagacccgtctgaaagaacttgagtcacaggtctccggtctggagaaagaagccattgagctgagagaggctgtggaacaacaaaaggtgaaaaataatgacttgcgggagaagaactggaaggcgatggaagcacttgccaccgccgagcaggcctgcaaagagaagttgctgtccctcacacaggcaaaggaagaaagcgaaaagcagctatgcctgatcgaggcccagacaatggaagctctactcgctctcctgcccgagctcagcgtgttggcccagcagaattataccgagtggctccaggatctgaaagagaaaggaccaactctgctcaaacacccgccggcgccagcagaaccatcgagcgacctcgcatccaagctgcgggaggcggaggagactcagtccacactgcaggctgagtgtgatcagtaccgatccatattagccgagaccgagggaatgctcagggacctgcagaagtcagtcgaggaagaggagcaagtttggcgcgccaaagtgggagccgccgaggaggaactacagaaatccagggtcaccgtgaaacatttggaagagatcgtcgaaaaactaaagggagagttggagtcatcagaccaagtcagagagcacaccagccacctcgaagccgagctcgagaaacacatggccgcagccagcgccgagtgtcagaactacgccaaagaggtcgccggattgcgacagttacttctggaaagccagtcacagttggacgccgctaagagcgaggcccaaaaacagtcagatgagttagctctcgtcagacagcagctgtccgaaatgaaaagtcacgtcgaggacggcgacatcgctggcgcgccagcctcttccccggaagcccctccagccgaacaggatccagtccagctgaaaacgcaactggagtggacagaagccatcctcgaagacgagcaaacccagcgccagaagctgaccgccgagtttgaggaagctcagacatctgcctgcaggttgcaagaggaactcgaaaagttacgcacggcagggccgctcgagtcatcagaaactgaagaagcctcccagttgaaggaacgcctcgaaaaagaaaaaaagctgaccagcgacctgggtcgcgccgcaacgcgactccaagaactgctgaagactacccaggagcaactggcacgagaaaaggataccgtcaaaaagttgcaggaacagctggagaaggcggaggatggaagcagcagtaaagaaggcacgagcgtgtag

SEQ ID NO: 203777 - DNA, 4233 bp, synthetic construct
  misc_feature 1..4233: note = Description of Artificial Sequence: Synthetic coding sequence
  source 1..4233: mol_type = other DNA
atggacatctacgacacccagaccctgggcgtggtggtgttcggcggctttatggtggtgtcagcaatagggatctttctggtcagcacttttagtatgaaggaaacaagctacgaggaagccctcgccaaccagaggaaagagatggctaagacgcatcaccagaaggtcgagaaaaagaaaaaggaaaagacggtcgaaaagaagggcaagacaaaaaaaaaggaggagaaacccaacggaaagatcccggaccatgacccagcccccaacgtgaccgtgctgctgcgagaaccagtgagagcgcccgctgtggccgtggctccaactcccgtccagccacccatcatcgttgctccagttgccaccgtaccggcaatgccccaggagaagttggcctctagccctaaggacaagaaaaagaaagaaaagaaagtggccaaggtggaacctgccgtttcttctgtggtgaacagcatacaggtgctaacctccaaagccgccattcttgagacggcacctaaagaagtgcccatggtggttgtcccacccgtcggtgccaaaggcaatacccctgcgactggcactacccagggcaagaaagcagaagggactcagaatcagtccaagaaagccgaaggggcgccaaatcaggggaggaaggcagagggtactccaaatcagggaaagaaaacagaggggactccaaaccaaggaaagaaggccgagggcacacctaaccagggaaaaaaagccgaaggtacccctaaccaaggtaagaaggctgagggtgcacagaaccaaggaaaaaaggtcgatacaacgcccaatcagggcaaaaaagtcgaaggagcccccacccaggggcgcaaggctgagggggcacaaaatcaggccaagaaggtcgaaggcgctcagaatcagggcaaaaaagctgagggcgctcaaaaccaaggcaaaaaaggagagggcgcgcagaatcaggggaagaaggccgagggcgcgcagaatcagggcaaaaaggccgaaggggcacaaaatcaggggaagaaagcggagggtgcacagaaccagggcaagaaggcggagggggcccagaaccaaggaaagaaagccgagggcgctcaaaaccagggcaagaaaagcgaaggggcacagaatcaagggaaaaaagtcgaaggagcccagaaccagggcaagaaagccgagggggcacagaaccaggggaagaaggcagagggggctcagaaccagggtaaaaaggctgagggcgcccagaaccaggggaagaaggccgagggggcacagaatcagggaaagaaggccgaaggagcccaaaatcaaggtaagaaggccgaaggcgcccagaatcaaggcaaaaaggctgagggcgctcaaaatcagggtaaaaaggtagaaggagcgcagaaccagggaaagaaagccgagggcgcacagaaccaaggcaagaaagcagaaggagctcaaaaccaggggaagaaggcagagggtgcgcaaaaccaaggccagaagggtgaaggggcccaaaaccagggaaagaagacggagggtgctcagggcaagaaagctgagcgtagccctaaccagggtaagaaaggtgagggtgctcccatccagggaaagaaagctgactctgtggccaatcaaggtaccaaggtggagggaatcacaaatcaggggaaaaaggccgaaggatccccaagtgaggggaagaaagcggagggctcgcccaatcagggcaaaaaagcagatgcggctgcaaatcaggggaagaagactgagagcgcctcagttcagggcaggaatacagatgtggcgcagtcgcctgaggcccctaagcaagaagcccctgccaaaaagaagtctggcagcaagaagaaaggggaacctgggccccccgacgcagacggcccactctacctcccatacaagacactggtatctaccgtcggtagcatggtgttcaatgaaggcgaggcacagcgcctcatcgaaatcttgagtgagaaagccggaatcatccaagacacatggcacaaggccactcagaagggggacccagtggccatcttaaaaaggcagttagaagagaaggagaaactgctcgccacggagcaggaggacgctgccgtggcaaaatcgaagctgcgcgagcttaataaagaaatggccgcggaaaaggctaaggcggcggcaggcgaagctaaggtaaagaaacagctggtggcccgtgaacaggaaattacggccgtccaagcccgcatgcaggcttcctatagagagcatgtgaaggaggtgcagcagttgcagggcaagatccggactctgcaagagcagctggagaacgggcccaacacacagctggctcggttgcaacaagagaattctatactgcgcgacgccctgaaccaggccacctcccaggtggaatcaaagcagaacgcggaacttgccaaacttagacaggagctgtcgaaggtgtcgaaagaactcgtcgaaaaatccgaggctgttaggcaggatgagcagcagaggaaagccctcgaggcaaaagcggcggccttcgaaaaacaggtgcttcaactccaggcatcccaccgtgagagcgaggaagccttgcagaagcgcttggatgaggttagccgagagctctgtcatacacaatcaagtcacgcgtctttacgcgccgacgccgaaaaggcacaagaacagcaacagcagatggccgaactccactccaagctgcagtcttccgaggccgaagtgagatcaaaatgtgaagaactgtcggggctgcacgggcagctgcaagaggcgagagccgagaactctcagctgaccgagcgaatccgctcaatcgaggccctgttggaagcagggcaagctcgggatgcgcaggatgttcaggctagtcaagcggaggctgatcaacagcagactagactcaaagaactggagtcccaggtttctggactagaaaaggaggcgatcgagctcagggaggccgttgagcaacagaaggtgaaaaacaacgatcttagggaaaaaaattggaaagccatggaggcgttagctacagctgaacaggcatgtaaagagaagcttctgagtctcacccaggctaaggaagaaagcgaaaagcagctgtgcttgatagaggcccaaacgatggaggctctgctggcgctgcttcccgaactctcggtgctcgcccaacaaaactacacagagtggctgcaggatttgaaagaaaagggacctactctcctcaaacacccaccagctccggctgagccttcttcagatttggcctctaaattaagggaagctgaggaaacgcagtctacgctgcaggccgaatgcgatcagtacagaagtatcctcgccgagacggagggaatgcttcgggacctgcagaagagtgttgaggaagaggaacaagtgtggcgtgccaaggtgggagccgctgaggaagagctgcagaagtcacgggtgactgtgaagcatctggaggagatcgtggaaaaactgaagggcgagttggagagctcagaccaggtcagggagcatacctctcacctcgaggctgagctggaaaagcatatggccgctgcaagcgcagagtgtcagaattatgcaaaagaggtggctgggcttagacagctcctgctagaaagccagagtcaattggatgcagccaagtcagaagctcagaaacaaagtgacgagctggctctcgttagacagcaactgtccgaaatgaaatcacatgttgaagacggggacatcgccggggcacctgctagcagccccgaggctcccccagccgagcaggacccagttcaactgaagactcagctagaatggaccgaagctattttggaagatgagcagacacagagacagaagcttacagcggagtttgaagaagctcagacaagcgcatgccgattacaagaagaacttgaaaagttgcggactgcgggccctctggaaagcagcgagacggaagaagcctcgcaactgaaagagaggctcgaaaaagaaaaaaagctgacctcagacctgggccgggccgccacacgtctccaagagctgctgaaaactacacaagaacagcttgcacgggagaaggacaccgtaaagaagctgcaggaacaactggagaaggccgaagatggttcctcctcgaaagagggaactagcgtgtag

SEQ ID NO: 203778 - DNA, 903 bp, synthetic construct
  misc_feature 1..903: note = Description of Artificial Sequence: Synthetic coding sequence
  source 1..903: mol_type = other DNA
atggacatctacgacacccagaccctgggcgtggtggtgttcggcggattcatggtggtttccgccataggcatctttttggtgtcaaccttttcaatgaaggagacttcttatgaggaggcccttgccaatcagaggaaagagatggctaaaacacatcatcaaaaggtagagaaaaaaaagaaagagaaaactgtcgaaaaaaaaggcaagacgaagaagaaggaggaaaagcctaacgggaagattcccgaccacgacccggcaccaaatgttacagttctcctccgcgagccagtgcgggctcctgccgtggctgtcgccccaacaccggtacaacctcctatcatagtggcccctgtagccaccgtccctgccatgccccaagaaaagttggctagttctcccaaagataagaaaaagaaggaaaagaaagtggccaaggtcgaaccagctgttagcagtgtcgtgaacagtatccaggtcctgaccagtaaagccgcaattctggaaactgcgcccaaggaagtcccgatggtggtggtgccccccgtgggagccaagggcaatactcctgccaccggaacaacccaggggaagaaggccgaggggacacaaaaccagagcaagaaagccgaaggggcacctaaccagggtagaaaagctgaaggcactcctaaccaggggaagaaaaccgaaggcactccaaaccaagggaagaaggcggaaggcacaccgaatcagggcaaaaaggcagaaggcacgccaaaccagggcaaaaaggctgaaggcgctcagaaccaaggaaagaaggtggacactaccccgaatcagggcaaaaaagtggaaggcgctcctacccagggacgcaaagcggagggcgctcaaaatcaggccaagtag

SEQ ID NO: 203779 - DNA, 2256 bp, synthetic construct
  misc_feature 1..2256: note = Description of Artificial Sequence: Synthetic coding sequence
  source 1..2256: mol_type = other DNA
atggtgttcaacgagggcgaggcccagcggctgatcgagatcctgtctgagaaggcgggaattattcaggatacttggcataaggcaactcagaaaggcgatcctgttgccatactgaagagacaactggaagagaaggagaagctattagccacagagcaagaagatgccgctgtagcaaagagtaaacttagagaactcaacaaggaaatggctgccgagaaagccaaggcagctgcgggggaagctaaggtgaaaaagcagctagtggccagagagcaagaaataaccgctgtacaggcgaggatgcaggcatcctaccgcgaacatgttaaggaggtacagcagttacagggcaagatccgcacactccaggaacagctagagaatggccccaacacgcagctggccaggctgcaacaggagaatagcatcctgagagatgccctaaatcaggcaacctctcaggtggagtccaaacagaatgcagagctggccaaactgaggcaggagctttcaaaagttagcaaagagctggtcgaaaagagcgaagccgtgcgccaggatgagcagcagaggaaggctttggaggcgaaagcagcggcctttgagaaacaagttctccagctccaggcaagccacagagagtcagaagaagccctgcaaaagcggttagatgaagtctcacgcgagctttgtcacacccagtccagtcatgcatccctccgcgcagacgccgagaaagcccaggaacagcagcagcaaatggccgaactccattcaaagctccagagctcagaagccgaagtgcgctccaagtgtgaggaattgagcgggctgcatggacagctgcaggaagcgcgggccgagaactcacagttgacagagcggattcgttctatcgaggctttgctggaggcaggccaagctagagatgcgcaggacgtgcaggcctctcaggccgaagccgatcagcagcagactaggctgaaggagctggaatcgcaagtgtcgggtctggagaaagaagcgattgagctcagagaggccgtcgaacaacagaaggtcaagaacaacgacttgagggagaagaactggaaagctatggaagctctcgctacggctgagcaggcctgcaaggagaagctgctgagtctaacccaagctaaagaagaaagtgagaagcaactttgcctgattgaagctcagactatggaagctctactggcactactgcctgagctgagcgttttggcccaacagaattataccgagtggctgcaggacctaaaagagaagggtcccaccctgcttaagcatccacctgcgcctgcggaaccgtcgagtgacctggccagtaagctaagagaggccgaggagactcagtctacacttcaggccgagtgcgatcaatacagatcaatactggccgagaccgaagggatgctccgcgacctgcagaaatccgtggaagaggaagagcaggtttggcgtgccaaggtgggagccgcagaagaggaactacaaaagtccagagtgacggtgaaacacctcgaagagatcgtggaaaaacttaaaggtgaactggaatctagcgaccaggtgagggaacataccagtcatctagaagccgagttggaaaagcatatggccgcagccagcgccgagtgccagaactacgctaaggaagtggcaggcctccggcagctgctattggagagtcagagccagcttgacgctgctaagagcgaggctcagaagcaatctgacgaactggctctggtgaggcagcaacttagcgagatgaagtcccacgtcgaggacggagacatcgcgggggccccagcctcaagccctgaagcaccacccgcagagcaggatcctgttcaactgaagactcagctggaatggacagaagctatcctggaagatgagcagacacaacgccagaagctgactgccgagttcgaggaggcacagacatctgcctgccggttacaggaagagctggaaaagcttcgtaccgcaggaccccttgaaagctctgagacggaagaggcaagccagctgaaggagcggctcgaaaaggagaagaagttgacctccgaccttgggagagccgcaacaaggctccaggaactgttaaagacaactcaagagcagttagctagggagaaagatacagtgaagaagctgcaggagcagctggaaaaggccgaagacgggtccagttctaaggagggaacatcagtttag

SEQ ID NO: 203780 - DNA, 663 bp, synthetic construct
  misc_feature 1..663: note = Description of Artificial Sequence: Synthetic coding sequence
  source 1..663: mol_type = other DNA
atggccagcggctgcaagatcggccccagcatcctgaacagcgacttagccaacctgggcgcagagtgtctgcgaatgctcgattccggagctgactatctacatctcgacgttatggatggatacatgcacatgatggtctctaagcccgaacaatgggtgaaaccaatggccgttgcaggggccaatcagtacacattccacttggaggcaacagagaacccaggagccctgattaaagatattcgcgaaaatgggatgaagtcctgcagcgttactcaggctgaggtacaatggcactcccagggacccctgcaagtcggtctcgccatcaaacctggaactagcgtggaatacctagccccctgggctaatcagatagacatggcgctagttatgactgtagagcctggattcggaggccagaaatttatggaagacatgatgcccaaggtacactggctgcgcactcaatttcccagcctcgatattgaggtcgacggcggggtggggcccgacaccgtgcataagtgcgctgaagccggagccaacatgatcgtgagcgggagcgccatcatgcgatctgaggaccctaggtccgttatcaacttgttacgaaatgtctgtagcgaagcagcccagaaaaggtctctcgaccggtag

SEQ ID NO: 203781 - DNA, 687 bp, synthetic construct
  misc_feature 1..687: note = Description of Artificial Sequence: Synthetic coding sequence
  source 1..687: mol_type = other DNA
atggccagcggctgcaagatcggccccagcatcctgaacagcgacctggccaacttaggtgcagagtgcctccgcatgcttgactcaggggccgactaccttcacctcgacgtcatggatggccatttcgttcccaatatcaccttcggccaccccgtcgtcgagtctttacggaaacagttgggccaagatccattctttgatatgcacatgatggtgagtaagcctgagcagtgggtgaaaccaatggccgtcgcgggggccaaccagtacacatttcacctcgaggccactgagaatcctggcgccctcattaaagacatcagggagaacggcatgaaagttggattagccatcaaaccggggacttctgtcgagtacctcgcaccctgggcgaatcagatagatatggccctggtgatgacggttgagcctggctttgggggccagaagttcatggaagacatgatgcctaaggtgcactggctgaggactcagttcccatctttggacatagaggtcgacggtggggtgggcccagatacagtgcataaatgtgccgaggccggcgctaatatgatagtcagcggcagtgctatcatgcggtcagaagaccccagaagcgtgatcaacctcctaaggaacgtgtgctctgaagccgcccaaaagcggtcccttgatcgatag

SEQ ID NO: 203782 - DNA, 537 bp, synthetic construct
  misc_feature 1..537: note = Description of Artificial Sequence: Synthetic coding sequence
  source 1..537: mol_type = other DNA
atgcacatgatggtgagcaagcccgagcagtgggtgaagcccatggcagtcgcaggagcaaaccagtatacgtttcatctggaagccacagaaaatcccggcgctctgatcaaggacatccgcgagaacggcatgaaatcttgcagtgtgactcaggccgaagtccagtggcacagtcaaggccccctgcaggtgggactggccatcaagcccggtacctctgtagaatacctagcaccctgggctaaccagatcgatatggcgctggtgatgaccgtcgagcctgggttcggtggccagaaattcatggaagatatgatgcctaaagttcattggttaagaacacagtttccatctctagacatcgaggttgacggaggcgtggggcctgacacagtgcacaagtgtgctgaagcgggagcgaatatgatcgtgagcgggagcgccatcatgaggagcgaagatccccggtccgttattaacctgcttcgaaacgtctgttcagaagctgctcagaaacggtccttagataggtag

SEQ ID NO: 203783 - DNA, 537 bp, synthetic construct
  misc_feature 1..537: note = Description of Artificial Sequence: Synthetic coding sequence
  source 1..537: mol_type = other DNA
atgcacatgatggtgagcaagcccgagcagtgggtgaagcccatggccgtcgcaggcgcaaatcaatatacctttcacctggaggccacagaaaatcctggtgcactaatcaaggacatccgagaaaatggtatgaagtcctgcagtgtcacgcaagctgaagtgcagtggcactcccagggtcctcttcaggttggactcgcaataaaacctggaacctcggtggaatatttggcgccatgggccaaccagatcgacatggctttagttatgactgttgagccaggtttcggaggtcagaagtttatggaagatatgatgcctaaagttcactggctgaggacacagttcccttcactagatatcgaggtagatgggggagtcggccctgatactgtgcacaagtgcgctgaggctggggccaatatgatagtgtccgggagtgctatcatgagaagcgaggaccctaggtccgtgatcaacctgttgcgcaatgtatgttccgaggcggcacagaaacggtctttggaccgatag

SEQ ID NO: 203784 - DNA, 285 bp, synthetic construct
  misc_feature 1..285: note = Description of Artificial Sequence: Synthetic coding sequence
  source 1..285: mol_type = other DNA
atgcacatgatggtgagcaagcccgagcagtgggtgaagcccatggcggtggccggggctaaccagtatacctttcacttggaagccaccgaaaaccctggcgctttgattaaagacataagggaaaatgggatgaagtcatgttctgttactcaggcagaagtgcagtggcacagtcagggacctcttcaggtaggactggccatcaaaccaggcaccagtgtggagtacctcgctccttgggcgaaccagattgatatggcccttgttatgactgttgagtag

SEQ ID NO: 203785 - DNA, 537 bp, synthetic construct
  misc_feature 1..537: note = Description of Artificial Sequence: Synthetic coding sequence
  source 1..537: mol_type = other DNA
atgcacatgatggtgagcaagcccgagcagtgggtgaagcccatggcggtggctggtgcgaaccaatataccttccatctcgaagctaccgagaaccccggagcactgattaaggacattagagaaaacggaatgaagtcctgctccgtgactcaggcagaggttcaatggcactcccaaggacctctgcaggtcggcctggcaattaagcccggaacgtctgttgagtaccttgctccctgggctaaccagattgacatggcactggtaatgactgttgaaccaggctttggcggccaaaagtttatggaggacatgatgccgaaagtccactggttgaggactcagttcccatctctggacatcgaagttgatgggggggtcggccccgacaccgtccataagtgtgcagaggccggagctaatatgattgtgtcgggtagtgcaattatgagatcagaggatccccgcagtgtgatcaatttgctgcgcaatgtctgctcagaagcagcacagaaaaggtccctcgatcgctag

SEQ ID NO: 203786 - DNA, 600 bp, synthetic construct
  misc_feature 1..600: note = Description of Artificial Sequence: Synthetic coding sequence
  source 1..600: mol_type = other DNA
atggccagcggctgcaagatcggccccagcatcctgaacagcgacctggccaacctgggggccgaatgcttaaggatgctcgactcaggagccgactacctccatctggatgtgatggatggtcactttgtccctaatatcactttcggtcatcccgtagttgagtctctgcgcaagcagttgggacaggacccctttttcgacatgcacatgatggtttctaagccagagcaatgggtaaaaccgatggccgtagcaggtgcaaatcagtataccttccacctggaggcaaccgagaaccccggtgcccttattaaagatattagagagaacggcatgaaagtggggctcgccatcaagcctggtaccagcgtggaatacctggctccatgggcaaaccagattgacatggctctggtgatgactgtcgaacctggatttggcggccagaagtttatggaagatatgatgcctaaggctggggctaatatgatagtctccggatcagcgatcatgcggtctgaagaccctagaagtgtgatcaatcttctgcgaaacgtctgttcggaggctgcccaaaagagatccctggatcgttag

SEQ ID NO: 203787 - DNA, 3159 bp, synthetic construct
  misc_feature 1..3159: note = Description of Artificial Sequence: Synthetic coding sequence
  source 1..3159: mol_type = other DNA
atgcgggaggccgccgagcggcggcagcagctgcagctggagcacgaccaggcccttgccgtgctctcagcaaagcagcaagagatcgatcttctgcaaaagtctaaagtgcgggagctggaggaaaagtgtcgtacccagtcagagcagtttaatttgctgtccagagacctcgaaaaattcagacaacatgccggaaagatagacctactgggaggcagtgccgtggcccccttggatatttctacagctccatctaaacccttcccacagttcatgaatggattagccacaagccttggcaaaggacaggagtccgccattggtggctctagcgctatcggagagtatatccgacccctgccccagccaggggaccggcctgagccgctttccgccaagcccacttttctgtcaagatcaggctctgctcgatgccggtcagagagcgatatggaaaacgaaaggaactcgaatacatcaaaacagagatattccggaaaggtgcatttgtgtgtggctcgctacagttacaacccgttcgatggtcctaatgagaaccccgaagccgaactgccactgactgctggaaagtatttgtacgtttacggggacatggacgaagatggcttttatgagggggagcttctggacggtcaacgcggactagtgccctctaacttcgtggattttgtgcaggataacgaatctagactggcgagtactcttggcaacgaacaggaccaaaatttcattaatcactccggcattggacttgagggggagcacatacttgacctgcattcaccaacacacatagacgccggtattaccgataactctgccgggacgctggatgtcaatatcgatgacataggagaggacattgtgccatatccacggaagatcacactgatcaagcagttagccaagtcagttattgtgggctgggagcctcccgccgttccaccaggttggggcaccgtgtcctcctacaatgtgttagtggataaagagactcggatgaatctaaccctcggtagccgcaccaaagctctgatagagaagctcaacatggccgcttgcacatatagaatttcggttcaatgcgtgacctctcggggctcgagtgacgagctccagtgcacactgcttgttggcaaggacgtcgtggtggcaccgtcccatctccgggtggacaatatcactcaaatttcagctcaactgtcatggctgccaactaattccaactattcccacgtaatttttttaaacgaagaagagttcgacatcgtgaaggccgcacgttacaagtaccagttctttaatctgcgacctaatatggcctacaaggtcaaagttcttgcaaagccacaccagatgccatggcagctaccgttagagcagcgggagaagaaagaagcattcgttgaattctccacactccctgcagggccacccgcccctccccaggacgtaacagtccaggccggggttactccagccacaatcagagtgtcctggcggcctcccgtcttgacccctaccggactgagtaacggcgctaatgttacagggtacggcgtctacgccaaaggccaacgggtggccgaagtgattttcccaactgccgactcaactgccgtcgagttggttcggctacgaagtctcgaagccaagggtgtgaccgtcaggacccttagtgctcagggggaaagcgttgattcagccgtggcagccgttcccccagagctgttagtaccccccactccacacccccggccggcgccccagtctaagccactggcaagcagcggagtgcccgaaaccaaagacgaacacctaggaccccatgccaggatggacgaggcatgggagcaatcaagggctcccggacctgtgcatgggcatatgctcgagccaccagtcggtcctggtcgtcggagccccagtcccagcaggattctgccccagccgcagggcactccagtcagcactacagtcgcaaaagccatggccagggaggccgcacagagggtcgctgagtccagtagactggagaagcggagcgtgttcttggaaaggtcgagcgccgggcagtacgccgcctcagacgaggaggatgcctacgattccccagattttaaacggcgcggggcaagtgtggacgattttctcaagggatccgaattagggaaacagccacactgttgtcatggagacgaataccataccgaaagcagcaggggctctgacttgtccgacatcatggaagaggacgaggaagagctgtattccgaaatgcaactggaagacggaggcaggcgaaggcccagtgggacatcccacaatgctctgaagatcctcggcaaccccgcctcggctgggcgggtggatcacatgggaagaagattccctagaggctccgctggaccacaacgttcacggcctgtgactgtaccatccatcgacgactacggcagagaccggctctcccccgacttctacgaagagtccgagacagaccccggagccgaggagctccctgcgcgcatctttgtagccttatttgactatgacccgcttacgatgagccccaacccggacgccgcagaagaagaattgccttttaaagaggggcagatcattaaggtgtatggcgacaaggacgctgacggcttctacagaggagagacatgcgcgcgccttgggctgattccgtgcaatatggtcagcgaaattcaggccgacgacgaagaaatgatggatcagctgttgaggcaaggttttctgccgctgaacactcccgtggagaaaatcgagagaagcagaaggagcggcagacgccactctgtctcaactagacgaatggtcgcgctctacgactatgacccacgcgagagctctcccaacgttgatgtggaagctgaactcactttctgcaccggcgatatcatcactgttttcggcgagatcgacgaggatggcttttattacggcgaactgaacggccagaaaggcctcgttcctagcaacttcctggaagaggtgcctgatgacgtagaggtctatcttagcgatgcccccagccactatagtcaagatacccccatgagatctaaggcgaagcggaaaaaatcagtccatttcaccccgtag

SEQ ID NO: 203788 - DNA, 1938 bp, synthetic construct
  misc_feature 1..1938: note = Description of Artificial Sequence: Synthetic coding sequence
  source 1..1938: mol_type = other DNA
atgaacggcctggccaccagcctgggcaagggccaggagagcgccatcgggggaagctctgccatcggggaatacatcagacctctcccgcagccaggtgacagaccggaacctctgagtgccaagcccacattcctttcccggagcgggtcagcaagatgtcggtccgagagtgatatggaaaacgaaagaaattcaaacaccagcaaacagcgatacagtgggaaagtgcacctgtgtgtcgcccgctattcctacaacccatttgacggacctaatgagaaccccgaggcagaactgcccttgactgccggcaaatatctgtacgtttacggtgacatggatgaagacggcttctacgagggggaacttttggacggacagcgaggactcgttccttccaacttcgtcgactttgtgcaagataatgagagtcgattggcttccacactgggcaacgagcaggaccagaatttcattaatcactctggcatcggcttagagggagagcacattctcgacttgcatagtcccacgcacatcgatgccggcataactgataactcggccgggacgctggatgtgaacatcgacgacatcggcgaagatattgtcccttatcctcggaaaatcactctgattaaacagctagccaagtccgtgattgtgggctgggagccgcccgcagtgcctcccggttgggggaccgttagtagctacaatgtactggtggataaagagacaaggatgaacttgactttggggtcacggaccaaagcgttaattgagaagcttaatatggccgcgtgtacgtacagaatctccgtgcagtgtgtcacgtcgcgaggttcaagtgatgagctgcaatgcacccttttagtaggaaaggacgtggtggtcgccccctcccatctgagggtggacaacattacccagattagcgcacagctgtcctggttgccgacaaacagcaattattctcacgtcatcttcctgaacgaagaagagttcgatatcgtgaaagccgcacgttacaaatatcagttctttaatctgcggccaaatatggcatacaaagttaaggttttggctaaacctcaccaaatgccatggcagctgccccttgaacaacgcgagaagaaggaggcattcgttgagttttcgacactcccggccggaccgcctgcaccaccccaagacgtcaccgtccaggctggcgtgaccccagcgacaattcgggtgtcctggaggcctcccgtgctaactcctacggggctaagcaatggagccaatgtgactggctatggcgtctacgctaaaggacagagggtcgccgaagtgattttccctacggccgactctactgccgttgagttggtcaggttacggagtctcgaagccaagggtgttacggtacggacactgagtgcccagggtgagtccgtggattccgcagtcgctgctgtgcctccggagctgctcgtcccacctactccccacccacggcccgcaccccagtctaagccactggcctcctccggcgtgccagagactaaggacgagcacctgggccctcacgctcggatggatgaggcctgggaacagtcaagggctcctggaccagtccacggccacatgctggagccccccgttgggccaggtcgacgttccccatctcctagtcggattctccctcagccacagggtacaccagtttctacgactgtcgccaaagctatggctagagaggctgcacagcgcgtcgcggagagcagccgcctggagaaaagatctgtgttcctcgagcggagcagtgctggacagtacgcagcttccgatgaggaagatgcatacgattcccccgacttcaagcgacgcggcgcttctgtggacgatttcctcaaggggtccgaacttggaaagcagatggcttcatag

SEQ ID NO: 203789 - DNA, 1938 bp, synthetic construct
  misc_feature 1..1938: note = Description of Artificial Sequence: Synthetic coding sequence
  source 1..1938: mol_type = other DNA
atgaacggcctggccaccagcctgggcaagggccaggagagcgccatcgggggctcaagcgcaatcggtgagtatatcagaccattaccccagccaggagaccgacctgaacctttgtctgccaagccaactttcctgagcaggagcggctcagctcggtgtcgctcagagagcgacatggaaaacgaaaggaacagcaacacaagcaagcaacgctactcaggaaaagttcatctttgtgtggcaagatattcttataatcctttcgatggtcctaatgaaaaccctgaggctgagctcccattgaccgcaggaaaatatttgtatgtgtacggagatatggacgaagacggattctatgaaggagagctgctggatggccagcgtggattggtaccaagtaattttgtcgattttgtacaggataacgaatccagactggcctccactctgggcaatgaacaggaccagaacttcatcaaccactcagggatcggcctggaaggtgagcacatactggacttgcattctccaacacatattgatgcaggtatcactgataattcagccggcactctcgatgtaaacatcgacgacatcggcgaagacatcgttccataccctagaaagatcacactgatcaaacagctcgccaaatctgttatagtgggctgggagccacctgccgtccctccagggtggggcaccgtgtcctcatacaacgtgctggtagataaggagacaaggatgaacttgactcttgggagtcgaactaaggccctgatcgagaaactgaatatggcagcttgtacttatcggatatctgtgcagtgcgtcacttccagaggctcaagcgacgagttgcaatgtaccttgttagtcggaaaagatgttgtagtggctccctcgcacctcagggtcgacaacattacgcaaatcagcgcccagctgtcttggctccccacgaacagcaattatagtcatgtaatttttctgaatgaggaggaatttgatattgttaaggcagctcggtacaagtatcagttctttaatctacgcccgaacatggcatacaaagtgaaggtgctcgcaaagcctcaccaaatgccctggcagcttcccctggagcagagagaaaagaaggaggcattcgttgaattctccacactgcctgccggccctccagcccctccacaggatgtgacggttcaggcgggtgtcactccagctacaatccgcgtgtcatggcgacccccggtcctaactcctactggattgtcgaatggcgccaatgtgaccggctacggtgtctatgcaaagggccagagggttgccgaggtgatatttcctacagccgactcgaccgcagtagagctggtgcggttgaggtccctggaggcaaagggcgtgacagtcaggaccttgtccgcgcaaggcgaatccgtcgacagcgcagtagccgctgtgccaccggaactcctagtgccaccaacaccacatcctcgccctgcgccacagtccaagccactggcaagttccggcgttcccgagaccaaagacgagcatctgggtccacacgctaggatggatgaagcctgggagcagagccgtgccccaggtccagtgcacgggcacatgctcgagccacctgtcgggcctggaaggcgctccccttcccctagccggattctgccacagccacaggggacgcccgtaagtaccactgtggccaaggctatggcccgagaggcggcacagcgggtggcagagagcagtcgactggaaaagcgttccgttttcctcgagaggtcctccgcaggccaatatgctgcctccgatgaagaggacgcatacgactcacccgatttcaaacgtaggggcgccagcgtagatgacttcctgaagggatctgaacttgggaagcagatggtgtcctag

SEQ ID NO: 203790 - DNA, 4638 bp, synthetic construct
  misc_feature 1..4638: note = Description of Artificial Sequence: Synthetic coding sequence
  source 1..4638: mol_type = other DNA
atgcagcgggagcgggaggccgagatccggcagctgctgcggtggaaagaggctgagcagcgtcagcttcaacagctgttgcatagagaacgcgatggcgtcgttagacaggcgagggagctacaaaggcaattggctgaggaacttgtgaaccggggtcattgttctaggccgggagcctccgaggtgagtgctgctcagtgtcgctgccggctgcaggaagtcttggcccagttgcggtggcagactgacggtgagcaagctgcacgcatcagatacttacaggccgcccttgaagtggaacgccagctcttcctcaagtatatcttggcacactttcggggccatcccgccctatctggatctcctgacccacaagccgttcattccttggaagaaccgctgccacagacttctagcggctcatgtcacgctccgaaaccagcgtgccagctcggctctctcgattctctctccgccgaggttggcgtgcgatccaggtcattagggttggtgtcatcagcttgctcatccagtccagatggccttttatctacccatgcctctagtctggactgcttcgccccggcctgtagcagatccttagactccacccgatccctacctaaggcaagtaaatcagaggaaagaccctcatccccggacacctctacccccggatctcgacggctgtcgccgcccccctctcccctaccaccacccccacccccttcagctcatcgcaagctgagcaacccaagagggggggaagggtctgagtcacagccatgcgaagtactgactccatctccgccaggcctagggcaccacgagctcattaagttaaactggctgctggcgaaggccctgtgggtactggcacgccgctgctataccctgcaagccgagaataaacaattgcgtcgggccggttgtccttatcaggcagatgaaaaggtgaagcgattgaaggtaaagcgagctgaactaaccggcttggctcgccggctcgctgatagggcacgaaagctgcaagagacaaaccttcgagcggtatccgcccccatcccgggagaatcttgcgcaggccttgagctgtgtcaggttttcgccaggcagagggctcgtgacctatccgagcaggcctccgcgcctttggcaaaggacaagcagatcgaagaacttcggcaggaatgtcacttacttcaggccagggtggcttcaggcccatgttctgatcttcatacaggccgggggggcccttgtacgcagtggctgaacgtacgagatctggacagacttcagagggagtctcagcgcgaggtgctgcggcttcagaggcaactgatgctgcagcagggcaatgggggtgcgtggcctgaggctggtggtcaatccgctacttgtgaggaagtgcgtcggcagatgttggctctagaacgagagttggaccaaaggagaagagaatgtcaggagctgggcgcacaggctgcgcccgcgcgtagaaggggggaagaggccgagacccagctgcaggctgccctactgaagaatgcgtggttggccgaagagaatgggcggcttcaagctaaaactgattgggtgcggaaggttgaggctgaaaactccgaggtgcgggggcatttggggcgcgcgtgccaagaacgggatgcaagtggactaattgcggaacagctgctccagcaggccgcccggggacaagacaggcaacaacagttacagagagatccgcagaaggcgttatgtgacttgcaccccagttggaaagagatccaggcactgcagtgtaggcctggccaccccccagagcagccctgggagacctcacagatgccagagagccaggtaaaaggcagtaggaggcctaaatttcatgccagacctgaagattacgccgtgtctcagccaaatcgggatatccaagagaagagggaagcttctttggaggaatcgcccgtggcacttggggagagtgctagtgtgccacaggtctccgaaaccgtgcccgcctcgcagcctcttagtaagaaaacctctagtcagtcaaactcatcgtctgaaggcagcatgtgggcgaccgtgccctcatctcctactctggacagagatacagcatccgaagtggacgacctggagcctgactctgtgagtctggccctcgagatgggggggagcgcggcaccagccgccccaaaactcaagatttttatggctcagtacaactacaatccctttgagggcccaaatgaccatcctgaaggagagctccccctgacggcaggcgactacatatatatcttcggggacatggatgaagacggattttatgagggggagctggaggacggacggcggggattagtaccctccaatttcgtcgagcaaattcccgacagctatattccagggtgcctgccggcgaagtcacccgacctcgggccaagccagctccctgctggtcaagacgaggcactggaagaggatagtttactcagcggaaaagcacagggcgtggtggacagagggctctgtcagatggtcagagtgggaagcaaaaccgaagtggctaccgagatcttggataccaagactgaggcatgccagctggggctactacagtctatgggcaaacaaggcctcagccgtccacttctgggtacaaagggagtcctcaggatggctcccatgcaactacatctgcagaatgtcacagccacaagcgctaatatcacatgggtctattcaagccatcgtcatccccacgttgtttatctagatgaccgggagcatgctctgacacccgcaggtgtttcctgttacactttccagggactctgcccgggaacccactaccgtgcacgtgtggaggtgcgcttacctcgtgatttattgcaagtgtactggggcacaatgtcgtcaacagtcacctttgacacactgttggccggacccccctacccccctctcgacgtgctggtggaaagacacgctagcccaggcgtgctggtggtctcatggctgcccgttacaattgactctgctggatcttcaaacggagttcaggttactgggtacgccgtgtacgccgatgggctcaaagtctgtgaagtggcggatgctaccgcaggatcaaccttgctggaattctcgcaactccaggtacctctcacttggcagaaggtgtctgtgcgcacaatgagcctatgtggggagagcctggacagcgtacctgcacagatcccagaggacttttttatgtgccacagatggcctgagacccctcccttcagctatacttgtggcgacccgtccacttaccgggtaacattccctgtgtgcccacagaagctgagcttggcccccccctcagctaaagcatctccccacaacccaggaagctgtggcgaacctcaggcaaagttcctcgaggcgttctttgaggagcctccccgcaggcagtcccccgtctccaacctgggtagcgagggagagtgcccaagcagcggagcgggcagccaggctcaagaactggcggaggcatgggagggttgtaggaaagacctgctcttccagaagtcccctcagaaccaccgccctccgtccgtcagcgatcagcctggtgagaaggagaactgttcacagcacatgggtaccagcaagagcccggccccaggcttcattcatctgcgcactgagtgcggtccgagaaaagagccctgccaagaaaaggccgctttagaacgggtcttgcggcaaaagcaagatgcgcagggattcaccccaccgcagctcggggcctctcagcagtatgccagtgactttcacaacgtgcttaaagaagagcaggaggcattatgcctcgacttgtggggcacagagaggcgagaagagcgcagagaacccgaacctcattcacggcagggtcaggccttgggtgtcaaacggggatgtcagctacacgagcctagtagcgccctgtgtccagctccaagcgctaaggtaattaaaatgcccagagggggccctcaacaactcggaaccggcgcaaatactccagctcgcgtttttgtggcattgtcagactacaacccgctggtgatgagcgcaaacctgaaggccgcggaggaggaactggtgttccaaaaaagacagctgttgagggtctggggatctcaagacacgcacgatttttacctttccgagtgcaaccgacaggtcggaaacattcccggtcggttggtggctgaaatggaggtcggcaccgagcagacagatagacggtggagatcccccgctcagggcaatctgccatccgtggctcaccttgaggactttcagggtctgaccattccacagggctcttctcttgtactgcagggcaactcaaagaggctgcccctttggaccccaaaaataatgatcgcggctctggattacgatcccggggacggccagatggggggccagggcaagggacggctggccctccgcgcgggcgacgtcgtgatggtttacggccctatggacgatcagggcttttattacggtgagctagggggccatcgcgggctggtgccagctcacttgctggaccacatgtctctacatggacactag

SEQ ID NO: 203791 - DNA, 4920 bp, synthetic construct
  misc_feature 1..4920: note = Description of Artificial Sequence: Synthetic coding sequence
  source 1..4920: mol_type = other DNA
atggccaaggacagccccagccccctgggcgccagccccaagaagccaggatgcagcagccctgccgctgctgtgcttgagaaccagcggagggagctggagaagctccgggctgagctggaggctgagagggctggctggagagccgagaggcggaggtttgccgccagagaacggcagctacgggaagaggccgagcgcgagagacgtcagcttgcagatcggctcagaagtaagtgggaggctcagcgctcaagggagctcagacagctgcaagaggagatgcagagggaacgggaagccgagataaggcagctgctcaggtggaaggaagcagagcagagacaactgcagcagctgctccatagggagcgcgatggcgtagttcggcaagcccgggaattgcaacgccagcttgccgaggaattggttaataggggccattgctcacggccgggggcgtccgaggtgtctgcagcgcagtgcaggtgtagactccaagaggtgttggcccaattgcgctggcaaactgacggcgagcaagccgcaaggatcaggtacctccaagcggccctggaggtggaacgacagttattcttgaagtacatattggcacactttaggggacaccctgcgctctctggtagccccgatccgcaggctgtgcactcactggaggagcctttgcctcaaacttctagcggaagctgtcacgcacccaaacctgcttgccagctaggcagtctggattccctgtcagcggaggtcggagtgaggagccgctcactgggcctagtgagtagcgcctgttcatcgagccccgacggcctcctctcgacccatgcttcctcactggattgtttcgctccagcttgctctagaagcctggacagtacaagaagtcttccgaaagctagtaagagtgaggagcggcccagtagccccgacacctcaacacccggctccagacgtctgagcccgcccccaagcccacttcctcctccaccccccccttcagcccaccggaagctatctaacccacgcggtggtgaaggaagcgagagtcagccgtgtgaggtgctgacaccctccccgcccgggctgggtcaccacgaacttatcaagctgaattggttgctggctaaggctttgtgggtcctggccaggcgatgttatacactgcaggctgagaataaacaactcagacgtgcaggctgcccctatcaagccgacgagaaggtcaaacggctcaaggtgaaaagggccgagctgaccggtctcgctcggcgattggctgatcgggctcggaaattacaagagactaacctccgcgccgtgtccgctcccatacccggagagagttgcgcaggactggagctttgtcaggtgttcgcgagacagagagcccgggatctcagcgagcaggccagcgccccgctggccaaggacaaacaaatcgaagagttaagacaggagtgtcatttgttacaggcccgagtcgcttccgggccttgttccgacctgcacaccggcagaggaggcccatgcactcagtggttgaacgtgcgagacctggaccggcttcagcgtgaatctcaaagggaggttctcagacttcagaggcaactaatgctgcagcagggcaatgggggggcatggcctgaagctggcgggcagagtgcaacatgcgaggaggtaaggagacagatgctggctcttgagcgtgagctggatcagcgcagaagagaatgccaggaactgggagcacaggccgcacccgcacgccgtcgaggcgaggaggcagagactcagctgcaagctgctctgctgaagaacgcctggttagctgaagaaaatggtcgcttgcaggcgaagacagactgggtacgcaaggtggaagcggagaactccgaggtccgcggtcacctgggtcgagcttgtcaggagagggacgcatccggactgatcgccgagcagcttctccagcaggcagcaagaggacaggatagacaacaacagctccagcgcgacccccagaaagcactgtgtgacttgcacccctcatggaaagagatccaggcgttgcaatgcagacctgggcaccctcccgagcagccatgggaaaccagccaaatgcctgaatcccaggtgaaagggtctaggcgtcccaagttccatgcaaggccagaggactacgcagtgtcacaacccaacagagacatccaggagaagagagaggcatctctggaagagagtcccgtggcgcttggagagtctgcgtccgtgccccaggtcagcgagacagttccagcatcccagccactgtcaaaaaaaacaagtagtcagagtaactcctcaagtgaaggatctatgtgggcaacagtcccctcatcacctaccctcgacagggataccgctagcgaggtcgatgatctggagccagactctgtgtctctcgcactggaaatgggtgggagcgctgcacctgccgcaccaaagctaaagatctttatggctcagtataattacaatcccttcgagggcccaaacgatcatcccgagggcgaactccctctgactgcaggagactacatctatatttttggggacatggacgaggatggcttttacgagggggagcttgaagatggtcgccgcgggctcgtgcccagtaattttgtggagcagatcccagacagctacatacctgggtgcctgcccgccaagtcaccagatctgggaccgtcccagctgccagcaggacaggacgaagccctggaggaggatagcttactctcaggaaaagcccaaggagtggtcgacagaggtctgtgccagatggtgagagtcggatccaaaactgaagtggccactgagatactggacacgaaaaccgaggcgtgccagctggggcttctgcagagcatgggaaaacagggtctctcgagaccactgctcggcaccaaaggcgtcctgcggatggcccccatgcagttgcacctgcagaacgtcaccgccacctctgctaacataacttgggtttattctagtcaccggcacccacacgtcgtgtacttggatgacagagaacacgccctgactcctgcgggagtgtcctgttacacctttcaaggtctttgtcccggaacacattacagggctagagtcgaggtgcgtttgcctcgcgacctgctgcaggtgtattggggcactatgagctctaccgtgaccttcgataccctgctggctggacccccataccctcctctggatgtgctcgtcgagaggcatgcctctccgggggtgctcgtagtgtcctggctgcctgtaactatagacagtgctggctcttcaaacggagtgcaggtcactgggtacgccgtctatgccgatggcctgaaggtgtgtgaggtagcagacgcaaccgcaggttctaccttgctagaattctcccagcttcaggtgcccctgacctggcagaaagtgtccgtgcgtaccatgtccctgtgtggagaatccttagattcagttcccgctcagatacctgaggatttcttcatgtgtcacaggtggccggagactcctccattttcatacacctgcggggatccctctacatatagagttacctttcccgtatgtcctcagaagctatcgcttgccccaccttccgctaaagcttctccccacaaccctggttcttgcggcgagccacaagccaaatttttggaagcgttctttgaagagcctccccgccgacagtcaccagtaagcaatcttgggagcgagggcgaatgcccctcaagtggggccgggagtcaagcccaggaactggccgaagcctgggagggatgtcgcaaggatctcctgttccagaaatcaccccagaaccatcggcccccctctgtgtccgaccaaccaggagagaaagagaactgttcgcagcacatgggcaccagcaagagcccagcccccgggtttattcacctcagaactgagtgtgggccacgcaaggaaccttgtcaagaaaaggctgctctggagcgagtcctgaggcagaagcaggatgcccaaggcttcacccctcctcaattaggcgcaagccaacagtatgcctctgacttccataatgtactgaaggaagagcaggaggccctttgtcttgacctgtggggcaccgagagaagagaagagcgccgggagcctgaaccccattcccgtcagggccaggccctcggtgtcaaacggggttgtcagctgcatgaaccctcctcagcactgtgtcccgcccctagtgccaaggtgatcaagatgccccgaggcggcccccagcagttggggacaggcgcaaataccccagctcgggtatttgtggctcttagcgactacaaccccctggttatgtccgcaaacctcaaggctgctgaggaggagctcgtgttccaaaagcggcagctgttacgcgtctggggcagtcaggatacacacgacttttatttgtccgagtgtaatcgacaggtggggaacatccctggccgactggtagctgaaatggaggtcggcactgaacagactgaccggcgttggagatctccagcgcagggaaacctgccgagtgtcgcgcatctcgaggattttcaaggattaaccatccctcaagggtcctcactggtacttcaaggaaattcaaaacggctaccattgtggactccaaaaatcatgattgccgcccttgattatgacccaggggatggacagatgggtggacagggcaagggcagacttgcgctgcgtgcgggggacgtagtcatggtgtatggtcccatggatgaccagggattctactatggcgagctcggcggtcataggggcctcgtgccagcacatctgctcgatcatatgagtctgcacgggcattag

SEQ ID NO: 203792 - DNA, 4638 bp, synthetic construct
  misc_feature 1..4638: note = Description of Artificial Sequence: Synthetic coding sequence
  source 1..4638: mol_type = other DNA
atgcagcgggagcgggaggccgagatccggcagctgctgcggtggaaggaagctgaacagcggcagttacagcagctactgcaccgcgagcgagacggtgtagttagacaggcacgcgaattacaaagacagcttgctgaggagttggtcaatcgtggacactgctcgcgccctggcgcttctgaagtttccgccgctcagtgtagatgtcggctccaggaggtgctggcccaactgcgatggcaaactgacggagagcaggccgcaagaattaggtatctgcaggcggccctggaggtggagagacagctgttccttaaatatatcctggcccacttccggggccatccggcactctccggctccccagaccctcaggcggtccactccctcgaggagcctttacctcagaccagttccggaagttgtcacgcccccaagcccgcatgccagctgggaagcctcgattctctgagcgccgaagtcggcgtccgcagtagatctcttggcctggtgtccagtgcttgctctagcagtccagatgggttgctgtcaacgcatgcttcttctctcgactgtttcgcccccgcttgctcacggtccctggactctactcgatctctgcccaaggcttctaaatcggaagaacgaccttccagccccgacactagcacaccagggtcccggcgtctttctcccccacctagccctttgcctccacccccacctccttcagcacatagaaaattaagcaaccctcgaggaggagaaggatcagaatcacagccatgtgaagtgctgaccccgagccctcctgggttgggacatcatgagctcatcaagctgaattggttgctagctaaggcattgtgggttctcgcaagaaggtgttacacgctgcaagaggagaataagcagcttcggagagcaggatgcccatatcaggcagacgagaaggtcaagagattgaaagtcaagcgagcagaactcactgggctcgcacggcgattggctgaccgggcccgagaactgcaggagacgaatcttcgtgccgtatccgctccaatccccggagaaagctgtgcgggcctcgagctttgccaggttttcgcacgccaacgggcccgggacctgagtgaacaagcctctgctccgcttgccaaggataagcagatcgaagagctaaggcaggaatgtcatctcctgcaggcccgagtggcctccggaccatgtagcgatcttcataccggacgcggtggcccgtgcacccagtggttgaatgtgagagacctcgatagactacaaagagaaagccagcgcgaagtgctgagactgcagcgccagctgatgctgcaacagggcaatgggggagcatggccggaagcaggcggtcagtcagcaacctgcgaggaagtgaggaggcagatgctggcgctggagcgggagctcgaccaaagaagaagggagtgccaagagctaggcactcaggctgctccagcccgtaggagaggagaagaggctgagacacaactccaggccgcccttttaaagaacgcctggctcgcggaagagaacggtcggttgcaggcaaaaacagattgggtgcgtaaagtggaagcggaaaattctgaagtaaggggccacttaggtagagcctgccaagaacgtgatgccagcggcctgatagccgaacagctgttacagcaggccgctcgcggtcaggatagacagcagcagttacagagggatccccagaaagcactttgcgacctccatccttcctggaaggagatccaagcgctgcaatgtcggccaggacacccgcccgaacaaccttgggagacatcacagatgccggagtcccaagtcaaggggtccagacgccctaaatttcatgcaagacctgaagattatgcagtgtctcagccaaaccgcgatatacaggagaagagagaggcaagtctggaagagagtcccgtagccctcggtgagagtgcttccgtgccccaagtgagtgaaacagttcctgcttcccaacctctaagcaagaagacgagctcgcagagtaatagttcatccgagggctctatgtgggcaacagtgccgagtagcccaaccctggatcgggacacagccagcgaagtggatgacttagaacccgacagcgtgagcctggccctcgagatgggcggaagcgccgcccccgcggcgcccaagttaaaaattttcatggcacagtataactacaatccatttgagggacctaatgaccatcctgagggagagctgccactaacggccggcgattatatatatattttcggcgacatggacgaagatggcttctacgaaggcgaactagacgatgggaggagggggctggtgccttctaacttcgttgagcagatcccagacagttacattcctggctgtctgcctgccaaatcccccgacctcgggcctagccagctacctgccggtcaagatgaggctctcgaagaagattctctgctgtccggaaaggctcaggggatggtggacagaggtctgtgccagatggtccgagtgggcagtaaaactgaggtggctactgagattcttgacactaagacagaagcttgccagctgggactgttgcagtccatgggtaaacaggggctctcccgtcccctcctcggaaccaagggcgtgcttagaatggcccctatgcagttgcatttgcagaatgtaaccgccacctccgcaaatatcacttgggtgtacagcagtcaccgccatccacacgtcgtttacctggacgatagggagcacgccctcactccagccggagtctcttgctacacgttccaagggctctgtcccggcacccattatcgcgtgcgagtagaggtgcgattgccctgggacctgttgcaagtctattggggaacaatgtcgagcacagtcacgtttgatactctgctcgctggccctccgtatccacctttggaagtgctcgtggagagacatgcctcaccaggcgtgttggtggtgagctggttaccagtgactatagactccgccggctctagcaacggggtgcaggttactggatatgccgtgtatgccgacggcctgaaagtgtgcgaagtcgccgatgcaacagctggctcaacagttctggagtttagccagctccaggtgcccctgacatggcagaaagtgagcgtacgaactatgtctctgtgtggagagagcctggactccgttccagcacagattcctgaggacttcttcatgtgccatcggtggcccgagaccccacctttttcttatacttgcggggaccccagcacttatcgggttacattcccagtgtgtccgcaaaagttgtcgctggcccccccgtccgccaaagccagcccacacaaccccgggtcttgcggggagccccaagccaagtttctcgaggccttcttcgaagagcctcccagacggcaaagtccagtatccaacttgggatccgagggagagtgccctagcagcggtgcaggctctcaagcccaggagcttgctgaagcatgggaaggatgtagaaaagaccttctgtttcagaagtcaccacaaaatcaccgccctccatctgtgagcgaccagcccggggagaaggaaaattgttaccagcatatgggaactagcaaatctcccgcacctgggttcatccacttgaggaccgagtgtggtccacggaaagagccctgtcaggaaaaggccgctctggaacgggtcctgcggcagaagcaagatgctcagggctttacacctcctcagcttggggcctcccaacagtacgcatccgactttcacaatgttctgaaagaggaacaagaagccctgtgcctcgatctccgcggtacagaaagaagagaggagaggagggagcctgagccacattcccggcagggccaggcattgggtgtgaagcgaggatgccagttgcacgaaccctcctctgctctatgccctgccccttcggctaaagttatcaagatgcctcgcggaggcccacagcagctgggcaccggagccaacacgcccgcccgcgtgtttgtcgctctgagtgactacaacccactagttatgtccgccaacctgaaagctgccgaggaggagctggtgtttcaaaaaaggcaattgttgcgggtttggggaagccaggacacccatgacttttacctgagcgaatgcaatcgacaagtgggcaatatcccggggcgcttggttgcagaaatggaagtcggcacagaacagaccgacagacgctggcgcagccccgcccagggacacctgcctagcgtagcccatctcgaagactttcaggggctgaccataccgcagggatctagtctagttctccagggaaacagcaaaagactgcccttgtggacacccaagattatgattgccgccttggactacgatcctggtgacggacaaatgggtggtcaaggaaagggcaggctcgccctgagggcgggcgatgtggtcatggtctacggccctatggacgatcaaggcttttactacggcgaactcggcggccatcgaggcttggtgcccgcccacctgctggaccacatgtcacttcacggccattag

SEQ ID NO: 203793 - DNA, 4920 bp, synthetic construct
  misc_feature 1..4920: note = Description of Artificial Sequence: Synthetic coding sequence
  source 1..4920: mol_type = other DNA
atggccaaggacagccccagccccctgggcgccagccccaagaagcctgggtgttcctcccctgctgccgccgtcctggagaaccagcgccgcgagctggagaagctccgggccgagcttgaggccgaacgcgctggatggcgcgccgagcgccggaggtttgctgcgagagagagacaactgcgggaggaggcggaacgagagcgcagacagttggcagacagactaagatccaagtgggaagcgcaacgcagtagggaactgagacagttacaggaggagatgcagcgtgaaagagaggcggaaattcgtcaacttctgcgttggaaagaggcggaacagcgacagcttcaacagctcctgcaccgtgagagggacggtgtggtaaggcaggctagggaattgcagcgtcagttggctgaggagctggtgaacagaggccactgctcaagacctggagccagtgaggtcagtgccgcacagtgcaggtgtagactccaggaagtgttggcacaacttaggtggcagactgatggcgaacaggctgcccgcatccgctacttgcaggccgccctcgaggtggaaagacagctatttctcaagtatattttggctcacttcagggggcatccagccctgagcgggagtcccgacccgcaggcagtccattccctggaagaaccattacctcagacctccagtgggagctgtcacgcccccaagcccgcatgtcagcttggctccctcgactccctttctgccgaggtcggggtgcgctctcggtcccttggtttagtctcgtcagcttgcagctcttctccagacggtttgttaagcactcatgcatcgtcactggactgttttgcccctgcatgttccaggtctctggacagcacacgaagccttccgaaagctagtaagagtgaggagaggcctagcagccctgacacctcaactcccgggagccggaggctgtcgcccccaccaagcccattacctccacctcctccgcccagtgcccatagaaaattatcaaatccgcgtggaggagagggctcagagtcacaaccttgcgaggttcttacgccaagtcctccaggattaggacaccacgaactgatcaagctcaactggttgctcgccaaagctctctgggtgctagctcggaggtgctacacacttcaggaggaaaacaaacagttaaggcgtgctgggtgcccttatcaggccgatgagaaggtgaagcgcttaaaagtgaaacgggcggaactgacaggcctagcccgcaggctggcagaccgggcccgggagctgcaggaaaccaacctgcgggctgtatcagcccccatacctggagaaagttgtgcaggactcgagctttgccaagtcttcgcccggcagcgagctcgagacctttctgagcaggcctctgctccactcgcgaaagacaagcagatcgaagaactgaggcaagaatgccatcttctccaagcaagggtagctagcgggccatgttccgacctgcacacggggaggggagggccatgcacccagtggctaaatgtgagagatctagacaggctgcagcgggagtctcagagagaggtcttgaggctgcagcgacagctgatgttacagcaagggaatggaggggcatggcccgaagccgggggccagtccgcgacttgtgaggaggtccgacggcaaatgctggctttggaacgggagctggatcagcgccgccgcgaatgccaggaactcggtacccaggcagcaccagccaggagaaggggggaggaagccgagacacagttgcaggcggccctgttaaagaatgcctggctggccgaggaaaacggacgtcttcaggccaagaccgattgggtcagaaaggtggaggctgaaaactcagaggtgcgagggcatctcgggcgcgcctgccaggagcgggatgcctcggggcttatcgcagagcaactgctccaacaggcggcacggggccaagacaggcagcagcaactgcagagagacccacaaaaggctctgtgtgatcttcacccatcctggaaagagattcaggcactccagtgccgaccgggacatcccccagaacagccttgggaaacaagtcagatgcctgaatcgcaggtgaaggggtctcggagaccaaagtttcacgcgcgtcccgaggattacgctgtaagccagcccaatcgtgatatccaggaaaagcgagaagcaagtctggaggagagcccagttgcacttggcgaaagcgcctcggttccccaggtgtcagaaactgtacccgcctcgcagcctctgagcaagaagacctcttcccagagcaacagctcatcagagggctccatgtgggccacggtgccatcatccccgactttggaccgtgacaccgccagtgaggtcgatgatctggagccagattccgtgtcgctggccctggagatggggggctcagctgctcccgctgcccccaagctcaaaatatttatggcccaatacaactataaccctttcgagggcccgaacgaccatcccgagggggaacttcccctgaccgcgggagactacatttacatatttggtgacatggacgaagacggcttctacgagggggagttagatgacgggaggagggggcttgtgccttcaaacttcgtggaacaaattcccgactcttatatccccggatgtctgccggctaaaagtcctgatctgggcccaagccaactgcctgccggccaggacgaggccctggaagaggactctcttctttccggtaaggcacaaggcatggtggaccgcggcctgtgccagatggtccgtgtcgggagcaagaccgaggtggcgactgagattctggacaccaagactgaggcctgtcagctgggcctcctgcagagcatgggaaagcaagggctatctcggcccctgctcgggactaagggagtgctgaggatggcccccatgcagctgcaccttcagaatgttaccgccactagcgccaatattacctgggtgtattcttcacatcgacacccacacgtggtgtaccttgatgatagagaacacgcactgactccagctggcgtttcctgctacacctttcaggggctgtgccccgggactcattatcgggttcgggtggaagttcgtctgccctgggaccttctacaggtgtactggggtactatgagctctaccgtgacctttgacacattgttagcaggccctccatacccacctcttgaggtgctagtagaacgacacgccagccccggcgtgcttgttgtctcatggctgcctgtgaccatagattctgcaggaagcagcaacggcgttcaggtaaccgggtatgccgtgtacgccgatgggctgaaggtgtgtgaagtcgctgacgctaccgccgggtccactgtgctggaattcagtcagctgcaggtccctttaacctggcaaaaagttagcgtgcgcaccatgtccctgtgcggagagtctcttgactccgtgcctgcgcagatcccagaagacttctttatgtgccacaggtggccagaaactccgcctttctcatacacctgcggcgacccgtcaacgtacagggtgacatttccggtgtgtcctcagaaactttcgctcgctcccccatccgctaaagcctcaccgcataatccgggctcttgcggcgaaccacaggcaaagttcttagaggccttctttgaggagccacccagaagacagtctccagtgtccaatttggggtcggagggggaatgcccctcaagcggagcaggtagtcaggcgcaggagttggccgaggcctgggaggggtgccgaaaggatctcctattccagaagagtccacagaatcatcgccctccgtctgtgtccgaccaacctggggaaaaagagaactgctatcagcacatgggaactagcaagagccccgcacctggctttattcatttgcgtacagagtgcgggcctagaaaggaaccttgccaggagaaagctgcactggaacgggtgctccgccagaagcaagacgcccagggtttcactccaccccagctcggggctagccagcagtacgcctcagactttcacaacgtactgaaagaagaacaggaggcactgtgcctggatcttaggggcactgagaggcgagaggaaaggcgagaaccagagcctcatagccgccaaggtcaagcgctgggtgtgaagaggggatgtcagctgcacgagcctagctctgcgttgtgccctgccccaagcgcaaaggtgattaagatgcccagagggggcccgcagcagctcggtaccggggctaacacacccgcacgggtgttcgtcgccctgagcgactacaacccgttggtcatgtctgccaatcttaaggcggccgaggaagaactggtattccagaagcgacagctcctacgcgtctggggtagccaggacactcacgatttctatctctccgaatgtaataggcaggtcggaaacatcccaggcaggctggtcgctgagatggaggtgggcactgagcagacagatagaagatggcgcagtccagcacagggacatttacctagcgtggcccatctagaggatttccagggtttaactattccccagggctccagcttagtacttcaagggaacagcaaaaggctgcctctgtggacccccaagattatgatcgcggccctcgactacgacccaggagatggccaaatgggcggccagggcaaaggccgtttggccctacgcgccggtgatgtcgtcatggtctatgggccaatggacgatcagggtttttattacggggagctgggtgggcaccgcgggctggtacctgcccacttactggaccacatgtcattgcatgggcattag

SEQ ID NO: 203794 - DNA, 4638 bp, synthetic construct
  misc_feature 1..4638: note = Description of Artificial Sequence: Synthetic coding sequence
  source 1..4638: mol_type = other DNA
atgcagcgggagcgggaggccgagatccggcagctgctgcggtggaaagaggctgagcagcgacagctgcagcagctactgcatcgcgaacgcgatggagtggtgcgtcaggcccgcgagttacagcgacagctggctgaagaactggttaaccgtgggcactgcagtcgccccggcgcttctgaagtatcagccgcacaatgccgctgcaggctgcaggaggtgcttgctcagttgaggtggcagaccgatggggagcaagctgcaagaattcgctatctgcaggctgcattggaggtggaacgccagctgttcctgaagtacatcctcgcacacttcaggggacaccccgcgttaagcggatctcctgatccacaggccgtacacagcctcgaggaaccactgccccagacaagctccggctcctgccacgctcctaaacccgcttgccagctcggctccctagactccttgtcagctgaggtcggggttcgatcccgttctctcgggctggtctctagcgcttgcagtagctcccctgacgggctcttgtcaacacatgcctccagcctcgattgcttcgcccctgcgtgctcaagatccctagatagcacccgatccctccccaaggcttctaagtctgaggaacgaccctcatctcctgacactagcacccctggcagtcggaggctgagccccccgccctctcctttgccacctccaccgccgccatctgcgcaccggaagctttccaatccccgcggaggtgaaggcagcgagtctcagccttgcgaggtgcttacgccttcaccgccaggactgggtcaccacgagcttataaaactgaattggttgctggcgaaggctctgtgggtgctagctcggcgctgctacactctgcaggaggaaaacaaacagctgcgcagagcgggctgtccttaccaggcggacgagaaagtgaaaagactaaaagtgaaacgtgccgagctcaccggcctggccaggcggcttgcagatcgggctcgcgagctgcaggagaccaaccttagggcagtgtctgctccaatacccggggagagttgcgccgggctcgaattgtgccaagtttttgcccgacagcgcgcccgggatctatccgagcaagcctcagctcccttggcaaaagataaacaaatcgaagagctgcggcaggagtgccatctgcttcaggctagggtggcttcagggccatgctctgatctgcacaccggcagaggaggaccctgtacccagtggctgaacgtgcgggacctcgacaggctccaaagggagagccagagagaggtattacgtctgcagcggcaactaatgctgcaacagggtaacggtggcgcctggcctgaggccggaggtcaatccgctacctgtgaagaggttcgtcgacagatgctcgcactggagagggaacttgaccagagaagaagagaatgccaggaactgggcacccaagccgcgcccgcgaggagaaggggcgaggaggctgagacccagctgcaggcagcattgctgaagaacgcttggctcgcagaagaaaatggaaggctgcaggctaaaaccgactgggttcggaaagttgaagccgaaaattccgaggtgcgaggccacctaggtcgtgcatgtcaggaacgagatgcctcagggctgattgcggagcagcttctgcagcaggcagcacgaggacaggatcggcagcagcaactgcagagagacccacagaaagccctttgcgacctacacccctcctggaaggagattcaggctctgcagtgcaggccaggccacccccccgaacagccatgggaaacctcacagatgcctgagtcccaggtgaaggggtcacggagacctaaatttcacgctagaccagaagactacgccgtttctcagcccaacagggatatccaggaaaagcgggaggcgagtctggaggagagtcctgtggccctgggtgagtctgcaagcgtgccccaggtttcggaaaccgttcccgcatcccagcctttgagcaagaagacctccagccagagcaattctagtagtgagggatccatgtgggccactgtcccctcaagtcccacactagatcgtgatactgcgagcgaagtggatgacctagaacctgactccgtctcgctagccctggaaatgggaggcagcgctgcgcccgccgcgcctaaattaaagatcttcatggcacagtataactacaatccattcgaaggtcccaacgaccatcccgagggggaacttcctctgacagcgggagattacatttacatcttcggagatatggacgaggacgggttttacgaaggcgagctcgatgacggcagacgaggccttgtgccctccaacttcgttgagcagattcctgattcatatatcccaggatgtcttccagcgaaaagccccgatctgggtcctagccagttgcctgccggtcaggacgaggccctggaggaagacagcttattatccggaaaggcccagggcatggtggaccgagggctttgccagatggttagagtcggcagtaagaccgaggttgcaactgagatcctggacacaaagaccgaggcgtgtcagctggggctgcttcagtcgatgggcaagcaaggactgtcccggccattactgggcaccaaaggggtcctcaggatggcgcctatgcagctgcacctgcagaatgtgacagcgaccagcgccaacataacctgggtttactcctcccaccgtcatcctcatgtggtttacctagatgacagagagcacgcactaacgccagcaggggtgtcatgctacactttccaaggcctttgccccggcactcattacagagtgcgtgtggaggtaagactgccttgggatctgcttcaagtatattgggggacaatgtcgtccacggtgacctttgatacgctgctcgccggtccgccatatcctcctctggacgtgctcgtcgaacgtcatgcctcccccggagtgttagttgtctcgtggctgcctgttaccattgacagcgcaggctcctcaaatggcgtgcaagtcacaggatacgctgtatatgcagatggccttaaggtctgtgaagtagctgatgctaccgccggaagtaccgtactggagttttcccagctccaggtacctttgacctggcagaaagtgtctgtcagaacaatgtccctttgcggagagagcctggactccgtgccagctcagattccagaggatttctttatgtgccaccgttggcctgagactccgcccttcagctatacctgtggcgatccaagcacttaccgagtaacctttccagtttgcccccagaaactgagcctggctccaccttccgccaaagcctccccccataatcccggctcttgcggtgagccacaggccaagttcctggaggcgttttttgaggaacctccccggagacagtctcctgtgagtaatttgggcagtgaaggagaatgtccatcgtcgggtgcaggctctcaggcccaggagctcgccgaggcttgggaagggtgtaggaaagatcttctgttccagaaatccccacagaatcataggcctccctcagtgagcgaccagcctggcgagaaggaaaattgttatcagcatatgggcacttcaaagagccccgctccaggatttatccacttacggacagaatgtggccctcggaaagaaccctgtcaggaaaaagctgcacttgaacgcgtgcttcgtcaaaagcaagacgctcagggcttcacccctccacagttaggtgcctctcagcagtatgcttccgacttccataacgtactgaaggaggaacaagaggctctttgcctcgatctgcgcggcaccgaacgccgcgaagagcgaagagaacctgagccccactctcgtcaggggcaagctcttggcgtcaagagaggatgtcagctgcatgagccatcgagtgcactttgccctgcacctagcgctaaggttatcaagatgccaagaggcgggccgcagcaactggggacaggcgccaatactcccgcacgcgtattcgtcgccctgagtgactacaatccactggtaatgagcgcaaacctgaaagcagcagaggaggaactcgtgttccagaaaaggcagctactgcgcgtgtggggctcacaggacacccacgatttctacctgagcgagtgtaacagacaggtgggaaacattccaggtagacttgtggctgagatggaggtggggacggaacagactgaccgtcgttggcggagcccggcccaaggccatctgccttctgtggcccacctcgaggacttccagggcctaattataccccaggggtcttcactagtgttacaaggcaacagtaagcggctcccactgtggaccccaaagattatgatcgccgccctggactatgatcctggagacggccagatgggaggtcaaggaaaaggaagactggctctccgggctggcgatgtcgtaatggtatacggtccaatggacgaccagggcttctactatggggaactgggtgggcatcgaggtctcgtgccggcgcaccttttggaccatatgagcctccatggccattag

SEQ ID NO: 203795 - DNA, 4920 bp, synthetic construct
  misc_feature 1..4920: note = Description of Artificial Sequence: Synthetic coding sequence
  source 1..4920: mol_type = other DNA
atggccaaggacagccccagccccctgggcgccagccccaagaagcctggttgctcctctcccgcagctgccgtgctggagaatcagcggcgtgaactcgagaaattacgcgcagagctggaggcagaaagggcaggctggagggcagaacgccgccgctttgcggcacgggagcgccagctcagagaggaggccgagcgcgagagacgccagctggctgacagactaaggagtaaatgggaagctcaaaggtctagagagcttagacaactgcaggaggagatgcagcgagagagagaggccgagattagacagctgctccggtggaaagaggccgaacaacgtcagctgcagcagctgctacacagggagcgcgacggggttgtcagacaggcccgtgaattacagcgccagctcgccgaggagctggtcaacagaggccactgttcccgacctggagccagcgaggtatcagcagcacaatgccgatgtagattacaagaggtactcgcccaactacggtggcagaccgacggcgaacaggccgcaagaattcgctacctgcaggcagctctcgaggtggagcgtcaacttttcctgaagtacatcctcgctcactttaggggacaccctgccctgtcagggtctcccgacccacaggcagtccactcattagaagagcccttgcctcagacttcatctggcagctgtcatgctcccaagccagcttgtcagctcggaagtctcgattccctgagcgctgaggttggagtacgcagccgctcactgggccttgtcagcagcgcatgctctagtagtcccgacgggctcctctccacccacgcctcttctctcgactgttttgcaccggcctgcagccggagtctagattccactaggtctctccctaaggcctctaaatctgaggagcgtccatccagtcctgatacttcaactcccggatctaggcgcctgtctccacctcccagccctctgcctcccccaccgcctccaagtgcacatcgaaaactctccaatcctcgaggtggggaaggcagcgagagtcagccttgcgaggtgttaacaccatcaccccccggtctggggcatcatgaactgataaaactgaattggctcctggcgaaagctctatgggtgctagcccgtcgatgctatacactccaagaggaaaacaaacagctgagaagggcaggctgcccttatcaagccgacgaaaaagtgaaaagacttaaggtgaagagagcggagttgacaggcctggctcggcgtctggccgatagagcccgcgagttgcaggagactaacctgagagccgtgagtgctccgattccaggtgagtcatgtgctggccttgaactgtgtcaggtttttgcgagacaacgagcccgtgatctctccgagcaggccagcgcccctttagcgaaggacaagcaaattgaggagctgcgccaggaatgtcacttactgcaggctcgcgtggcctccggcccttgcagcgacttgcacaccggccgaggcgggccttgtacacaatggctgaacgtgagggacctggacagactgcaacgtgagtcccagagggaagtgctgcgcttgcagcggcagctcatgctgcagcaggggaacggcggggcttggccagaggccggaggccagtccgccacatgcgaagaagtcagacgccaaatgctcgctctggaaagagaactggatcagagacggcgggagtgccaagaactcggcacccaagccgctcctgcacgtcggcgcggggaagaagcagagacacaattgcaggctgccctgctgaagaatgcctggctggccgaggaaaacggcaggcttcaggcgaaaactgattgggtgcggaaagttgaggctgagaactcggaagtccgggggcacctcggacgcgcctgccaggagcgcgacgcatccggcctgatcgcagagcagttgctacaacaagccgccaggggccaggatcggcagcaacaattgcagagagatccccagaaggctctgtgtgatctccatcccagctggaaagagatacaggccctccaatgtcgtcctggacatcctcctgaacagccttgggaaacttcccagatgccagaatcccaagtcaaaggctccaggcggccaaaatttcacgcgcggcccgaagattatgcagtgtcccaacctaaccgggatatccaggaaaagagggaagcgtctctagaagagtctccagtcgcgctgggtgaatctgcttccgtgccacaggtgagcgagaccgttcccgctagccagcccctcagcaaaaagacatctagtcaatctaactcatcttcagaaggcagcatgtgggctacagtgccttccagtccaaccctggacagggacactgcatccgaagtggatgatcttgaacctgactccgtaagcctggccctcgagatgggaggaagcgccgctccagccgctcccaagctaaaaatttttatggcgcagtacaattataacccgttcgagggcccaaatgaccaccctgaaggtgagcttccactcactgctggtgattatatctacattttcggcgacatggacgaagatggattttatgaaggggagctcgacgacggcaggcggggactagtccccagcaacttcgtcgagcagatccctgattcctatattcctggctgcctgcccgcgaagtcacccgaccttggtccgtcacagttgcctgccggacaagacgaggcgttggaggaagacagcctgttatctggaaaggcacaggggatggtggacagaggattgtgccagatggtccgggtcgggagcaagacagaggtggccaccgagatcctggacactaaaaccgaagcgtgtcagctaggcttactgcagtccatggggaaacaaggacttagcagaccacttcttggcactaaaggcgtcttaaggatggcccccatgcagttacacctccagaatgttacagccactagcgctaatattacatgggtctattccagtcaccggcacccccacgttgtgtatctggatgaccgtgagcacgctttaacccctgccggagtgtcatgctacacctttcagggactctgtcccgggacgcactaccgtgtccgtgttgaagtccgattaccatgggatctcctccaagtgtactggggcacaatgtccagtacagttacattcgacaccctgcttgccgggcctccgtatccccctctggacgttctcgtggagaggcacgccagtccaggagtgcttgtggtttcctggttacccgtcaccatagacagtgctgggagtagtaatggcgtgcaggtcacgggctatgcagtctatgccgatggactgaaagtctgtgaggtagcggatgctaccgccgggtcaactgtcttagaattttctcagctgcaagtcccattgacgtggcagaaagtgtccgtgcggaccatgtcgttgtgtggcgagtctctcgactccgttcctgctcagatcccagaagactttttcatgtgtcacaggtggccagagaccccacccttctcttatacgtgcggtgaccccagtacctacagagtgacatttcccgtttgtccccagaagctcagcctggcccccccctccgccaaagcctccccccacaatcctggtagttgcggggagccccaggctaaatttcttgaagccttctttgaagaacctccacggcgccagtctcctgtgtcaaacctgggatccgagggtgaatgccctagctctggggccgggtcccaagcccaagagcttgccgaagcctgggaagggtgtcggaaagatttactctttcaaaaatctcctcaaaatcacaggcccccatcagtctccgaccagcctggggaaaaagaaaactgctatcagcatatggggactagcaaatcccctgctcctgggtttatccacctgcgcactgagtgcggtcctcgaaaggagccatgtcaggagaaggccgcactcgagagggtcctgaggcaaaaacaggatgcccagggattcactccaccacaactgggagcgtcccagcaatatgcctctgacttccacaacgtgctaaaagaggagcaggaggcgctttgtcttgatctcagaggcacggagcgacgggaagagagacgcgagccagagccccattcaagacagggccaagccctgggcgtgaaaagaggctgtcaactccacgagccatcgtccgcactgtgtcctgcaccgtctgccaaggtcataaagatgccacgcggcggaccacaacagctgggaaccggcgccaataccccagcgagggttttcgtggccctgagcgactacaatcctcttgttatgagcgccaacctgaaggctgctgaagaagaactggtattccagaaaaggcagctgctccgggtctggggctcccaggatacccacgacttctatctttctgaatgcaatcggcaagtgggcaacattcctggccgccttgttgctgaaatggaagtgggcacagaacagactgatagaagatggagatcccccgcccaggggcacttaccgtccgtggcccacttggaggatttccagggcctcatcatcccgcagggcagtagcctagtgcttcaagggaattccaagaggttgccattgtggacacccaaaattatgatcgcggctctggattacgacccaggtgatggccagatgggtggccaaggcaagggccggctggccctaagagcaggcgatgtggtgatggtctacggtcccatggacgaccaaggattctactacggagaactgggaggccacagaggcctggtgcctgcgcatcttttggatcacatgtcgctccacggccattag

SEQ ID NO: 203796 - DNA, 3402 bp, synthetic construct
  misc_feature 1..3402: note = Description of Artificial Sequence: Synthetic coding sequence
  source 1..3402: mol_type = other DNA
atgcccgtgcaggccccccagtggaccgacttcctgagctgccccatctgtacacagacttttgatgagacaattcgcaagcctatctccctaggatgcggccacaccgtgtgtaagatgtgtctgaacaagctccaccggaaagcttgcccattcgatcagaccactatcaataccgacattgaacttctcccggtgaatagcgctctccttcaactggtaggcgcccaggtccccgagcagcaacccatcactctatgctccggtgtcgaagacactaagcattatgaagaggctaaaaaatgtgtggaagagctcgctttgtacctcaagccactatcctctgcccgcggagtgggccttaattcaaccactcagagcgtactgtcacgcccaatgcagaggaagcttgtgaccctggtccactgccagctggtagaggaagagggcagaatccgcgcgatgagagctgctcggtccttgggcgaaagaactgtgacggagctcattctgcagcatcagaacccgcagcagctctctagtaacctctgggccgcggtcagagcccgaggctgccaatttctcgggccggccatgcaggaggaagcgctgaagctggtgcttctcgcactggaagacggatcagccctgtctcgcaaagtcctggttctctttgttgtgcagcgactggagccccggttcccacaagcctctaagacatcaatcggccacgtggttcagctgctgtaccgcgcaagctgttttaaggtaaccaaaagggacgaggattccagtctgatgcagctcaaggaagaattccggacctacgaagctctgagaagagagcacgactcccaaattgttcagatcgccatggaggcaggcctgaggatcgccccagatcaatggagttctttgctatatggggatcaaagtcacaaatcacatatgcagtccattatcgacaagttgcaaacacccgcaagtttcgcgcagagcgttcaggaactgaccatagcgctccaacgcaccggtgatcctgctaatttaaataggctccggccacacctggagctgctagctaacatcgatccaagcccagacgccccacccccaacttgggaacagctggaaaacggtttagtggcagtgaggactgtggtgcatggtctggtggactatatccagaatcatagcaagaagggcgccgatcaacagcagccaccgcagcactcaaagtacaagacctacatgtgcagagatatgaagcagaggggtggatgcccacggggagcttcgtgtaccttcgctcattcccaggaggagttggagaagttcagaaaaatgaataagcgactcgtcccaagacgacctcttagtgcaagcttagggcagttaaacgaggtggggctgccctctgcagccatcctaccagatgagggagctgtcgacctccccagtcgcaaacctccagcactgcccaacggaatcgtaagtaccggaaacacagttactcagctgatcccccgtggaactgatccctcatacgactcctctttgaaacccggtaagatcgatcatctgagctcatctgctcccggaagtccccccgatctcttggaatccgtgcccaaatccatctccgccctgccagtgaatccacattcaattccgccacgagggccagcagacctgccccctatgcctgttacaaaacccctgcagatggtgcctaggggcagtcagttgtacccagctcagcagactgacgtttactaccaggaccctaggggcgctgcaccgcctttcgaacctgccccctatcaacaaggtatgtattatacgccaccacctcaatgtgtgtcccggttcgtgcggcctccacctagcgctcccgagcccgctcccccctatctggatcactatcctccttacttgcaagagagagtagtgaattcccagtacggtacacaaccccagcagtatcctcctatctaccctagccactatgacgggagacgggtctatccagctcccagctatacccgcgaagagatctttagggaaagccctatccccatagaaattccgcctgccgcggttccaagttatgtacccgaaagcagagagcggtaccagcagatcgaaagctactatcctgtggcgcctcacccaactcaaattcggccctcctatctgcgggaacccccctactcaagacttccccctccgccacagccacatccctcactggatgaattgcaccgcaggcggaaagaaattatggcccaacttgaagaaaggaaggtaatctctccaccaccttttgccccatcgcccactcttcctcccacctttcacccggaagaatttttagatgaggaccttaaagtggcgggcaagtataagggcaatgattacagtcagtacagtccttggtcctgtgataccatcggcagttacatcggaactaaagacgcaaagcccaaagacgtggtggctgccggctcagtagaaatgatgaacgtggagtccaagggaatgagggatcaacgcctggacttgcagaggcgggccgcggaaacgtctgacgacgacctcatccctttcggggatagacccaccgtgtcccgcttcggagctatatcacggacatcaaaaaccatttaccagggggccggacccatgcaagccatggcccctcagggcgcacccactaagagcatcaatatcagcgattacagtccatacggcacccatggaggctggggcgctagcccgtacagcccacaccagaacattccctctcaggggcattttagtgagagggagcgcatctcaatgtcagaagtggccagtcacggcaaacctttgccgtctgcggagagagaacagctgaggttagagctccagcaacttaaccaccaaatttcgcagcagacgcagctgcggggactggaggcagtgtctaatcgcctggtgcttcagcgcgaagctaacacattggctggacaaagccaaccacctccacctccaccaccaaagtggccgggcatgatttccagcgagcagctgtcactggagctccaccaggtcgagcgggagattggaaaacgcactcgagaattgtccatggaaaaccagtgttctttggatatgaaatccaaattaaacacttcaaaacaagcggagaacggtcagcccgaacctcagaacaaggtacctgccgaggacttgacactgacatttagcgatgttcctaatggatccgcccttacacaggaaaacatctcacttttatcaaacaaaacttcatcattaaacctgtccgaggaccccgaaggtggcggtgacaacaatgactcacaacggtccggcgtgaccccatcaagtgcgccttag

SEQ ID NO: 203797 - DNA, 3378 bp, synthetic construct
  misc_feature 1..3378: note = Description of Artificial Sequence: Synthetic coding sequence
  source 1..3378: mol_type = other DNA
atgcccgtgcaggccccccagtggaccgacttcctgagctgccccatctgtacccagaccttcgacgaaacaattaggaagccaatctcattggggtgtggacatacagtgtgcaagatgtgtctcaacaaacttcaccgcaaagcatgtccatttgaccagactaccatcaacacagacattgagctcctccctgtaaactcagccctcttgcagttagtgggagctcaggtccctgagcagcaacctattactctctgctccggggttgaggatacgaaacactacgaggaagctaaaaaatgcgtggaggagctggccctctatttaaagccactttcctccgccagaggcgttgggttaaattccacgacacagagtgttctttcacgcccgatgcaaagaaagctggttactttagttcactgccaactggtggaagaagaaggtaggatccgcgcaatgcgcgcggcaagaagcctgggtgagaggactgttacagagcttatacttcagcaccaaaacccccagcagcttagcagtaacctatgggccgcggtgcgagctcgagggtgccagttcctggggcctgccatgcaggaggaggcactgaagctagtgttgctggccttggaggacgggagcgcactctctagaaaggtactggtgctctttgttgtccaaagactcgaaccccgattcccccaagctagcaagactagcatcggacatgtggtccaacttttatacagagcatcctgtttcaaggtgactaaaagggacgaagacagctccctgatgcagcttaaggaagaattcaggacatacgaggccttgaggcgggaacatgatagtcagattgttcaaatcgccatggaagccggcttgcggattgctccagaccagtggtccagcctgttatacggagatcagtcccacaagagtcatatgcagtctataatcgataagctgcagactcccgctagctttgcccaaagcgtgcaggagctcacaatcgcacttcagcgcactggggatccagcaaacctgaaccggctgcggcctcacctcgagcttctggccaatatcgacccctctcctgacgcccccccacctacctgggaacagctggagaacggtctcgtcgcagtgcggactgtagtccacggcctggttgactatattcagaaccacagtaagaaaggcgccgaccagcagcagccaccccagcacagtaaatataaaacatatatgtgccgggacatgaagcagaggggggggtgcccacgcggggcgtcctgtactttcgcccacagccaggaagagctcgagaaattccggaagatgaataaacggctcgtaccgcggcggcccctgtccgccagtttggggcaattgaatgaggtcggactgccaagtgctgccattttgccggacgagggagccgttgacctcccgtccaggaagcccccggccctgccaaatggtatcgtgagcaccggcaacacagttacacagttgataccccggggaacagacccctcctacgattcatcgctcaaaccaggaaaaatcgatcatttatcaagctcagccccaggctcccctcctgatctgcttgagtccgtccccaagtccatttccgcactacccgtcaatccccacagcatcccccctcgagggccggctgacctcccacccatgcctgtcacgaaaccactacagatggtacccaggggcagccagctctaccctgcccagcaaacggacgtgtattaccaggatccgcggggcgccgccccacccttcgagccagcaccataccagcaagggatgtactacactccaccacctcagtgtgtgagtcgcttcgttcgccccccgccctcagcaccagagcctgctccaccatacctcgatcattatcccccctatctccaggagcgagtcgttaactcccagtacggtactcagcctcagcagtacccaccaatataccccagccactatgatggccggagagtgtacccagccccaagctacacacgcgaagaaattttccgagagagtcctataccgatcgagattccgcctgcagctgtgccatcttacgtcccagagagcagggagcgatatcagcaaatcgaaagctactatcccgttgctcctcatcctacgcagattcgcccatcatatttgagggaaccgccatactctcgacttcccccgcccccccagccccatccctctctggatgagctacatagaagacgtaaggaaatcatggcacagctcgaagagcggaaggtgatatcacctcctccttttgccccatcccccaccctcccccctacgtttcaccccgaggaattcctcgatgaggacctcaaggttgccggtaagtataaggggaacgactacagccagtactccccctggtcatgcgatactattgggagttacatcggtacaaaggatgcaaagcccaaagatgtggttgcggctggcagcgtggagatgatgaacgtagagagcaagggcatgagggatcagaggctggaccttcaacggcgtgccgccgagaccagcgacgatgatctgatcccatttggggacagaccaacagtgagccggtttggtgccatctctaggaccagcaaaactatatatcagggagctgggcctatgcaagccatggccccccagggagcgccgaccaagagcatcaatatttccgactatagcccctatgggactcacggcggctggggcgcctccccttactcgcctcaccagaatattccctcccagggtcatttctctgagcgggaaaggatctcaatgtctgaagtagcctcgcacggcaagccgctcccctctgctgagcgcgagcaattgagattagaactgcagcaactgaatcaccaaatctcacagcagacccagctgcgtggactcgaaagggaagctaataccttagcaggacagtcccagccccctccccccccccccccgaagtggcctggcatgatcagttcagaacagctctctctcgaactgcatcaggtggagagggaaataggaaagagaacccgggaattgtctatggagaaccagtgctcactggacatgaaatctaagctcaacactagtaagcaagcagaaaacggccagcctgagccccagaacaaagtgcctgcagaagacctgacccttactttttcgtccgacgtgcctaacggaagcgcacttacccaggaaaacatatccctgctgtctaataagaccagctccctcaatctgtcggaggatcctgaaggaggcggagacaataatgactctcagcgaagtggcgtgacaccaagtagcgcaccatag

SEQ ID NO: 203798 - DNA, 3402 bp, synthetic construct
  misc_feature 1..3402: note = Description of Artificial Sequence: Synthetic coding sequence
  source 1..3402: mol_type = other DNA
atgcccgtgcaggccccccagtggaccgacttcctgagctgccccatctgcacgcaaaccttcgatgagactatcaggaagccaataagcctaggatgtgggcacactgtgtgtaagatgtgtctgaataaactgcaccgaaaggcttgtcccttcgaccagacgacgatcaacacagatattgagctgttgccagtgaacagcgccctgctgcagttagtgggagcacaggtcccagaacagcagccaatcacactctgtagtggagtcgaggataccaaacactatgaagaggcaaaaaaatgtgtcgaagagctggctttatacctcaaaccactaagctccgctagaggcgttggtctgaacagcactactcagtctgtcttaagtcgtccgatgcagcggaagctggttacgctggtacactgtcaacttgtcgaggaggagggccggatccgcgccatgcgcgcagcccgctcattaggcgagagaaccgttaccgagcttatccttcagcatcagaatcctcagcagttgagttcaaacctgtgggccgctgtacgagcacgtggctgccagttcctaggcccggctatgcaagaagaagcgttgaaattggtcttgctcgcactcgaggatggctccgcactctctagaaaagttctggtcctttttgtagtacagcggctcgagccaagatttcctcaggcctccaagacatcaatcgggcatgtcgtccagttgctgtaccgtgcctcgtgcttcaaggtaacaaaaagggacgaagactccagcctcatgcagctgaaggaagagtttaggacatacgaggctcttcggcgggagcacgacagccagattgtccagattgccatggaggcaggcctgcggatcgcccccgaccaatggtcttcccttctgtacggcgaccagtctcacaagtcccacatgcagagtatcattgacaagttgcagactccagcctccttcgcccaaagtgtgcaagaactaactattgctttacaacgaacaggtgatcctgcgaatctgaatcgcctacgaccccatctggagctgctggcgaacattgacccttctcctgacgcacctccaccaacgtgggagcagcttgaaaacggcctggttgccgtcaggaccgtggtgcatggcctggttgattacatccagaatcactcaaagaagggcgcggaccagcagcagcccccacagcactctaagtataaaacatatatgtgtcgcgatatgaagcagcgcgggggctgtccccggggggcctcctgcaccttcgcccactcacaggaggagctggaaaagttcaggaagatgaacaagcggttagtgccccgccgcccactgtccgcctctcttgggcagctcaacgaggtgggcctcccgtcagccgcaatcctacctgacgagggtgctgtggacttaccctcccgaaagcccccagcgctcccaaacgggattgtaagtactggaaacacagtgactcagcttattccaagaggtacagacccaagctatgacagctccctcaaaccagggaaaatcgatcacctgagttccagtgctccgggcagcccacccgacctgctagaaagcgtgcccaaaagcattagtgcccttccagtaaacccacactcaataccccctaggggccctgccgatcttcctcctatgcctgtaacaaagcccttgcaaatggtgccccggggatcccagctttaccccgcccaacagactgatgtgtattaccaggacccccggggcgcagcaccgcccttcgagccagcgccttaccagcagggcatgtactatactccccctccccagtgcgtgtcgcgattcgttagaccccccccttcagcacctgagccagcacctccatatctagatcactacccgccttacctgcaggaacgagtcgtcaattcacagtacggaacgcagcctcagcagtacccaccaatctacccaagtcattacgatgggcgaagggtgtatcccgctcccagttacacgcgtgaggagatttttagagaatcccccatcccaatcgagattccccccgcagccgtgccttcctatgttccagaatcaagagagcgttaccagcaaatcgagagctactacccagtcgcgccacaccccacgcagatccgaccctcctatctgagagagcctccctattccagacttcctcctcctccccagccgcatccgagcctcgatgaactgcaccgcaggcggaaagagatcatggctcagctggaggaacgcaaagtgatcagcccacccccatttgccccatctcctactttgcctcctacatttcaccctgaggagtttctggacgaagatctgaaggtggctggtaagtacaagggcaacgactactctcagtactcgccctggagctgcgacacaattggttcctacatcggtactaaggacgccaaaccaaaagacgtggttgccgccggctcagtcgaaatgatgaacgtagaaagcaaaggaatgagggaccagagactggatctccagagacgagctgcagaaacctctgatgacgatctgattcctttcggggatagaccaacagtgtctcggtttggggctatctctcgaacatcaaagacaatctatcagggcgccgggccaatgcaggccatggcaccgcagggcgctcccacaaagagtatcaatatcagtgattacagtccgtacggcacacacggaggctggggggcgagtccctattcgccgcaccaaaatataccctctcagggacacttctctgagcgtgagcgcatctctatgtctgaagtcgccagccacggaaaaccgctcccgagcgccgagagagagcagctcaggctagagcttcaacagttgaaccaccaaatttctcagcaaacacaactgcggggtctggaagcagtcagcaataggttggtcctccagagggaagccaacacgctggccggccagagtcagcctcccccacccccgcctcctaaatggcctgggatgattagtagtgagcagttaagtttggagctgcaccaggttgagagggaaattggtaagcggactcgagagctctcaatggagaaccagtgtagcctggacatgaagtccaagctaaatacttcaaagcaggccgagaacggccagccggaaccccagaacaaggtgccagcagaggatctcactctgacatttagcgatgttcctaatgggtccgctctcacacaggagaatatctcacttctttccaacaaaacatcatcccttaacctatccgaagatcctgaaggaggcggcgacaataatgattctcaaagaagcggcgtgacgccatcctccgctccatag

SEQ ID NO: 203799 - DNA, 984 bp, synthetic construct
  misc_feature 1..984: note = Description of Artificial Sequence: Synthetic coding sequence
  source 1..984: mol_type = other DNA
atgtgggccacctgctgcaactggttctgcctggacggccagcccgaagaggtacctcccccacaaggagctagaatgcaggcctattccaatccgggttatagtagttttccctctccaactggtctcgaaccgagctgtaaatcttgcggggcacacttcgccaataccgctaggaagcagacttgcctggactgcaagaagaatttctgtatgacctgtagttctcaggtgggaaatggaccccggttgtgtctcctgtgtcaaagattccgggccacagcctttcagcgcgaggagctcatgaaaatgaaggttaaagatctccgcgactacctgtctttgcacgacattagtaccgagatgtgtagggaaaaggaggaattggtgcttctcgtgctgggccagcagcctgtgatttcgcaagaagatagaacccgggctagcactctgtctcctgatttccccgaacagcaagcgtttctgacccagcctcactcatccatggtccctccaacgagtcccaacctgccgtcaagtagcgcccaagctacttccgtgccccctgcccaggtgcaggaaaatcagcagagtatcgatagtgaagactccttcgtacccgggaggcgggcatctctgtccgacctgactgacctggaagatattgaagggttaaccgtccgtcagctgaaggaaatcctggccaggaactttgtcaattataagggttgttgtgaaaagtgggagctgatggaacgggtgacacgactgtacaaggaccagaagggcctgcagcatctagggggggcggttccaagcgggctggaagagaacctctgcaagatatgcatggactcacccattgattgtgtcctgctggagtgtgggcacatggtcacatgtactaaatgtgggaagcgcatgaatgaatgcccaatttgtaggcagtacgtcattcgggccgtacacgtgttcaggtcttag

SEQ ID NO: 203800 - DNA, 1092 bp, synthetic construct
  misc_feature 1..1092: note = Description of Artificial Sequence: Synthetic coding sequence
  source 1..1092: mol_type = other DNA
atgtgggccacctgctgcaactggttctgcctggacggccagcccgaggaggtgcccccgccccagggggcgcgaatgcaggcctattccaatccagggtattcatccttcccatcacccacggggttagaacccagctgcaagtcttgcggtgctcacttcgcaaacactgctagaaaacagacctgcctggattgcaagaaaaacttctgtatgacctgttcttcgcaggtgggcaatggaccgcgactgtgtctgttatgtcaaaggtttcgcgccaccgccttccagagagaggagcttatgaagatgaaggtgaaagacctcagggactacctctcattgcacgatatctcgactgagatgtgtcgcgagaaagaggagctcgttctgcttgtgctggggcagcagccggtcatcagtcaggaggataggactcgtgcttccaccctaagcccagacttccccgagcagcaggcattcctgacccagcctcattcttccatggtgccacctacttcgccaaacctgccatcttcaagcgctcaggcaacttccgtgccgccggcccaagtgcaagagaaccagcaagctaatggacacgtaagccaggatcaagaggagcctgtttatctggaatcagttgctcgggtgccagctgaggacgaaacacagagcattgactccgaagattcgtttgtccccggccgtcgggcatcattgtcagacctgacagatcttgaggatattgagggtttgacagttcggcaacttaaggagattctcgcacgtaactttgtaaactacaaaggctgttgtgaaaagtgggagcttatggagcgagtgacgcgcctgtacaaagatcagaagggccttcagcacctggtgtctggagccgaagaccagaatggcggagcagtgccaagtggtctagaggagaatctgtgcaagatctgcatggacagccccattgactgtgtgttactggagtgtgggcatatggtgacatgtaccaagtgtggaaagcgcatgaatgagtgtccaatatgcaggcagtacgtgatcagggctgtccacgtcttccgatcctag

SEQ ID NO: 203801 - DNA, 1068 bp, synthetic construct
  misc_feature 1..1068: note = Description of Artificial Sequence: Synthetic coding sequence
  source 1..1068: mol_type = other DNA
atgtgggccacctgctgcaactggttctgcctggacggccagcccgaagaagttcctccacctcagggggcacgaatgcaggcttattctaacccaggctattcaagtttcccttcgccaactggccttgagccgtcatgcaagtcttgtggggctcattttgcgaatactgcacggaaacaaacatgtttggattgcaagaaaaatttttgtatgacgtgctccagtcaggtgggtaatggccctcgcttgtgtttactctgtcaaagatttagggccacagctttccaaagagaggaactgatgaagatgaaagtcaaagacctacgtgactatctgtccctccacgatatcagcacggagatgtgtagagagaaagaagaactggtcctgctcgtactcggtcagcagccagtaattagccaggaagacaggaccagagcgagcacgctctccccggacttccctgagcaacaggcgttcctcacgcagccccattcgagtatggtgccaccaacttcccccaacctcccgagttcatctgctcaggctacttcagtgccgcccgcgcaggttcaagagaatcagcaggcaaatggccatgtctcccaagatcaagaggaacccgtatatctggagagtgtagcacgagttcccgccgaggacgaaacacaaagcatagattctgaagacagttttgtgccaggtcgacgagccagcctgagcgacctcaccgatttggaagatatcgaaggactgactgtgaggcagcttaaagagattctcgcacgcaactttgtcaactacaaagggtgctgcgaaaagtgggagctgatggaaagagtaactcgcctgtacaaagaccagaagggtctccagcatttaggcggagctgtcccaagcggccttgaggaaaatttatgcaaaatctgtatggactccccaatagactgcgtgttgttggaatgcgggcatatggtgacatgcaccaagtgcggaaagcgcatgaacgaatgtccgatctgcagacaatacgtgatccgtgccgtgcacgttttccggtcctag

SEQ ID NO: 203802 - DNA, 1092 bp, synthetic construct
  misc_feature 1..1092: note = Description of Artificial Sequence: Synthetic coding sequence
  source 1..1092: mol_type = other DNA
atgtgggccacctgctgcaactggttctgcctggacggccagcccgaggaagtccccccgccacagggcgctcggatgcaggcctactccaacccaggatattcttcattcccaagtcccacaggcttagagcccagttgtaagagttgcggggcacacttcgctaatacagcaagaaaacaaacctgtctcgactgtaagaagaacttttgcatgacctgttcctctcaagtgggaaacggtccccggctttgtctgttatgtcagcggtttagagccacggcatttcagagggaggagcttatgaaaatgaaagttaaggatctgcgggattatctctctctgcatgatatttctactgagatgtgccgtgaaaaagaggaacttgtgctgctggtgttgggccagcagcccgtgatatctcaggaggatagaacgcgggcctcgacgctgtctcctgatttccctgagcagcaggcattcctcacccagcctcattcctccatggtcccacccacctctccaaatctgccaagcagttccgctcaggccacgagtgtgcctcctgcccaggtccaggagaaccagcaggccaacggtcacgtcagtcaggaccaggaggaacctgtgtatttagagtcagtggctcgtgttccagctgaggacgagactcagtcgattgatagcgaagactcattcgtgccaggcaggcgcgcgtccctgtccgatcttactgacctggaagatattgagggccttactgtgaggcagcttaaagaaatcttggctcggaactttgtgaattacaaggggtgctgcgagaaatgggagttgatggagcgcgtgacgaggctatataaggaccagaaggggctacaacacttagtgagtggggctgaagatcagaatggcggggctgttccctcgggactggaagagaatctttgtaaaatatgtatggacagcccaattgattgcgttcttctcgagtgcggtcacatggtgacttgcaccaaatgcggcaaacgcatgaacgaatgtcccatctgtaggcagtatgtcatcagggccgtgcacgtgtttagaagttag

SEQ ID NO: 203803 - DNA, 816 bp, synthetic construct
  misc_feature 1..816: note = Description of Artificial Sequence: Synthetic coding sequence
  source 1..816: mol_type = other DNA
atgtgggccacctgctgcaactggttctgcctggacggccagcccgaagaggtcccaccaccccagggggcgaggatgcaagcttactccaaccctggctatagcagtttcccgtctcctaccgggttggagccttcctgtaagtcatgcggtgcgcacttcgccaacaccgcccggaaacagacctgcttggactgtaaaaagaatttctgtatgacctgttcctcccaggttggaaatggacccaggctctgccttttgtgtcagaggttcagggcaacagccttccagagagaggaacttatgaagatgaaggtaaaggatctgcgggattacctttctttacatgacatctcgacagagatgtgccgcgaaaaggaggagttagtgctgcttgtcctgggacagcaacctgttattagtcaagaggacagaactagggccagcacgctttccccagatttcccggagcagcaggccttcctgacccagccgcattccagtatggtgccccccacctccccaaacctgccctctagcagcgcgcaggcaacctccgtgcctccagctcaggtacaggagaaccagcaagcgaatggccatgtcagccaggaccaggaggagccagtctacctggaaagtgtggcccgcgtgcccgccgaagatgaaacgcagagtatcgatagcgaagacagtttcgtgcctggccgcagggccagtctgagcgaccttactgatttggaggatatcgagggcctaacagttagacagctgaaggaaatccttgcccgaaattttgttaattacaaagggtag

SEQ ID NO: 203804 - DNA, 402 bp, synthetic construct
  misc_feature 1..402: note = Description of Artificial Sequence: Synthetic coding sequence
  source 1..402: mol_type = other DNA
atgtgggccacctgctgcaactggttctgcctggacggccagcccgaggaagtgccccccccccagggggcacggatgcaggcttactctaatccaggctactcttcatttccctctcccaccggcctggaaccatcttgtaagagttgtggcgcacatttcgccaatacagcgagaaaacagacctgtttagactgtaagaaaaacttctgtatgacctgctccagccaggtgggtaacggccctagattgtgtcttctgtgtcagagatttcgcgctactgcgttccagcgcgaggagctcatgaaaatgaaggtgaaagatctgcgcgactatctgtcactacatgacatttctacggaaatgtgtagagaaaaggaagagctcgttctccttgtctag

SEQ ID NO: 203805 - DNA, 570 bp, synthetic construct
  misc_feature 1..570: note = Description of Artificial Sequence: Synthetic coding sequence
  source 1..570: mol_type = other DNA
atgtgggccacctgctgcaactggttctgcctggacggccagcccgaggaagtgccaccccctcagggcgctcgtatgcaggcctatagcaaccccggctattcttcattcccatctccaacaggactggagccttcctgcaagagctgtggggcccatttcgcgaacacagctagaaaacagacgtgtctcgactgtaaaaagaatttctgtatgacatgcagctctcaggttggcaacggacctaggctttgcctcctctgtcagcgctttcgggctacagctttccagagagaggagctgatgaagatgaaagttaaggatttgagagactacctctctctgcacgacatcagcactgaaatgtgtcgagagaaagaagaactggtgttactggtgttaggccagcaacctgtgatctcgcaggaggacagaacccgagcctctaccttgtcccccgactttcctgagcagcaggctttcttaacacagccccacagtagcatggtgccccctaccagtcccaaccttcctagtagcagcgcacaagctacttccgtgcccccatag

SEQ ID NO: 203806 - DNA, 138 bp, synthetic construct
  misc_feature 1..138: note = Description of Artificial Sequence: Synthetic coding sequence
  source 1..138: mol_type = other DNA
atgtgggccacctgctgcaactggttctgcctggacggccagcccgaggaagtgccgcccccccagggcgcgagaatgcaagcctattccaaccccggatactctagtttccccagtcccacaggcttagagccatag

SEQ ID NO: 203807 - DNA, 2124 bp, synthetic construct
  misc_feature 1..2124: note = Description of Artificial Sequence: Synthetic coding sequence
  source 1..2124: mol_type = other DNA
atgagcggcagccggcaggccggcagcggcagcgccggcaccagcccagggtcctctgccgcctccagcgtgacctctgcgagtagttcattgagttcctcaccaagcccaccaagcgtcgctgtgtccgccgcagctcttgtgtccggtggcgtggcccaagctgctggctccgggggtctgggggggccagtgcgtccagtgctggtcgcccctgccgtttccgggagcggcggaggtgccgtgagcactggcctatccagacacagctgcgcagccaggccttccgccggtgtcgggggttcttcatcatcactgggctccggatcacgtaaacgacctcttctggcacccctgtgtaacggcctgattaacagctacgaggataagagtaacgattttgtgtgtcctatctgcttcgatatgatcgaggaagcatacatgacgaaatgcggccattctttctgctacaagtgcatccatcaatccctggaagacaacaatcgctgtcccaagtgtaattatgtagtcgataacatcgaccacctgtatccaaactttctggtgaacgaattaattctgaaacagaagcagagatttgaggagaaacgctttaaacttgaccatagcaacggccaccgttggcagatttttcaggattggctgggtacagatcaggacaatctggacctcgctaacgtcaacctcatgttggaactccttgtccaaaaaaagaagcagctcgaagccgagagccatgcagctcagctgcagatcctgatggaatttctcaaggtggcccgccgtaacaagcgggaggagatgtcggggctgtattcacccgttagcgaagatagtaccgtgccccaatttgaggcaccttccccatctcactcaagtatcattgactctacagagtacagccagccacctggattctccggaagcagtcaaacaaaaaagcaaccgtggtacaactccacccttgcttcacggcggaagagactgacagcacactttgaagacctggagcagtgctatttcagtacgcgcatgtcacgtatcagcgatgactcacgcaccgccagtcaattagacgagtttcaggagtgtctatctaagttcacacgctataactccgtccggccgttggctaccctcagttatgcctctgacctgtacaatggctcttccatagtgagcagtattgagttcgaccgtgactgtgactattttgcaattgcgggtgtaacgaagaaaatcaaagtgtacgagtatgataccgtgattcaggacgccgtcgacatacattatcccgagaacgaaatgacttgcaattcaaagatcagctgcatctcgtggagcagttaccacaaaaacctgctcgcctccagcgattacgagggcactgtgattctttgggacggctttactgggcagcggagcaaggtctatcaggaacatgagaaacgctgttggtctgttgactttaacctcatggatcccaaactgctcgcgtctggcagcgacgatgcaaaagtgaagctgtggtctacaaacttagataactctgtcgcgtccattgaggcaaaagctaatgtgtgttgcgtgaaattcagtccatcttctagataccacctcgcattcggttgcgcggatcactgtgtacactattatgacttgaggaacaccaaacagcctatcatggtgtttaagggccataggaaggcagtcagttatgccaaattcgtaagcggagaggagatcgtctctgcgtctaccgattctcagcttaaattgtggaacgtgggcaagccatattgcttgagaagtttcaagggtcatatcaatgagaaaaatttcgtgggactggctagtaatggtgactacattgcatgcgggtctgaaaataattccctatatctgtattacaagggcttaagcaagactctgttaacctttaaattcgatacggtcaaatctgtgcttgacaaagaccgaaaggaggacgacaccaacgaattcgtctcggcagtgtgttggagggcgcttccagatggggagagtaatgtactgattgcggccaattcccaaggcaccattaaggtgctcgagctcgtctag

SEQ ID NO: 203808 - DNA, 1521 bp, synthetic construct
  misc_feature 1..1521: note = Description of Artificial Sequence: Synthetic coding sequence
  source 1..1521: mol_type = other DNA
atggagttcctgaaggtggcccggcggaacaagcgggagcagctggaacagatacagaaggagctctccgtccttgaggaggatatcaagcgggttgaagagatgtccggcctatattcccctgtgtccgaagactctacggttccacaatttgaggccccttctccatcccattcctctatcatcgactcaaccgagtattctcagccccctgggtttagcgggtcgtcccaagccggtgttcagtggcgctacctcgggtcactgcagcccccgccgccccgctacaagcgtttcagttgcctgacactgccaagctcctgggattacagaagactacccccccatttgaccaaaaagcaaccgtggtataattctaccctggcttcccgccgcaagaggctgactgctcacttcgaagatctcgagcaatgttatttttcaacacgcatgagccggatctctgatgacagtagaacggctagccaacttgatgaatttcaagagtgtctctcaaagtttactcggtacaacagtgtgagacccctcgccactctgtcatacgcaagtgatctttataatggaagctctatcgtttcaagtatcgaattcgacagagactgtgactattttgccatagctggcgtgaccaagaaaattaaagtgtacgagtacgatactgtgattcaggatgcggtggacatacattacccggaaaacgagatgacatgtaactcgaagatttcttgcattagctggagttcataccacaaaaatctcctggccagcagtgactatgaaggcaccgtgatcctttgggacggcttcaccgggcagcggtccaaggtgtatcaggagcacgagaagcgctgctggtctgttgacttcaatctgatggaccccaagcttctggcatcagggagtgacgatgctaaggtgaagctatggagcactaaccttgataattctgtcgccagcatagaggcaaaagctaacgtgtgctgtgtcaagtttagtcctagtagtagatatcacctggcctttgggtgtgccgatcactgcgttcactattacgatcttcggaacaccaagcagcccatcatggtgttcaagggccacaggaaggctgtgtcctatgctaaatttgtatccggagaggaaatagtttcagcaagtaccgattcccagcttaaactgtggaacgtgggtaaaccgtactgtttacgcagtttcaaaggacatattaacgagaagaacttcgtcggattggccagcaatggcgactacatcgcttgcggcagcgaaaacaattcattgtacctgtattacaaagggctgagcaagaccctgttgacgtttaaattcgatactgtgaagtcagtgcttgataaggaccgaaaggaggacgataccaatgagttcgtatctgccgtctgctggagggctttaccagatggagagtccaatgtgttgattgctgcaaactcccaaggtactattaaagttctggctcttttatag

SEQ ID NO: 203809 - DNA, 2196 bp, synthetic construct
  misc_feature 1..2196: note = Description of Artificial Sequence: Synthetic coding sequence
  source 1..2196: mol_type = other DNA
atgagcggcagccggcaggccggcagcggcagcgccggcaccagcccaggctcaagtgccgcttccagtgtcacctctgcttctagtagcctttcctcatcccccagcccgccctcagtggccgtctcagctgcagcactcgtatccggtggagtggcacaggccgccgggtccggcgggctgggcggacctgtccgcccagtgctcgtggctccagccgtgtcagggtccggtggcggcgcagtgtccaccggcctcagccggcacagttgcgcagctaggccttcagccggcgtgggtggctcttcctcttcactgggctcagggagccgcaaacgcccacttctggcccccctctgtaacggacttattaacagttatgaagacaagagtaacgacttcgtctgtccaatttgtttcgacatgatcgaggaagcttacatgaccaaatgcgggcattctttctgttacaagtgtattcaccagtctctggaggacaacaataggtgtccgaagtgtaactacgtggtggacaatatcgatcatctgtaccccaactttcttgtcaacgagctgatcctcaaacaaaagcagagattcgaggaaaagcggtttaagttggatcattcagtgtcgagcaccaatggccataggtggcagatctttcaggattggctgggtactgatcaggacaatcttgatctggcgaacgtcaatctgatgctggagctgctggttcagaaaaagaagcaactggaagcagaaagtcacgccgctcaacttcagatcctgatggaatttctcaaagtcgcgagacgaaataagcgggaacagttagagcaaatccagaaagagttgtccgttctggaggaagacattaagagggtcgaagaaatgagtggattgtatagtccggtatctgaggattccacggttccccagttcgaagccccctctccatctcatagctccatcattgattcgacagagtatagtcagccacccggcttcagtggttcctctcagactaaaaagcagccttggtacaattccaccctggcatcccggagaaagcggctcacagctcacttcgaggacctggagcagtgctacttctcgactcgaatgagcaggatctctgacgatagtcgcaccgctagccagctggatgagttccaggaatgcctcagcaagttcactagatacaattctgtacgacctctggccactctctcgtatgcatctgacttatacaacggcagctccattgtcagtagtattgagtttgaccgcgactgcgattactttgctatcgcgggggtgacgaaaaagatcaaagtttatgagtatgatacggtgatacaggacgcagtggacatccactatccggaaaatgaaatgacttgcaactctaaaatctcctgtatttcctggtcttcatatcataagaacctcttagcctccagtgattatgaaggcaccgttatcctgtgggatggctttaccgggcagaggtccaaggtataccaggaacacgaaaagagatgttggtccgtggactttaatctgatggacccaaaactgctggccagtggtagtgacgacgccaaagtaaaactttggagcacaaatctcgacaattctgtggcctccatcgaggccaaggcaaatgtgtgctgcgttaagttctccccttcttcaagatatcacctcgcatttggatgcgctgaccactgcgtacattattatgatttgcgtaatacaaaacaacccatcatggtctttaaagggcatcggaaggctgtatcctatgctaagttcgtttccggtgaggagattgtgtctgcttcgacagactctcagctcaaactgtggaatgtgggaaaaccttactgtctgaggagttttaaagggcatatcaacgaaaaaaattttgtcggactggcctctaacggggactacattgcctgtggctccgagaataattcactgtacctgtattataagggcttaagtaagaccctgctgacctttaagtttgatacggttaagtccgtgctcgacaaagaccgtaaagaggacgacactaacgaattcgtgagcgcagtatgctggcgggctctgccggacggcgaaagcaatgttttaattgccgccaattcccagggcaccattaaagtgctcgagttggtatag

SEQ ID NO: 203810 - DNA, 774 bp, synthetic construct
  misc_feature 1..774: note = Description of Artificial Sequence: Synthetic coding sequence
  source 1..774: mol_type = other DNA
atgagcggcagccggcaggccggcagcggcagcgccggcaccagcccgggaagttcagcagccagctcagtgacctccgcgagttcatctttgtccagctcaccctccccgcctagcgtggcggtgagtgcggcggctctggtgtccgggggcgtggctcaggctgctggatcaggcggacttggtgggcctgtccgtccggttcttgtggcccctgctgttagtgggtccggcggcggtgccgtgtcaaccggcctcagcaggcactcctgcgccgccaggcctagtgcaggggtaggaggcagttccagcagtctcggaagcggatcaagaaagagacccctattggccccactgtgcaacggtctcataaattcttacgaggacaaatcaaacgactttgtgtgtcccatttgttttgatatgattgaagaggcttacatgacaaagtgcggtcacagcttctgctacaaatgcatccaccagagtctggaagataacaatcggtgtcctaaatgtaactatgtagtggataatatcgatcacctgtatcccaactttcttgtcaatgagctgatcctgaagcagaagcagagattcgaggagaaacggtttaagttggaccacagcgtttcttctactaacggtcaccggtggcagatctttcaggactggctcggaaccgatcaggataaccttgacttggccaacgttaatctcatgctcgagctgctggtccagaaaaacaagaaaaagaagaaaaaaaagaagtag

SEQ ID NO: 203811 - DNA, 2325 bp, synthetic construct
  misc_feature 1..2325: note = Description of Artificial Sequence: Synthetic coding sequence
  source 1..2325: mol_type = other DNA
atggcccacgaggccatggagtacgacgtgcaggtgcagctgaaccacgccgagcagcagccggcgcctgcagggatggcttcatcgcagggaggtcccgctctccttcaacctgtccccgctgacgttgtatcaagccagggagttcctagtattcttcagccagcacccgccgaggtgatctctagccaggctacgccccccctgctgcaacctgctcctcagctgtccgttgacctgaccgaagtggaagtgttgggcgaagacacagtggaaaacatcaacccaaggacgtccgaacagcaccgtcaaggatcagacggtaatcacaccatccccgccagctctctgcactccatgacgaacttcatctctggactgcagcgcctacatggtatgttagagttcctgagaccctcctctagcaatcatagtgtcggccccatgcgcacaagacgcagagtgtccgcttcccgtcgagctagagccggggggtcacagagaaccgactccgcccgactgcgagctcctctagacgcctactttcaggtatctaggactcaaccagatctgcccgctaccacctacgacagtgagacgaggaacccggtgtcagaagagttacaggtatcgtccagcagcgatagtgacagcgactcctctgcagagtacggcggcgtggtggaccaggctgaggagtctggggcagtcatcttagaagagcagttagctggagtttctgccgagcaggaagtcacttgtatcgacggtggtaagaccctgcccaagcaaccctcaccccaaaaatccgagccactgctgccatctgcctcaatggacgaggaagagggcgacacctgcacaatatgcctggagcaatggaccaacgctggggaccaccggctgtccgcgttgaggtgcggccacttgtttggctatcgttgcataagcacttggctaaaggggcaagtgaggaaatgcccgcagtgtaacaaaaaggcaaggcatagcgatatcgtagtcctgtatgcccgaactctgcgcgccttagacaccagcgaacaagaacgcatgaagagctctctgctaaaagaacagatgttgcggaaacaggctgagctcgaatcagctcaatgccggcttcaacttcaggtgctaactgataagtgtacacgattgcagaggcgcgtgcaagatctccagaagttaacatctcaccagagtcagaacttgcaacagcctcgggggtctcaggcttgggtgctcagttgctcaccctcttctcaggggcagcacaaacacaagtaccattttcaaaaaactttcaccgtttcacaagcaggaaattgcaggatcatggcctattgtgacgccctctcctgcctggtcatctcacagccaagcccacaggcttcttttctccctgggttcggggtcaagatgctgtcaaccgccaatatgaagtccagtcagtacatcccaatgcatggaaagcagattcgcgggctcgcatttagctcctacctgcggggacttcttctctctgctagcctggataacactatcaaactgacctccctcgagaccaacacagtagtgcagacatataacgcagggcgacccgtatggagctgctgctggtgcttagatgaggctaattacatctatgcaggtctggctaacggcagtattctcgtgtatgatgtgagaaatacttccagtcacgtgcaggagctcgtggcccagaaggcgcgctgtccactggtgagcctgagctacatgccgcgcgctgccagcgcggcttttccctacggaggagtgcttgcaggtactctcgaggacgcctctttctgggaacagaagatggatttctctcactggccccacgtcctccctctcgagcctggaggctgcatcgactttcaaacagaaaacagcagccgacattgtctggtaacttacagacctgataagaaccatacaaccattcgcagcgtgctaatggagatgtcatatagactggatgatactgggaatcccatatgcagctgtcagcctgtccataccttcttcgggggtccgacttgcaaactgctgaccaaaaatgccatctttcagtctccggaaaatgacggaaacattctggtctgtaccggagacgaggccgcaaactccgccctgctctgggacgcggccagcggttctctactgcaggacctccagacggatcagccagtcctagacatttgtcccttcgaggtaaatcggaattcctacctggccacattaactgagaaaatggttcacatttacaagtgggagtag

SEQ ID NO: 203812 - DNA, 792 bp, synthetic construct
  misc_feature 1..792: note = Description of Artificial Sequence: Synthetic coding sequence
  source 1..792: mol_type = other DNA
atggcccacgaggccatggagtacgacgtgcaggtgcagctgaaccacgcagagcaacagcccgcacccgcggggatggcgagttctcaggggggacccgctctgctgcagcccgtgcctgccgatgtcgtcagctcacagggagtcccaagcattctgcagcctgcccccgctgaggtaatctcttcacaggcgacccctccccttctgcagcccgccccccagctctccgtcgatctcaccgaggtggaagtgctgggcgaggacacagtcgagaatattaatcctcggaccagtgagcaacaccgccaaggaagtgatggtaatcacacaataccagcgtccagcctgcactcaatgcccctcgaaccaggggggtgcatagattttcagactgagaattcctcacgccattgcctcgtaacctaccgccccgataagaaccacaccacaatccgttccgttttaatggagatgtcataccgcctggacgacaccggaaaccccatctgctcctgtcagcctgtgcatactttcttcggcggcccaacatgcaaacttctgaccaaaaatgccatcttccagtcacctgagaacgacggaaatattttggtttgtacaggcgacgaagccgcgaactcagccctcctctgggacgcggctagcgggtctcttctgcaggatttgcaaaccgatcagcctgtgctggacatctgccccttcgaggtgaatcgtaacagctatctcgctacacttaccgaaaagatggtacacatctacaaatgggaatag

SEQ ID NO: 203813 - DNA, 2058 bp, synthetic construct
  misc_feature 1..2058: note = Description of Artificial Sequence: Synthetic coding sequence
  source 1..2058: mol_type = other DNA
atgaaccagagccggagccggagcgacggcggcagcgaggagaccttaccccaggatcataaccatcacgaaaacgagagacgatggcagcaggaacgcctgcaccgcgaggaggcctattatcagtttattaatgaacttaatgacgaggactatcggttgatgagagaccacaacttattggggactcccggcgagataactagtgaggagctgcaacagaggttggacggcgtgaaggagcaactcgcatcccagcccgacctgcgagatggcacaaactatcgagactcggaggtaccaagagaatcatcacatgaagacagtctgttggaatggctgaacactttccgacgcaccgggaatgccacaaggagtggccagaacggcaaccagacatggagggcagtaagtcgaaccaatcccaataatggtgaattcaggttctccctagagatacatgtgaaccatgagaaccgtggattcgaaatccacggggaggattataccgacattcctttatctgactctaatagagaccacacagcaaatcgccagcaacgctcgacgtcccccgttgcccggcgcacccgcagccagactagcgtgaatttcaatgggtcaagctctaacatccctagaacacgtctggcttctcgaggtcagaaccctgccgagggctccttttccaccctcggaaggctgcgcaacggcatcggaggggctgccggcattccccgcgctaatgcctctcggaccaatttcagctctcacaccaatcagtctggtggttctgaactgaggcagcgggagggccagcgttttggcgcagcccacgtgtgggagaacggggcccggtcaaatgtgaccgtccggaacacaaatcagaggctcgagcccatccgattgagaagtacttcgaactctcggagtcgctcccctatccagcggcaaagcggaaccgtgtatcacaatagccagcgtgaatcaagacccgtgcagcagaccaccagacggtcggtgaggcggcgggggcgtacacgtgtcttcttagaacaagatcgagaacgcgaacgtagaggtacagcctacaccccattctctaatagcagactggtgtcccgcatcaccgtggaggagggggaagagtccagccgatcaagcaccgcggtgagaaggcaccccaccataaccctggatcttcaggtacgcaggattcgtcccggcgagaacagagatcgtgacagtatagccaatcgcactagatcaagagtgggtctcgcagaaaatacagttaccattgagagtaactctggcggatttcgaagaacaatttcaaggttagagagatctggcattagaacatatgtgtcgactatcactgtgcccctgaggagaatttctgagaacgagctagtggaaccttcgtccgtagcattgcgctctattttgcgccaaatcatgactggatttggtgagttgtcctcattgatggaggcagattcagagtctgaactgcaacggaatggccaacacttacccgacatgcactcagagctctcaaaccttgggactgataacaatagatcacagcatcgcgaaggctcgtcacaggaccgacaggcacagggagatagtaccgagatgcatggagagaatgagacgacccagccacacacccgtaattcagacagtagaggcggcagacagttgcggaatccgaacaatctggttgaaacggggaccctgccaattctccgactggcccacttctttctcctaaatgagtcagacgacgacgacaggattcggggcctgacaaaagagcaaatcgacaatctttccacgcgccactatgaacataattccattgactctgaactaggcaaaatttgctcggtgtgcattagtgactacgtaaccggaaataaactaagacagcttccctgcatgcacgagtttcatatccactgcattgatagatggttgtcggaaaactgcacatgccccatatgtaggcagcccgtgttgggcagcaacattgctaataatggctag

SEQ ID NO: 203814 - DNA, 2058 bp, synthetic construct
  misc_feature 1..2058: note = Description of Artificial Sequence: Synthetic coding sequence
  source 1..2058: mol_type = other DNA
atgaaccagagccggagccggagcgacggcggcagcgaggagaccctaccccaggaccacaatcaccacgaaaatgagcgccgatggcagcaggaacggctgcacagggaagaggcatactaccagttcattaatgagctgaacgatgaagattatcgcctaatgagggaccataatctgctgggaacacccggggaaatcacctccgaagagctacagcagcgcctcgatggcgttaaagaacagctggctagccagcccgatctacgtgatggaacaaattatcgggactctgaggtgccgcgcgagtcctctcacgaagactccctgctggagtggttaaatacctttcggcgtacaggtaacgccactaggtcaggtcagaatggcaatcagacgtggcgcgccgtcagcagaacaaacccaaacaacggcgagttcaggttctcacttgagattcacgtgaaccatgaaaatagaggcttcgaaattcacggcgaagactatactgatatacctctgtcagactccaatcgcgatcacaccgccaatcgtcagcagagaagcacttctcccgtggccaggcgtaccagaagtcagaccagtgtgaacttcaacgggtcttcatcaaacatcccccgcacccgactggcttctaggggccagaatccagccgaaggcagcttttctaccttagggagactccggaatggaatcggcggcgctgcgggaattcccagagcaaacgcaagccggacgaacttttcatcacacacgaaccagtccggaggctctgagctgcgacaaagagagggacaacgcttcggagcggcccacgtgtgggaaaacggagcaaggtcaaacgttaccgttcggaacaccaaccagagactggaacctatccgtttacgcagcacatctaactcccggagtaggtctcctatccagcggcagagcggaaccgtgtaccataacagtcaaagggagtcgaggccggttcaacagaccacccgacgttccgttcggcgcagaggcagaacaagagtgttcctagaacaggatagagagcgggagcggcgtggtacagcttacacgcctttcagcaatagtcgtctcgtgtcccgaatcacggtagaggaaggagaagagtcatcaagaagttcaactgccgtacgtcgccacccaactataacacttgatctgcaggtgaggcggattcgacccggtgagaatcgggatcgcgactcaattgccaatcgcacacgaagccgggtagggcttgccgagaacaccgtaacgatcgaaagcaattctggagggtttaggagaactattagccgcctcgagagaagcggaatacggacttacgtttctaccatcacggttcccctacgccggatctcagagaacgagttggtagaaccctctagcgtcgccctcaggtctatcctacgacagatcatgacagggtttggggagttatccagcttgatggaggctgactcagaaagtgaactccaacgcaacggtcagcatctccccgatatgcactcagaattatccaatctgggaacagataacaatcgtagtcagcatcgcgaaggctcatcccaagataggcaggcccagggcgactccaccgagatgcacggagagaacgaaaccactcagccacatacccgtaactcagattcgcgaggcggcaggcagttgagaaatccgaacaacctggtggagactggaacgctaccaattttgagactggcccatttttttctcttaaacgagagcgacgacgatgaccgaattcggggcctaaccaaggagcaaatcgataatctgtccacccgacattacgaacataactcgattgatagcgaacttggtaaaatatgcagcgtgtgcatttcggactatgtcactgggaataagttgagacaattaccctgtatgcatgagtttcacattcactgcatcgaccgatggctcagcgagaattgtacatgtcctatctgcaggcagcctgtgctgggctctaatatcgcaaacaacggctag

SEQ ID NO: 203815 - DNA, 2058 bp, synthetic construct
  misc_feature 1..2058: note = Description of Artificial Sequence: Synthetic coding sequence
  source 1..2058: mol_type = other DNA
atgaaccagagccggagccggagcgacggcggcagcgaggagaccctaccccaggatcataatcatcacgagaacgagaggcgatggcagcaggaaaggctgcaccgcgaggaagcatactaccagtttataaatgaactgaatgacgaagactatagacttatgcgggaccacaacctgctgggcacccccggagagatcacttcggaagagttgcagcagcggctggatggggtcaaagagcagttggcatcacagccagatctgcgggatgggacaaactacagggatagtgaggtaccgagggagagctctcatgaggattcgttactggagtggctgaacactttccgcaggacaggcaatgctactcgcagcgggcagaatggaaaccagacttggcgcgcagtgtcccgaacgaatccaaataacggcgagttccggttcagtctggaaatacacgtgaaccatgagaatcggggatttgagatccatggtgaggactacacagatatccctctgagcgacagtaatcgggaccataccgccaatagacagcagcgaagtacctcacctgtggctaggcggacacgtagtcaaacgtcggtaaacttcaatggaagctcgtccaatattccccgaacacgccttgcttctcgtggacagaatccggccgagggaagcttttctacccttggcaggcttaggaatggaattggcggagccgcagggattccccgcgccaacgcgagcagaacaaacttctcatcccacactaatcaatccggcgggtctgaactcaggcaacgcgagggtcagaggtttggtgctgcccatgtgtgggaaaatggcgctcggtctaatgtgacagtccgtaacacaaatcagaggctggagccgatccgcctccgaagcacgtccaattcgcgatcgcgcagccccatacaacggcaatcaggcactgtatatcacaactcacagagggagtctcggcctgtgcagcagaccacacgaagaagtgtacggcggaggggtcgcacccgcgtctttttggagcaggatcgggaacgagaaagaagaggaactgcttacacaccattctccaacagtcgcctggtgagcagaatcacagtggaggaaggggaggagagcagccgctcgagcaccgccgttcgacgccacccaactatcactctcgatctccaagtcaggaggattagaccaggtgagaatagagaccgggactccatagcaaacagaacccgctcacgggtgggcctcgcagaaaacacggttacgatagagtcgaattcaggaggattccgtagaacaatctccaggctggaacggtcagggattcgcacatacgtgtctaccattacagtcccattacggaggatttccgagaatgagcttgttgagccttcatccgtggccctgcgatccattctgagacagattatgactggcttcggtgagctgagcagcctgatggaggcagactcagaaagcgagcttcagaggaatggacagcacctgcctgatatgcacagcgagctgagtaatctcggcactgacaacaataggtcgcagcatcgggaggggagttcccaggataggcaggcccagggcgacagcaccgagatgcatggcgagaacgaaaccacccagccacatactcgtaattccgacagccgcgggggccggcagctgcgcaatcctaacaacctggtcgagaccggcacacttccgatactgcggcttgctcatttcttcttgcttaatgagagcgatgatgatgaccggattaggggcttgaccaaagagcagatagataacctcagcaccagacactatgagcacaattctattgatagtgagttaggaaagatttgctctgtttgcatttcggactatgtgactggcaacaagctgcgacagctcccgtgtatgcacgagtttcacatacactgcatagaccggtggctctccgagaattgtacatgtcccatttgtcgccagcccgtgctggggtccaatattgccaacaatggctag

SEQ ID NO: 203816 - DNA, 990 bp, synthetic construct
  misc_feature 1..990: note = Description of Artificial Sequence: Synthetic coding sequence
  source 1..990: mol_type = other DNA
atgcagctggaggtggacaagatgggcaccaagctgggcgagctgttagtgagcagaattacggtcgaagagggcgaagaatcttctaggtcatccaccgccgtgagaagacacccaaccattacgcttgacctacaggtccggcgcatccgcccaggcgaaaaccgagaccgcgactcaattgctaatagaaccagatcacgggtcgggctcgccgagaacacggtcactatcgaaagcaatagtggcggattccgacggaccatctcgagactcgagcgcagcggcatcagaacgtatgtcagcactattaccgtaccactgagaaggatttcagagaacgaactcgtcgagcctagctccgtcgcactccgaagtatcctgaggcaaattatgaccggattcggagaattgtcatctcttatggaagccgactctgaatccgagctgcagagaaacggtcagcacctgccagacatgcattctgagttatctaaccttggcaccgataataatcgctcacaacacagagaagggtcttcacaagaccgccaggctcaaggcgacagcacggaaatgcacggagaaaatgagaccacccagccccataccagaaattctgattcccgtgggggtcgtcagctccgaaatcccaacaatttagtggagacaggcacgctccccatcctgcgcctcgcccacttcttcctgctgaatgaaagcgacgatgatgataggattaggggcctcactaaggaacagatcgataacttaagcacgcgccactatgaacataattcaatcgatagcgaactgggcaaaatatgcagcgtctgtatctcagactatgttacaggcaataagttgaggcagctaccatgcatgcatgagttccatatccattgtatcgatcggtggctgtcggagaattgcacttgtcctatctgcagacagcccgtgctcggtagtaatatcgctaacaacggctag

SEQ ID NO: 203817 - DNA, 1221 bp, synthetic construct
  misc_feature 1..1221: note = Description of Artificial Sequence: Synthetic coding sequence
  source 1..1221: mol_type = other DNA
atgaccacccccgccaacgcccagaacgccagcaagacctgggagttatctttgtacgaactccacagaaccccacaagaggcaattatggatggcacggagattgcagtgtcacctcggtctctgcactccgaactcatgtgccctatttgcttggacatgttgaaaaataccatgacaacaaaagagtgcttacatcgattctgttctgactgcatagtgaccgcacttaggagcggtaataaggaatgtccaacctgcaggaagaagctagtaagcaaacggtctttacgtcctgacccaaacttcgacgccctgattagcaaaatttacccctctcgcgaagaatacgaggcacaccaggatcgtgttttgatccggcttagtcgactgcacaatcagcaggctctatcctccagtattgaagagggcctcagaatgcaggccatgcatagggcacagcgggtgcggaggcctatcccaggaagcgaccagactaccaccatgtcagggggtgagggtgagcccggagagggagaaggagacggagaggatgtgtcgtcagattccgctccagattccgcccccggtccagcgccaaagcggccccgcggtgggggagcagggggtagcagcgtggggactgggggaggtggcactgggggtgtgggcggaggagctggaagcgaggattcaggggaccgcggagggaccctgggtggcgggaccctcggccctccaagtcctcctggtgccccttcgccgcctgaacccggtggggagatcgagctggtctttagaccacacccgctgctcgtagaaaagggtgagtactgccaaacccggtacgtcaagacaacaggaaacgcgactgtggaccatctctcaaagtacctcgctctaagaattgcgctggagcgcaggcagcaacaggaagcaggggagccaggcggccctggaggcggtgcgagtgataccggcggtccagacggttgcggcggcgaaggtggtggcgccggtggtggagacggtcctgaggagcccgccttacccagcctggagggtgtgtcagaaaaacagtataccatttacattgcccccggggggggagcattcacgactctgaacggtagcctgactctcgaactggtgaatgagaaattttggaaggtctctcggccgctggaactgtgctacgcccctactaaggatccaaagtag

SEQ ID NO: 203818 - DNA, 1221 bp, synthetic construct
  misc_feature 1..1221: note = Description of Artificial Sequence: Synthetic coding sequence
  source 1..1221: mol_type = other DNA
atgaccacccccgccaacgcccagaacgccagcaagacctgggagctcagtctgtacgagctgcataggacaccccaagaagctatcatggatggcaccgaaatagctgtgtccccacgttctctgcattccgagcttatgtgtccgatttgccttgatatgctaaaaaacacaatgactactaaggaatgtctgcatcgcttctgcagcgactgtattgtcacagccttgagaagcgggaacaaggagtgtcccacatgccgcaaaaagctggtgagcaaacggagcctaagaccagatcccaactttgacgccctcatctccaaaatttatccatcaagagaagaatacgaggcccaccaggatagggtcctcattagacttagtagactgcataatcagcaggccttgagctctagcatagaagaaggccttcgcatgcaggccatgcaccgggcccagcgcgtccgccggccaattccgggtagtgaccaaaccaccaccatgagtgggggcgaaggggaaccaggggagggagaaggagatggggaagacgtgtcaagtgatagcgcccccgactccgccccaggccctgcccccaagcgcccgcggggcggaggggcaggaggatccagcgtcggtactggaggtggcgggaccggaggagtggggggcggcgccggctcagaagacagtggggacagaggggggactctgggggggggcactctgggcccaccatctccccccggtgccccttcgccgcctgaacccggcggtgaaattgagctggtttttagaccacatcccttgctcgttgagaaaggcgagtactgtcagacaaggtatgtgaagacaacaggtaatgctaccgtggaccacctgtctaagtatcttgctctgcgcatcgctctggagcgcaggcagcagcaggaagccggggagcccggcggccctggtgggggagcttctgacaccggtggccccgacggatgtggtggagagggaggcggagccggcggtggggatggaccagaggagcccgctctgcctagcttggagggagtgtcagaaaagcaatacaccatatacatcgctcccggagggggggcattcaccacactgaatggatcactgacgttagagctcgtgaatgagaagttctggaaggtgtcccgtccgcttgagttgtgctacgcaccaactaaagaccccaaatag

SEQ ID NO: 203819 - DNA, 1221 bp, synthetic construct
  misc_feature 1..1221: note = Description of Artificial Sequence: Synthetic coding sequence
  source 1..1221: mol_type = other DNA
atgaccacccccgccaacgcccagaacgccagcaagacctgggagcttagcctttatgaattacataggactccgcaggaggccatcatggacggaaccgaaatcgcagtaagcccccgatctctccattctgaactgatgtgcccaatttgtctggatatgttgaagaacactatgaccaccaaggagtgccttcaccggttttgcagcgactgcattgttacagcgttgaggtctggcaacaaagagtgtcccacgtgcagaaaaaagctggtatcgaaaaggagcttgaggcccgaccctaactttgatgccctgatcagcaagatttatccttctagggaggagtacgaagctcaccaggatcgagtactgatcagactgagccggctgcacaatcagcaagcgctttcgtcaagtatcgaggagggtcttaggatgcaggcaatgcaccgcgcacaacgcgtgaggcggcccatcccgggctccgatcagaccactacgatgtctggtggggagggggaaccgggcgagggtgagggcgacggtgaagacgtgagcagtgatagtgcccccgatagcgcccccgggcccgctccgaagcggcctagaggcggaggagcaggaggcagttcagtagggacagggggcggaggaaccgggggggttgggggaggcgctgggtctgaggattcaggcgatagaggcgggaccctcggaggtggcaccttgggccctccatccccaccaggggccccttcacccccagagccaggcggagagatcgagctggtcttcaggcctcatcctctgctggtcgaaaagggagaatactgccagactagatacgtgaaaacaactggaaatgcaaccgtggatcacctatccaaatatctcgccctgagaatcgctctggagcggcggcagcagcaggaagctggggaacctggggggccaggaggcggcgccagcgacaccgggggccccgatggatgcggtggggaagggggaggagccgggggcggggatgggccggaagagccagcattgccctcactggaaggggtgtctgagaaacagtacacaatctatatcgctccaggcgggggagcctttactactttgaacggctccctaaccctcgaactggtgaacgagaagttctggaaggtgagtagaccgctggaactgtgctacgctccaacaaaggatcccaaatag

SEQ ID NO: 203820 - DNA, 1221 bp, synthetic construct
  misc_feature 1..1221: note = Description of Artificial Sequence: Synthetic coding sequence
  source 1..1221: mol_type = other DNA
atgaccacccccgccaacgcccagaacgccagcaagacctgggagttaagtctttacgagctgcatcgcactccccaggaggccataatggatggaacagaaatcgctgtgagccccaggtctctgcattccgaattaatgtgcccaatatgtctggacatgctgaaaaacaccatgaccacgaaggaatgcctccatcgattctgctcggactgcattgtcaccgctctcagaagtgggaacaaagaatgccctacctgccggaaaaagctcgtgagcaagcgtagtttaaggcccgatcctaactttgatgccctaatctctaaaatttatcctagccgagaagagtatgaggcccatcaggaccgagtgcttattagattgtcacgtctacataatcagcaggctctaagtagcagtatcgaggaaggcctccggatgcaagcgatgcacagagcacagagagttaggcgcccgattcctggcagtgatcagacaacgactatgtccgggggtgaaggggagcccggtgaaggtgagggggatggcgaggacgttagctcagattcagccccagactccgccccagggccagcgcctaagcgtcctaggggaggaggggccggaggaagcagtgtcgggacaggaggcggtgggacagggggagtcggggggggggccgggtccgaggatagtggcgataggggaggcacactggggggcggtaccctggggcctccgtctccccctggcgcccccagccctccggaacccggaggtgaaatcgaactggttttcagaccacatcccctgttggtggagaagggcgaatactgtcaaacccgatatgtcaaaacaaccgggaatgctaccgtagaccatttgtccaagtatctggcgctccggattgcccttgaacgaaggcagcagcaggaggccggcgaacccggcggccccgggggcggtgcctcagacacagggggacccgacggatgtggaggcgaaggtggtggggccggaggcggagacggtcccgaggagcccgccctccctagtctcgagggagtcagcgagaagcagtacaccatttatattgccccgggtggcggcgctttcaccactcttaatggctcacttacactcgagctcgtgaacgagaagttctggaaagtgtctagacctctcgagctgtgttatgcgccaacaaaagatcccaagtag

SEQ ID NO: 203821 - DNA, 1221 bp, synthetic construct
  misc_feature 1..1221: note = Description of Artificial Sequence: Synthetic coding sequence
  source 1..1221: mol_type = other DNA
atgaccacccccgccaacgcccagaacgccagcaagacctgggagctgagtttgtatgaactccaccgtacaccccaggaggcaataatggacggcacggaaatagctgtgtcccctaggtctctgcattccgaactgatgtgtccaatatgcttggacatgttaaaaaatacaatgaccaccaaggagtgtctgcacaggttttgtagtgactgtatcgtgaccgctctaaggagtggaaacaaggaatgtccgacatgtcgcaagaaacttgtttcaaagcgcagcttacggccagacccgaacttcgacgcactaatttcaaagatctatcccagccgcgaggagtacgaggctcatcaggaccgcgtccttattagattaagcagactccataaccaacaagctctctcgtccagcatcgaagagggtctgaggatgcaagccatgcaccgagcccagagagtgagacgaccaattccgggcagcgatcagacaaccacaatgagcgggggcgaaggcgaacccggcgaaggggagggggacggggaggatgtcagttcagacagtgccccggattctgcccctgggcctgctccaaagcgtccaagaggcgggggagctggcggttcttcagtaggtaccggaggcgggggtacggggggggtaggggggggagctggtagcgaagacagtggggacagaggcggaaccctggggggggggaccttgggcccaccgtcacctcctggggctccttcacctcctgagcctggaggcgagatcgagcttgtcttccgtccacatccgctgcttgtcgaaaagggggagtactgccagactaggtatgtaaagaccactggcaacgccaccgtggaccacctctcaaaataccttgcgttaagaatcgccctggagaggcgtcagcaacaggaagccggtgagccgggcggtcccgggggcggcgcttccgacacgggtggtcctgacggctgtgggggggagggtggtggagcaggaggcggggatggcccagaagagcccgccctgccctccctggagggagtctccgagaaacaatacacaatctatatcgcgccaggcggcggggccttcaccaccctcaatggctcactgacactggaattggtcaatgagaaattctggaaggtgtctcggcctctggaactgtgttacgctcccactaaagacccaaaatag

SEQ ID NO: 203822 - DNA, 1221 bp, synthetic construct
  misc_feature 1..1221: note = Description of Artificial Sequence: Synthetic coding sequence
  source 1..1221: mol_type = other DNA
atgaccacccccgccaacgcccagaacgccagcaagacctgggagttatcactctacgagctccaccggacacctcaggaggcaataatggacggcacggagattgccgtgtccccgcgaagtcttcacagtgaactgatgtgccctatctgtctagatatgctgaaaaacacgatgaccaccaaagagtgcctgcacagattctgctctgattgcatcgtgaccgccctccgaagtggaaacaaggagtgcccgacttgtaggaaaaagctggtctccaagcggtcactccgtccagacccaaatttcgacgccttgatctcaaagatttatcccagcagggaggaatacgaagcacaccaagaccgcgtcctgattcggttaagcaggttgcacaatcagcaggctctgagtagcagtattgaggaaggattacgaatgcaggctatgcatagagctcagcgggtgcgccggcccatccccgggtccgaccagacaactaccatgtctggtggcgagggagaacccggcgagggcgagggcgacggggaggacgtatcttcagatagcgcccctgacagcgcccctggcccagccccgaagcgaccccgaggcggaggagcgggaggcagcagtgtcgggacaggtggtggcggcactggcggcgtaggcggaggggccggtagcgaggattctggcgataggggcggcactctgggcggcgggaccctgggccccccctcaccacccggtgccccctcaccgcctgaaccagggggggagatcgaactagtatttcgcccgcaccctctcttggtggagaagggggaatactgccagacacggtatgtgaaaaccactggaaatgccactgtcgaccatctctctaagtatctggccctgcgcattgccctcgaaaggcgacaacaacaggaggccggagaacctggagggccaggcgggggcgcctccgataccggaggacctgatggttgcggcggcgagggtgggggagcaggaggaggggacggtcctgaggagcctgcccttcctagtctcgagggcgtgtctgagaagcagtatacaatttatatagccccaggcggcggcgcctttaccaccctgaatggctccctcacgcttgagcttgtaaacgagaagttctggaaagttagccggccactggaactgtgttacgctcctaccaaagatccgaagtag

SEQ ID NO: 203823 - DNA, 465 bp, synthetic construct
  misc_feature 1..465: note = Description of Artificial Sequence: Synthetic coding sequence
  source 1..465: mol_type = other DNA
atgggcaactgcctgaagagccccaccagcgacgacatcagcctgctccatgaatcccagtctgacagagccagcttcggcgagggtaccgagcccgaccaagaaccgccccccccatatcaggagcaggtgccggtccctgtgtaccatcccaccccgtcacagactcggctggccacccagcttactgaggaagagcagatccggatcgcacagaggatcggcttgatccaacatctgcccaagggcgtatatgacccggggcgagacggaagcgagaaaaaaatccgcgagtgtgtcatctgcatgatggatttcgtgtatggagaccccatccggttccttccatgcatgcacatctaccatctggattgcatcgacgattggttaatgagatcttttacctgcccctcctgcatggagccggttgatgccgccctcctgagctcttatgaaactaactag

SEQ ID NO: 203824 - DNA, 1896 bp, synthetic construct
  misc_feature 1..1896: note = Description of Artificial Sequence: Synthetic coding sequence
  source 1..1896: mol_type = other DNA
atgccccggcccgccctgagcgtgaccagcttctgccaccggctgggcaaaagagaacggaagcaatcttttatggggaatagcgggaacagttggtcccacaccccttttcctaaacttgaacttgggctcggcccccagcctatggccccgcgggagctcccaacatgttccatttgccttgaaagacttagggatcctatctctctcgattgtggccatgatttctgcatccggtgtttttctacccatcgactgccaggatgcgagcccccatgttgtcctgagtgccgcaagatctgcaagcaaaaaaggggactacggagccttggagagaaaatgaagttgctgccgcaacgaccgctgccacccgctcttcaggaaacttgtcccgtccgggcggaaccgttgctcctcgttcgtatcaatgcttctggcggactcattttgcggatgggggcaatcaaccggtgtctcaagcacccgctggccagagacacccccgtctgtctcctcgcggtccttggcgagcagcatagtggcaaatctttcctcctaaaccacttacttcaaggattaccagggctagagtccggagaaggagggcggccccgcggtggagaggctagtcttcaaggatgcaggtggggagcgaacggattggccaggggtatttggatgtggtctcaccctttccttctggggaaggagggaaagaaagtcgctgtattccttgtcgataccggagatgccatgagcccagagttatccagagagacaagaatcaagctttgtgccttgacaactatgttatcctcctatcaaattctgagcaccagccaggagctgaaggacaccgatctcgattacctggagatgtttgtccacgtggccgaagtgatggggaaacactacggaatggtcccaatccaacacttagatctcctcgtgagggattcaagtcatcccaacaaagccggccagggccatgtcgggaatatctttcagaggctgagcggcagatatccaaaagtccaagaacttcttcaagggaagcgggcaagatgctgcctgttgccagctcccggtcgacgacgaatgaatcagggtcacgcttcccctggagacactgatgacgatttccgccatctgttaggcgcttacgtgtctgatgtactgtccgcagcaccccaacacgctaagtcacgctgtcagggatactggaatgaaggccgtgcagtcgcacgcggcgaccggagactcctgaccgggcaacagctggcccaagaaattaagaatttgtctggatggatggggagaacaggcccggggtttacctctccagacgaaatggcagctcagcttcatgaccttagaaaggtggaggctgccaagcgggagtttgaggagtacgtgaggcagcaggacgtggccactaagagaatattcagcgccctgcgggttttacccgacacgatgaggaacctgctgtcgacccagaaggacgccatcttagccaggcatggggtggcactgctgtgcaaaggccgggaccagactttggaagccttagaggcggaacttcaggccaccgctaaggcctttatggatagttacaccatgagattctgcgggcatttagctgccgtcggaggcgccgtaggggcaggcctgatgggactagctgggggcgtagtgggcgcaggtatggcagctgcggctctggcagctgaggcaggcatggtggctgccggcgctgctgtcggcgcgaccggtgcggccgtcgtgggtgggggagtgggtgccggtctggctgccacagttgggtgtatggagaaggaggaagatgagcgattgttggagggggaccgcgagccattattacaagaagaatag

SEQ ID NO: 203825 - DNA, 687 bp, synthetic construct
  misc_feature 1..687: note = Description of Artificial Sequence: Synthetic coding sequence
  source 1..687: mol_type = other DNA
atggccgcccagcagcgggactgcggcggcgccgcccagctggccgggcctgccgctgaggcagaccccctcggaagattcacttgtccagtttgtctggaggtctatgagaaacctgtgcaggtcccctgtggacatgtgttctgtagcgcctgtctgcaagaatgcctcaagcccaaaaagcccgtgtgtggcgtctgtcggagcgcacttgcccccggggttagagctgtagagctggagaggcaaatcgaatccaccgaaacaagctgtcacgggtgccgaaagaatttcttcctaagcaaaattcggtcacatgtggccacgtgcagcaaatatcagaattatataatggagggcgtgaaggcgacgattaaggacgcctcactccaacccaggaacgtgcccaatcgttacaccttcccctgtccatattgccccgagaagaactttgaccaggagggcttagtcgagcactgcaaactgttccatagtacagacaccaagtccgtagtgtgcccgatttgtgcttctatgccatggggagatcccaattaccgcagcgccaatttccgcgagcatattcagcggcgacaccggttcagttatgataccttcgtcgattatgatgttgatgaggaggacatgatgaaccaggtgctccagagatcaatcatcgaccagtag

SEQ ID NO: 203826 - DNA, 576 bp, synthetic construct
  misc_feature 1..576: note = Description of Artificial Sequence: Synthetic coding sequence
  source 1..576: mol_type = other DNA
atggccgcccagcagcgggactgcggcggcgccgcccagctggccggacctgcagctgaagcggatccactgggtagattcacctgccctgtgtgcctcgaggtctacgaaaagcccgtacaggtgccttgcggccatgtgttctgctccgcctgcttgcaagagtgcctgaagcctaaaaagccagtgtgtggcgtgtgcagaagcgctctcgctcccggggttcgcgctgtcgaactcgagagacagatagagtccacggaaaccagctgtcacggatgcagaaagaacttttttttgagtaaaatcaggtcgcacgtcgccacatgctcaaagtatcagaactatataatggagggtgtgaaggctaccattaaagacgcctcattgcagccaaggaacgtgcccaacaggtacaccttcccatgtccatactgtcctgaaaaaaacttcgaccaggagggcttggttgaacactgcaaactgttccattcaactgatacaaagtcagtgaccagtgagcagtcaccatgtctgctgagcgtctcctgttaccgcgcgtcaatcacatactag

SEQ ID NO: 203827 - DNA, 1287 bp, synthetic construct
  misc_feature 1..1287: note = Description of Artificial Sequence: Synthetic coding sequence
  source 1..1287: mol_type = other DNA
atgggccccccccccggcgccggcgtgagctgccggggcggctgcgggttcagcagactgcttgcctggtgttttctgcttgcgttaagcccacaggcacccgggagtcggggcgccgaggctgtgtggaccgcctacctgaatgtgtcttggcgcgtgccccatacgggggtaaacagaaccgtctgggagttgagtgaagagggcgtgtacggacaagacagccccttggaacctgtggccggggtattagtgcctcctgatgggccgggcgccctaaacgcctgtaatccccacactaactttaccgtgccgactgtgtggggcagcacagtgcaagtttcgtggttggctctaatccagaggggaggcggctgcaccttcgccgataagattcatcttgcgtacgagcggggggcctctggcgcagtgatctttaatttccctggcacaaggaatgaggtgatccctatgtcacatccaggagctgtggatatcgtcgccatcatgatcggcaatctgaaggggacgaaaattctgcagtctatccagcgcggtattcaggtgacaatggtcatagaagtcggaaagaagcatggaccctgggtgaatcactactccatttttttcgtaagcgtttcctttttcatcattacggccgccactgtggggtacttcattttctatagcgccaggcgattacggaatgcgcgggcacagtcgaggaagcaacggcagttgaaagccgacgcgaagaaagcaataggacgtctacagctgcgtaccctgaagcagggcgataaggaaataggaccagatggcgacagctgcgctgtctgcattgagctttacaaacctaacgatctggtaagaatcctgacctgcaatcatatttttcataaaacctgcgtggatccttggctgctcgaacaccgaacgtgtcccatgtgcaaatgtgacattctgaaagccctgggcatcgaggttgatgtggaggatggctccgttagtctccaagtgccagttagtaatgagatcagcaacagtgcctctagccatgaagaggacaaccgctctgaaaccgcctcatcagggtacgcctccgtgcagggaaccgatgagcctccgctggaggagcatgtgcaaagcaccaatgagtctttgcagctggttaaccatgaagcgaacagtgtagccgtggacgtcattcctcatgtggataatcctacgtttgaagaggatgaaacgccaaaccaagaaacagctgtgcgtgaaattaaatcctag

SEQ ID NO: 203828 - DNA, 1209 bp, synthetic construct
  misc_feature 1..1209: note = Description of Artificial Sequence: Synthetic coding sequence
  source 1..1209: mol_type = other DNA
atgaaccaggagaaccggagcagcttcttctggctgctggtgatcttcactttcctcctgaagataacggcatcattttccatgtctgcatacgtgactgtgacctattacaacgagacgtcaaactatacggccatcgaaacatgcgagtgcggggtctacggcctggcatctccagttgcgaatgctatgggggtggtgggaatacccaaaaacaataattaccaagcttgtgatcacaataccgagttttcaaacacaaagaagccatggattgctttgatagagcggggaaactgcacattcagtgagaaaattcagaccgccggacgcaggaacgcggatgccgtggtaatttataacgctcctgagaccgggaatcaaacaatccaaatggcgaacttcggggccgtggacattgtggccatcatgatcgggaaccttaaggggaccaaaattctgcagtcgattcagcgcggtattcaggtgaccatggtgattgaagtcggtaagaagcatggaccatgggtcaatcactactccatctttttcgtgtctgtgtctttcttcattattacagccgctactgtgggatatttcatcttctatagcgcaagacgactcaggaacgcccgggcccagtctcgcaagcagagacaactaaaggcagatgccaagaaagccatcggtagattgcagttgcggactctcaaacagggggacaaagaaataggtcccgatggcgacagctgcgcagtgtgcatcgaactctataaaccgaatgaccttgtaaggatccttacatgtaaccacatcttccataaaacttgtgtcgacccatggctgctggaacacaggacctgcccgatgtgtaaatgcgacatcctaaaagctctgggaatcgaggttgacgtggaggatggatctgtcagcctgcaggttccagtgtccaacgagatatcaaattccgccagtagccacgaggaggacaatcgcagtgagaccgcatctagcggttatgccagcgtgcagggaaccgacgagcctcctcttgaggaacatgtccagagcactaatgagtccctacagctggtcaaccacgaggccaactcggtcgcggtggacgtcatcccccatgtggacaaccccacattcgaggaggatgagactcccaatcaggaaaccgccgtgagagaaatcaagagctag

SEQ ID NO: 203829 - DNA, 750 bp, synthetic construct
  misc_feature 1..750: note = Description of Artificial Sequence: Synthetic coding sequence
  source 1..750: mol_type = other DNA
atgagcgcctacgtgaccgtgacctactacaacgagaccagcaactacacggctatcgagacttgtgaatgcggggtatacgggcttgcttcccccgttgctaatgccatgggagttgttgggatccctaagaacaataattatcaggcatgcgatcacaatactgagttctctaataccaaaaagccttggattgctctcatcgaaaggggaaactgtactttctcggaaaaaatccagacagcaggccgccgaaatgcagatgccgtggtgatctataacgctccggagaccggcaaccaaaccatccagatggctaacttcggcgccgttgacattgttgcgattatgatcgggaatctgaaaggcaccaagatactgcagagcattcaacggggcatccaggtcactatggttatagaggtcggtaagaaacatggtccctgggttaatcactacagtattttttttgtgtctgtctccttcttcattatcaccgccgcaaccgtggggtacttcatattctactccgcccgacgcctacgtaatgctcgggctcaatctaggaagcaacggcagctgaaggctgacgccaagaaagctattgggaggctgcagctgcgtaccctaaaacaaggagataaggaaattggtcccgacggcgattcctgcgctgtttgtattgagctttataagcctaacgatttggtgcgcattctgacgtgtaatcatatcttccacaagacctag

SEQ ID NO: 203830 - DNA, 633 bp, synthetic construct
  misc_feature 1..633: note = Description of Artificial Sequence: Synthetic coding sequence
  source 1..633: mol_type = other DNA
atggccggcctgggcctgggcagcgccgtgcccgtgtggctggccgaagatgaccttggctgtatcatttgccaaggattgctagactggccagccacattaccctgtggacacagcttctgtaggcattgcctggaggctctgtggggagcgcgcgatgcgagacgctgggcctgccctacttgccgccagggagctgcccaacagccccatctgcgcaagaacacgctactacaggacctggccgataagtatcggagggccgctagggaaatccaggccgggtccgacccagcccactgcccatgcccaggcagtagctccctctcgtctgcggctgctcggccccgacggcggcctgagttacaacgggtagccgtagagaaaagtataaccgaggtcgctcaagagttgaccgagctagtggaacaccttgtagatattgtaagatccctgcaaaaccaaagaccactcagcgagtcaggacctgataacgagttgtccatcctgggcaaggagaattcatggaaaccgcgactgcccccccacgcgcactgtctgacacgagctactctgcatagtggagagttactcggactcctgagcgggcctagcatccagccattaacttag

SEQ ID NO: 203831 - DNA, 1299 bp, synthetic construct
  misc_feature 1..1299: note = Description of Artificial Sequence: Synthetic coding sequence
  source 1..1299: mol_type = other DNA
atggccggcctgggcctgggcagcgccgtgcccgtgtggctggccgaggatgacctgggatgtatcatctgccagggactcctggattggcccgccaccttgccgtgtggccattctttctgccgtcactgcctggaagcactgtggggagcaagagacgcaagacgatgggcatgtcccacttgcagacagggtgccgctcagcaaccacatctccgaaaaaatacattattgcaggacctagcggataaataccggagagctgccagagagatccaggccggctcagatcccgcacactgtccctgccctggctcctccagtctctcctcagccgctgctaggccccgccgtcgccctgaacttcaaagagttgccgtggaaaagtccatcacagaagttgcgcaggagcttacggagcttgtcgaacatctggtagatattgtcagaagcctccagaaccagaggccgttgagcgaaagcgggccggacaacgaactttcaattctcggcaaggccttcagcagcggcgttgacttatctatggcttcaccgaaactggtgacttccgacacagctgctggtaaaatcagagatatcctgcatgacctggaagagatccaggaaaagcttcaggaaagcgtgacctggaaggaagccccggaagctcaaatgcagggagagcttctcgaggccccgtcctcttcctcttgccctctcccagatcagtctcatcctgccctgaggagggcttcccgtttcgcgcagtgggccatccacccgacttttaatcttaagtctctgtcttgctcccttgaggtgagtaaggactcacgtaccgtgactgtatcccaccgcccccagccttatcgttggagctgtgaacggttctctacctcccaggtcttgtgctcacaggcactgtcaagcggcaaacattattgggaggtagacacaaggaactgctcccattgggcagttggtgtggccagttgggagatgtctcgagatcaggtcttgggaagaaccatggactcctgttgcgtggagtggaagggaacaagtcaactcagcgcctggcacatggttaaagagactgtcttagggtccgacagacctggagtcgtcggcatctggctgaatctggaagagggcaagttggccttctacagcgtggacaatcaggagaagctgctgtatgaatgcacaattagcgcatcatcacccttataccctgccttctggttatacggacttcatccaggtaattatctcataatcaaacaggtgaaggtctag

SEQ ID NO: 203832 - DNA, 255 bp, synthetic construct
  misc_feature 1..255: note = Description of Artificial Sequence: Synthetic coding sequence
  source 1..255: mol_type = other DNA
tgaaaggaggcccccgaggcccagatgcagggcagcctgctgcccagactggaatgttcgggtacaataaccgccgcctccatcagtcaggctcaggagaatagctggaaaccccggctgccccctcacgcgcactgcctgaccagggcgactcttcattctggcgagctgctgggcctattgtctgtgcctcccaggggcgaacttatcgctaaggccaaacaagtggagacactagaccctagagctctgtag

SEQ ID NO: 203833 - DNA, 291 bp, synthetic construct
  misc_feature 1..291: note = Description of Artificial Sequence: Synthetic coding sequence
  source 1..291: mol_type = other DNA
gcccagcagccccacctgcggaagaacaccctgctgcaggacctggccgataagtaccgacgtgctgcgcgagaaattcaggccggatctgacccagcgcattgtccttgcccagggtcaagctccctgtcaagcgctgctgctagaccacgcaggcgacccgaactgcagcgagaaaattcgtggaagcctcgactcccccctcatgcccactgcctaacccgggccacactccactccggcgagttgctcggtctcttgtctggcccatcaatccagccactcacatag

SEQ ID NO: 203834 - DNA, 861 bp, synthetic construct
  misc_feature 1..861: note = Description of Artificial Sequence: Synthetic coding sequence
  source 1..861: mol_type = other DNA
atggccggcctgggcctgggcagcgccgtgcccgtgtggctggccgaggatgatttgggatgcatcatatgtcagggactcctggattggccggctactctgccctgcggccattcattctgccggcactgcctggaggcgttgtggggcgcccgcgatgcccgcaggtgggcctgccccacatgccgacagggggctgctcaacagccccacctgcggaagaataccctgctacaggacctcgctgataagtaccggcgcgcagcacgagagatccaagccgggagcgacccagcccactgcccctgtccaggctcatcctcattatcttccgccgctgcacggcctcgcagaaggccagaactgcagcgggtggccgtggagaagagcattacagaggtggcccaggagttaacggaactggttgagcatctggtagacatcgtgcgatctctgcagaatcagcgaccactaagcgaatctggaccagacaacgaactgtccattctggggaaggcattttcttccggtgtcgacctttcaatggcttcacccaaattggttacctccgataccgctgcaggaaaaatccgggacatcctccacgacttggaagagatccaggagaagctgcaggaatccgtcacctggaaagaggcgcctgaggctcaaatgcaagggagcctgctgcctcgtctcgaatgtagcggaacgattaccgcggcttctataagccaggctcaggagaattcctggaaaccacgactcccccctcatgctcactgtcttacccgggccactctacacagcggcgagttattggggctactttctggcccctcaatccagcctctgacatag

SEQ ID NO: 203835 - DNA, 756 bp, synthetic construct
  misc_feature 1..756: note = Description of Artificial Sequence: Synthetic coding sequence
  source 1..756: mol_type = other DNA
atggccagccccaagctggtgaccagcgacaccgccgccggcaagatccgcgatatcctgcatgatctggaggagatccaggagaaactgcaggagtccgtgacctggaaagaagcccccgaggcccagatgcagggcgagctcctcgaagccccgtcttcgtcatcatgccctctgcccgaccagagccatcccgccctgagacgagcaagccgcttcgctcaatgggcaattcacccaacttttaaccttaagtcactcagctgctctcttgaggtttccaaagactcccgcacagtcactgtaagtcatcggcctcagccttacaggtggtcctgtgagcgctttagcacatcgcaggtgctgtgctcccaggcactgagtagcggtaagcattattgggaagtggatacccgcaattgcagccattgggccgtcggagtggcctcctgggagatgagtcgcgaccaagtacttgggcgcacaatggacagctgttgcgtcgagtggaaaggcacatcacagctgagcgcatggcatatggtgaaagagacggtcctgggttccgacaggcccggggtagtgggcatttggctcaatctcgaggaggggaagctcgctttttacagtgtggacaaccaggagaaactgttatatgaatgcacaattagtgcctccagccccttgtatcccgctttttggctgtacggcctgcatccaggcaactacctcatcattaaacaggtgaaggtttag

SEQ ID NO: 203836 - DNA, 1995 bp, synthetic construct
  misc_feature 1..1995: note = Description of Artificial Sequence: Synthetic coding sequence
  source 1..1995: mol_type = other DNA
atggccgccgtgggccccccccagcagcaggtgcggatggcccaccagcaagtctgggcagcgctggaagttgcactccgggtcccctgcctgtatattatcgatgcaatttttaactcctaccctgactcatcacagtccaggttctgcattgtgttacaaatattcctgagactctttggtgtatttgcctcttcaattgtgctgatcttgagccagagatctctttttaaattctacacatacagtagcgcattcctgttagcagcgacaagcgttttggttaactattatgcatccctgcacatagatttttatggggcctataacacttcagccttcggcattgagcttttgccccgcaagggacctagcctttggatggcactgatcgtgctccaactcactttcggcataggatacgtaacactccttcaaatccacagcatatacagccagctaatcatcctggatctgcttgtcccagtaattggtctcatcaccgagttacctctgcacatcagagaaacactcctattcacgtcgtcgctgatcctgacacttaatacggtgtttgtcttggccgtgaagctgaaatggttctactattcaacccggtatgtctatctcctggttcgccatatgtaccgaatctatgggctccagctgctgatggaagacacatggaagcggatccgcttccctgatatactgcgggtcttttggctcaccagagttacagctcaggcaaccgtactgatgtatattcttagaatggcaaatgagaccgattccttctttattagctgggacgacttttgggatcttatttgcaatttgatcatttccgggtgcgactccactctgactgtactggggatgtctgccgtgatcagttcagttgcccactatttggggctaggcatcctcgccttcatcggatctacagaagaggacgatcgacgcttggggttcgtggccccagttctgtttttcatcttggccctgcagaccggactgtcaggcctgaggcctgaggagagacttatccggctgtctaggaacatgtgcctgctcctgacagccgttctacattttattcatggcatgacggatccggtgctcatgtctctgtcggcctcacatgtgagctcctttagacggcactttccggtgctatttgtttcagcgtgcttgtttatcttgcccgtgttgctttcttacgttttgtggcatcattacgccctgaatacctggttattcgcagtgacagcgttttgtgtagaattgtgcctgaaggtaattgtgtccctgacggtctacacactgtttatgattgacggatattataatgtcttgtgggagaagcttgatgattacgtatattatgtccgctccacaggctccattatcgaatttatctttggggttgtaatgtttggtaatggggcatatactatgatgtttgaatccggatctaaaattagggccttcatgatgtgcctccatgcctatttcaatatctacttacaggcaaagaacggctggaaaacgttcatgaatagacgaacagcagtcaagaagatcaactccctgccagagatcaaaggttcgcggcttcaggagataaacgacgtctgcgccatctgttatcacgagttcaccacttccgcgcgaatcacaccctgtaaccactacttccatgctctctgtctccgtaaatggctgtacatccaagatacatgccctatgtgtcaccaaaaagtgtatattgaggacgatattaaggacaactccaacgttagcaacaacaatggtttcattccccctaatgagacccccgaagaggcagttagagaagccgccgccgaaagtgatagggaattgaatgaggatgattctacggactgcgacgatgacgtgcagagagagcggaatggagtaatccagcatacaggagccgccgcagaggagtttaacgatgataccgattag

SEQ ID NO: 203837 - DNA, 1425 bp, synthetic construct
  misc_feature 1..1425: note = Description of Artificial Sequence: Synthetic coding sequence
  source 1..1425: mol_type = other DNA
atgagcagcgaggaccgggaggcccaggaggacgagctgctggccctagcgtccatctatgatggagatgaattccgtaaggctgagtcggtgcaggggggggagacccggatttacctggacttgccacaaaacttcaaaatcttcgtgtctggtaactcgaatgaatgcttgcaaaatagcgggttcgagtatactatctgctttctgccccctttagtactgaactttgagttaccaccggactacccatcctcatccccgccttctttcacactttccgggaagtggctgtctcctacacagctttccgccttgtgcaaacatttagacaatctatgggaggagcatcgcggcagcgtcgtgctgtttgcttggatgcagttcctgaaggaagagaccttagcgtacctaaacattgtgtcaccgtttgagctcaagattggctcacaaaaaaaggtgcagcgaaggactgcccaggccagcccaaacaccgagctggatttcggtggcgctgcaggctctgacgttgaccaagaagagattgtcgacgagcgagccgtgcaggacgtggagagtcttagcaacctgatccaagagatccttgattttgatcaagcacagcagattaagtgttttaattcaaagctgtttctatgttctatttgcttttgtgaaaaattgggcagcgaatgcatgtattttttggaatgccgacatgtctactgtaaggcttgcctgaaagattattttgagattcagattagagatggccaggttcagtgcctgaactgcccagagcccaagtgcccttctgtggctacccctggtcaagtcaaagaactcgtggaagccgagctgtttgccaggtacgataggcttcttctgcaatcctccctggacttaatggccgacgtggtctattgtcccagaccctgctgccagctgccggtgatgcaagaaccggggtgtactatgggaatttgtagttcttgcaactttgcattttgcacactgtgcagactcacataccacggtgtctctccttgtaaggtgactgctgaaaaattgatggatctcaggaatgagtatttacaggctgacgaggctaacaagagactcctggatcagaggtacggcaaacgcgtgatccaaaaggccttagaggagatggaaagtaaggagtggctagaaaagaatagcaaaagctgtccctgttgcggcactcccattgagaaactggacggctgcaacaagatgacgtgcactggttgtatgcagtatttttgttggatttgtatgggaagcctttctcgggcaaatccttacaaacactttaatgaccccggatcaccttgcttcaaccggttgttctacgcagtggacgtagacgacgacatatgggaggatgaggtcgaggactag

SEQ ID NO: 203838 - DNA, 1425 bp, synthetic construct
  misc_feature 1..1425: note = Description of Artificial Sequence: Synthetic coding sequence
  source 1..1425: mol_type = other DNA
atgagcagcgaggaccgggaggcccaggaggacgagctgctggccctggcctccatttatgacggcgatgaattcagaaaagctgaatccgtgcaaggcggggagactaggatttacctcgaccttccccagaatttcaagattttcgtctctggtaatagtaacgagtgtctgcaaaatagtggctttgagtacacaatttgctttctgccacccctcgtcttaaactttgaattgcctcccgactacccatcgagttccccacctagctttaccttgtctggcaagtggcttagtcctacccagctcagtgcactgtgcaagcatctggataacctgtgggaagaacacaggggaagcgtcgtgctgtttgcctggatgcagttcctgaaagaggagacccttgcgtatctgaatattgttagcccctttgagctgaagattggttcacagaagaaagtccagagaaggaccgcacaagcttcacctaataccgagctcgacttcggaggcgccgcaggtagtgacgttgatcaggaagagattgtcgatgagagagcagttcaggatgtggaaagcctgagcaacctcatccaagagatactggacttcgaccaggcacagcagatcaaatgttttaacagcaaactcttcctgtgcagcatctgcttctgcgagaagctcgggagcgaatgtatgtacttcctcgaatgcagacatgtttactgtaaggcctgcctcaaagattattttgaaattcagatccgggatggccaggtgcagtgcctaaattgtccagaaccaaagtgcccttcagtggcaacaccgggccaggtaaaggaactggtggaagctgagctgttcgcccggtacgatcggcttctgcttcagtccagcctcgacttgatggccgatgtcgtgtactgtccacgtccttgttgtcagctaccagtgatgcaggaaccagggtgcacaatgggcatttgctcgtcgtgtaacttcgctttttgtactctttgtcgcctcacctaccatggggtctccccctgtaaggtgactgccgaaaaactgatggatctacgtaacgagtacttacaagcggacgaggccaacaagagactgttggaccagcggtacgggaagagagtgatacagaaggccctggaggagatggagtcaaaggaatggcttgagaaaaattccaagtcttgcccttgctgcggtactcctattgaaaaactcgatgggtgcaataagatgacatgtactgggtgcatgcagtacttttgctggatctgcatgggttcgctttcccgcgccaacccctacaaacacttcaacgatccaggcagcccatgctttaacagactgttctacgctgtggacgtagacgacgacatttgggaagatgaggtcgaggactag

SEQ ID NO: 203839 - DNA, 1047 bp, synthetic construct
  misc_feature 1..1047: note = Description of Artificial Sequence: Synthetic coding sequence
  source 1..1047: mol_type = other DNA
atgcagttcctgaaggaggagaccctggcctacctgaacatcgtgtcaccttttgaattaaagatcggcagccagaagaaagtgcagagacggacggcccaggctagtccaaacacagaattggacttcggaggcgcagcaggctctgacgtcgaccaggaggaaatcgtggatgaaagggctgtgcaggatgtagaaagtttgagtaacctcattcaggagatcctcgacttcgaccaggcccagcagatcaagtgttttaactctaagctattcctttgttctatttgcttctgcgaaaagctggggtccgaatgtatgtacttcttggaatgccgtcatgtgtactgcaaggcatgtctcaaagattacttcgagattcagatcagagacggtcaagtgcagtgcttaaactgccccgagccaaagtgcccatcggtggcaacgccgggccaagtgaaagaattggttgaggcagagctgttcgcacgctacgatcgcctcctgctccagtctagccttgatctaatggccgatgttgtgtactgtcctcgaccctgctgccagctgcctgtcatgcaagagcccgggtgcactatgggtatttgtagctcttgtaatttcgcgttttgcaccctgtgccgactgacctatcatggcgtttcgccatgcaaggtgacagcagagaagctcatggacctaagaaacgagtaccttcaggccgatgaagctaataagaggctgctcgatcaaagatatgggaagcgggttattcagaaagctttggaagaaatggaaagcaaagagtggctggagaagaattcaaagagctgcccatgctgcggcacaccaatcgagaaattggatggatgcaacaagatgacctgcactggctgtatgcagtatttctgttggatttgtatgggcagcctgagcagggctaacccatataagcacttcaacgaccctggcagcccctgttttaaccgattgttttacgccgtcgacgtggatgatgacatatgggaagacgaggttgaagactag

SEQ ID NO: 203840 - DNA, 897 bp, synthetic construct
  misc_feature 1..897: note = Description of Artificial Sequence: Synthetic coding sequence
  source 1..897: mol_type = other DNA
atgagcagcgaggaccgggaggcccaggaggacgagctgctggccttagcttcaatttatgatggtgatgaattccggaaggcagagtctgtgcaaggaggggagaccaggatctaccttgacctgccacagaacttcaagatcttcgtctcaggaaattccaacgaatgcttacagaacagtggatttgaatacaccatctgctttctgccaccacttgtgcttaatttcgaattgcctcctgactatcccagctccagtcccccctctttcactctcagcggaaagtggctgagcccgacccaggtgaaggagctggtcgaagccgaactgttcgccagatatgatcgactgctgctccagagttccttggacctcatggcggatgtagtgtactgtcctagaccatgttgccagttgccagtgatgcaagagcctggctgcacaatgggcatttgttcatcttgcaattttgctttttgtacactctgccgtctgacctaccacggggtgagcccatgcaaggtgaccgcagaaaagttaatggacttacgaaatgagtacctgcaggctgacgaggccaacaaaaggttgctggatcagaggtacggcaaacgggtgattcagaaggcgctggaggagatggaatctaaagaatggcttgaaaagaactctaagtcttgtccatgctgcgggacaccgatcgagaagctcgacggatgtaacaaaatgacctgtactggatgtatgcagtatttctgctggatctgcatggggtccctgagccgcgctaacccctacaagcacttcaatgatccaggatcaccttgttttaatcggcttttttatgcggtcgacgtggatgacgacatatgggaagatgaggtggaggattag

SEQ ID NO: 203841 - DNA, 1425 bp, synthetic construct
  misc_feature 1..1425: note = Description of Artificial Sequence: Synthetic coding sequence
  source 1..1425: mol_type = other DNA
atgagcagcgaggaccgggaggcccaggaggacgagctgctggccctagcttccatatacgacggcgacgagttcaggaaagcagaaagcgtacaaggcggggagacccgcatatacctggaccttccccaaaactttaaaatatttgtttccggcaactccaacgaatgtctgcagaattccggctttgagtacacgatttgctttctgcctccactggtgctgaattttgaacttcctcccgactacccatcctcctcacccccctccttcactttatccgggaagtggctcagccctacacagctctctgccctgtgtaaacacctagacaacctgtgggaagagcatagagggtctgtggtgctgtttgcctggatgcagtttctaaaggaagaaacgctcgcttatttgaatatcgtgtcccccttcgagcttaaaattggaagccagaagaaagtgcaaagaaggaccgcccaggcgagtccgaatactgagttagactttggaggggcagctggttctgacgtcgaccaggaagagatcgtggacgaacgcgcggtgcaggacgtggagtctctcagtaacttaatccaggaaatcctagacttcgatcaggctcagcagatcaaatgctttaattcaaagttgtttttgtgttccatttgtttctgcgaaaagctcggatccgagtgcatgtactttctggaatgtaggcacgtttactgcaaagcttgcctgaaggattatttcgagatccagatccgcgatggacaagtgcagtgtctgaactgtcccgagcctaagtgtccttccgtcgcgaccccagggcaggttaaagaattagtggaagcagaactgtttgctcgttacgaccggctccttttgcagtcctcattggacttaatggctgacgtcgtgtattgtccacgaccctgctgccagctgcctgtgatgcaggaaccgggctgcacgatgggcatctgttcctcgtgcaattttgccttctgtactttatgtcggctcacttaccatggtgtctctccatgcaaggtgacagccgagaagcttatggatctgcggaatgaatatctgcaggctgacgaagctaataaacgattgctagatcaacgatacggaaagcgggtgatccagaaggctctagaggagatggaaagcaaggagtggttggaaaagaacagcaagtcctgtccctgctgcggcactcctatcgaaaagctggacggctgtaataaaatgacgtgcacaggctgtatgcagtacttctgctggatctgcatgggctcactctcaagggcaaatccatataaacattttaatgatcctgggagtccctgctttaaccgcctcttttacgccgtggacgtagacgacgatatatgggaggacgaagtggaagactag

SEQ ID NO: 203842 - DNA, 1425 bp, synthetic construct
  misc_feature 1..1425: note = Description of Artificial Sequence: Synthetic coding sequence
  source 1..1425: mol_type = other DNA
atgagcagcgaggaccgggaggcccaggaggacgagctgctggccctcgcctctatctacgacggggacgagttcaggaaggctgaaagcgtgcagggcggcgaaacaagaatttacctggatctgcctcagaatttcaagatcttcgtgagtggcaattccaacgaatgtctccagaattctgggttcgagtacactatttgttttctgccaccattagtgctaaatttcgagctgccaccagattatcctagctcttcccccccaagctttaccctctccgggaagtggctttctcccacccaactttcggctctgtgcaagcacctggacaacctctgggaagagcaccgcggttcagtcgtcttgtttgcctggatgcagttcctcaaagaggagacactagcctacctgaacatcgtttcgccatttgagctcaaaataggttcccagaagaaggtgcagcggaggactgctcaggcctcccccaacaccgaactggattttggaggcgctgcaggctccgatgtcgatcaggaggaaatcgtcgacgagcgcgccgtccaggatgttgaaagtctctccaacctgatccaggagattcttgattttgaccaagcacagcagatcaagtgtttcaactctaaactgttcctgtgcagcatctgcttctgtgaaaagctcgggtctgaatgtatgtatttcctggagtgccgacatgtttattgcaaggcgtgcctgaaggattacttcgagattcagattcgagatggccaggtgcaatgcttgaattgcccagagcctaagtgtccgtcagtggccactcctggacaagtgaaggaactggtggaggctgaactatttgcccgctatgacagactcctgttgcagtccagcctcgacctcatggctgacgttgtctactgccccaggccttgttgtcagctcccagtaatgcaagagcccggttgcacgatggggatttgttccagctgcaattttgcattctgcaccctctgccgcctcacttatcacggcgtatcgccctgtaaggtgacagcagagaagttgatggatctccgcaacgaatatctgcaggccgacgaagccaataagagactgctggatcagagatatgggaaaagggtgatccaaaaagcgctcgaggaaatggaatccaaagagtggctcgagaaaaactccaagtcttgtccatgttgtggcacgccaatcgagaaattggatggttgtaataagatgacatgcaccggctgcatgcagtacttttgctggatttgtatggggtccctctccagagcaaacccgtataagcactttaacgatcccggatctccttgctttaatcgtctgttttacgctgtagatgtggacgacgatatctgggaggatgaggtggaggactag

SEQ ID NO: 203843 - DNA, 48 bp, synthetic construct
  misc_feature 1..48: note = Description of Artificial Sequence: Synthetic coding sequence
  source 1..48: mol_type = other DNA
atgagcagcgaggaccgggaggcccaggaggacgagctgctggcctag

SEQ ID NO: 203844 - DNA, 399 bp, synthetic construct
  misc_feature 1..399: note = Description of Artificial Sequence: Synthetic coding sequence
  source 1..399: mol_type = other DNA
atgagcagcgaggaccgggaggcccaggaggacgagctgctggccctcgcaagcatctacgacggtgacgagttcaggaaagccgagagcgtacagggaggagagacccgcatctatttggacttgcctcagaacttcaaaatttttgtctctggaaacagtaatgagtgtttacaaaacagcggctttgagtatacgatttgttttctgccacccctcgtgttgaatttcgagctgcctcctgattacccatcatcatcccccccctcctttactctttctggaaaatggctatctcctactcaattgtcagccctgtgcaagcatcttgacaacctgtgggaggagcaccgtgggtcggttgtgttatttgcatggatgcagttcctgaaggaatag

SEQ ID NO: 203845 - DNA, 516 bp, synthetic construct
  misc_feature 1..516: note = Description of Artificial Sequence: Synthetic coding sequence
  source 1..516: mol_type = other DNA
atgagcagcgaggaccgggaggcccaggaggacgagctgctggcccttgcctcaatctatgatggcgacgagttcagaaaggctgagagtgttcagggcggtgagactagaatttatctcgacttacctcaaaatttcaaaattttcgttagcggtaacagtaacgagtgcctacagaatagcgggttcgaatataccatctgcttcttacctccactggtgttaaattttgaacttccacccgactatccttccagctcacccccctccttcacattaagcggaaagtggctgtcaccaacgcagctatctgcgctctgcaaacatctggataacttgtgggaagagcatcgaggctccgttgtgctctttgcatggatgcagttcctgaaggaggagactttggcttatctcaatatcgtgtcacccttcgagttaaagatcgggagccagaagaaagttcagcggcggactgcgcaggcatctcccaataccgagcttgactttggcggctag

SEQ ID NO: 203846 - DNA, 558 bp, synthetic construct
  misc_feature 1..558: note = Description of Artificial Sequence: Synthetic coding sequence
  source 1..558: mol_type = other DNA
atgagcagcgaggaccgggaggcccaggaggacgagctgctggccttagctagcatctatgacggtgacgagtttaggaaggctgagtccgtgcagggaggggagacccggatctatctggatctgcctcagaattttaagatctttgtgtctggaaattccaatgagtgtcttcagaactctgggttcgaatatactatctgcttcctcccccctctggttctgaattttgagctcccccctgattacccttcatcttccccaccgtcctttaccttgtcagggaaatggttgagcccgacacaactctccgccctttgtaagcatttagacaacctctgggaagaacacaggggatctgtcgtgctttttgcttggatgcagtttctcaaagaagagactctggcctaccttaacatcgtgtctccattcgaactgaaaatcggatcgcagaagaaggttcagcggcgcaccgcacaagcctccccgaacacggaactggattttggcggtgcagcggggtccgacgtcgaccaggaggaaatagttgatgaatag

SEQ ID NO: 203847 - DNA, 186 bp, synthetic construct
  misc_feature 1..186: note = Description of Artificial Sequence: Synthetic coding sequence
  source 1..186: mol_type = other DNA
atgagcagcgaggaccgggaggcccaggaggacgagctgctggccctggcgtctatatacgatggggacgagttcaggaaagccgaatcggtccagggcggagaaactagaatctatctggacttgccccagaactttaagattttcgtgtcaggcaactcaaacgagtgtcttcagaactcctag

SEQ ID NO: 203848 - DNA, 837 bp, synthetic construct
  misc_feature 1..837: note = Description of Artificial Sequence: Synthetic coding sequence
  source 1..837: mol_type = other DNA
atgagcagcgaggaccgggaggcccaggaggacgagctgctggccttagcctctatctatgacggcgatgagtttaggaaagccgaaagtgtacagggaggagaaactaggatctaccttgatttaccgcagaacttcaaaatttttgtgtccggcaattcaaatgaatgtctgcaaaacagtggcttcgagtacactatctgtttcctccctccactagtcctaaactttgagttgccacccgactatccatcatcttcacctccaagctttaccctttccgggaaatggctctctcctacccaactgtccgcactctgtaaacacctggataacctgtgggaggagcatagaggatcagttgtgctgttcgcttggatgcaatttctgaaagaagaaacactggcgtacttgaatatcgtttccccattcgagttgaaaatcggctcccaaaagaaggtgcagagacgtacagcgcaggcttcacccaatactgagcttgactttgggggtgcggcagggagcgacgtggaccaggaggaaattgtcgatgagcgggcggtgcaggacgttgaaagcttatccaatttaatccaggaaattctcgactttgatcaggcacagcaaataaaatgcttcaattctaagttgtttctgtgtagtatttgtttctgcgaaaaacttggatccgaatgtatgtattttctcgaatgtcgtcacgtgtactgcaaagcatgtctgaaagattactttgaaattcaaattcgggatgggcaggtgcagtgtctcaattgtcctgaacccaagtgcccttctgttgcaactccaggccagtag

SEQ ID NO: 203849 - DNA, 300 bp, synthetic construct
  misc_feature 1..300: note = Description of Artificial Sequence: Synthetic coding sequence
  source 1..300: mol_type = other DNA
atgagcagcgaggaccgggaggcccaggaggacgagctgctggccttggcctcaatctatgacggagacgaatttcgcaaggctgaaagtgtacagggcggcgagacccggatttatctggatttgccgcagaactttaagatcttcgtgtctgggaacagcaacgaatgccttcagaattcaggattcgaatataccatatgtttcttgcccccactggtcctgaattttgagctgcccccagactacccgtcttcatccccaccttccttcacactgtccgggaaatggctctcttag

SEQ ID NO: 203850 - DNA, 516 bp, synthetic construct
  misc_feature 1..516: note = Description of Artificial Sequence: Synthetic coding sequence
  source 1..516: mol_type = other DNA
atgagcagcgaggaccgggaggcccaggaggacgagctgctggccctcgctagcatatacgatggcgacgaattccgaaaagcagagagcgtccagggcggagaaacaagaatctatctggacctgcctcagaattttaagatcttcgtgtctgagaagctcatggacctgcggaacgagtatctgcaggctgatgaagctaacaagcggctcctggaccagcgctacgggaagcgcgtcatccagaaggcactggaggaaatggaatctaaggagtggctcgagaagaattctaaaagctgtccctgttgcgggacccctatcgagaaactcgacggatgcaataagatgacttgcactgggtgcatgcaatacttttgctggatttgtatggggtctctgtctcgcgcaaacccatataagcacttcaatgaccctggcagcccctgtttcaatagactgttctatgccgtggatgtggacgacgacatatgggaagatgaggttgaagactag

SEQ ID NO: 203851 - DNA, 1077 bp, synthetic construct
  misc_feature 1..1077: note = Description of Artificial Sequence: Synthetic coding sequence
  source 1..1077: mol_type = other DNA
atggccggctgcggcgagatcgaccacagcatcaacatgctgcccaccaaccggaaggccaatgagtcctgttccaacaccgcaccttcactgacagtaccagagtgcgccatttgtctccagacttgcgtgcatccggtgtctctcccatgtaagcatgttttttgttacctgtgcgtcaagggggctagttggttggggaaacgttgcgccctgtgccggcaggaaatacccgaggacttcctcgataaaccaaccttgttgagtcccgaagaactgaaggccgcctccaggggcaacggcgaatatgcgtggtactacgaaggccggaatggttggtggcaatatgacgagcgcacaagtagagagctagaagatgcattttctaagggaaagaaaaatacggagatgctcatagccggatttctctacgtggccgatttagaaaatatggtgcagtatcgaaggaacgagcatggaagaagacgcaaaattaagcgggatatcatagatatcccaaagaagggcgttgctggtctgcgcctcgattgtgatgcaaataccgtaaaccttgctcgcgagtcctctgccgacggggccgacagcgttagcgcacagtctggcgcctctgtgcaaccccttgtgtcaagtgtacgacctcttacctcggtcgatggtcaactgaccagtccagccacaccctctcccgatgcttcgacatctctggaggattcatttgctcatctgcagctgtccggggacaatacggccgaacgttctcaccgcggtgaaggagaggaggatcacgagtcaccttccagtggaagagttccagcacctgacacaagcatcgaggaaacggaatccgacgcaagtagcgatagtgaagacgtgtctgccgtcgtggcacagcatagcctcacacagcaacgactcctcgtctcgaacgcgaaccagaccgtccccgataggtctgatcggagtggtaccgaccgcagtgttgccggggggggcacagtaagcgtctccgtgagatctcgtcgccctgacgggcagtgtaccgtgactgaggtgtag

SEQ ID NO: 203852 - DNA, 1077 bp, synthetic construct
  misc_feature 1..1077: note = Description of Artificial Sequence: Synthetic coding sequence
  source 1..1077: mol_type = other DNA
atggccggctgcggcgagatcgaccacagcatcaacatgctgcccactaacagaaaggcaaatgagtcctgcagtaacactgcacccagtctgactgtgcctgaatgcgccatttgtctccagacttgcgtacacccagtgagcctcccatgcaaacacgtgttctgctacctctgcgtgaagggcgcttcctggttgggcaagcggtgcgctttgtgtcgccaagaaatccccgaagatttcctcgataagcctacactgctttccccagaggagctgaaggccgctagcaggggaaatggggaatacgcttggtattacgagggccggaatgggtggtggcagtatgacgagcgaacatcacgcgagttggaagacgctttctctaaggggaagaagaataccgaaatgttaatcgccggctttctgtacgtggctgacttggagaatatggtgcaataccgcagaaatgagcacgggcgccgacgtaaaattaaacgggatattattgatattcctaagaaaggggtggcaggcctcaggctggattgtgatgccaacaccgtgaacctggctcgggaatcttcagccgacggtgccgactctgtcagcgcccagtctggggcgtcagtacagcctcttgtgtcgtcagtccgcccactgacctccgtggacggacaattaacctcgcctgctaccccttcccccgacgccagcacctccctggaagatagcttcgcccacctgcagctgagtggggacaataccgcagaacgctcacatcgcggcgaaggggaggaagatcatgagagcccctcatctgggagagttccagcacctgacactagcatcgaggaaaccgagagcgacgcgtcttctgacagcgaggatgtttccgcagtggtggcacaacactctttaactcagcagcgcctgctagtctcaaatgcaaatcagaccgtgcccgacaggtcggatagatccggtactgatagaagtgtggcaggtggaggcaccgtgagtgtctctgttagatcccgccgtcccgacggccagtgtaccgtgacagaggtgtag

SEQ ID NO: 203853 - DNA, 1080 bp, synthetic construct
  misc_feature 1..1080: note = Description of Artificial Sequence: Synthetic coding sequence
  source 1..1080: mol_type = other DNA
atgatggccggctgcggcgagatcgaccacagcatcaacatgctgcctaccaaccgcaaggccaacgaaagctgctccaatacggccccaagtttgaccgtgcccgaatgtgctatttgccttcaaacttgtgtccatcctgtgtctctcccctgcaaacacgttttctgttatctttgtgtaaaaggtgccagctggctcggaaagcgctgcgccctctgcaggcaggagattcccgaggacttcctggacaaacctacactgctctctcccgaagaactgaaagccgcttcacggggcaatggggaatatgcatggtattacgagggccgaaatggttggtggcagtacgatgaaaggacttcgcgcgaactggaagacgcattctccaagggtaaaaagaatacggagatgctgatcgctggatttttatatgtcgccgatctcgagaacatggtccagtaccggagaaacgaacatgggcgaagacggaagattaaacgtgatataatcgacatccctaaaaagggggtggcaggcctcagacttgactgcgacgccaataccgtgaacttggcccgggagagctcagccgacggcgccgattccgtctccgcccagtctggggcatccgttcagccattggtgtccagcgtgcggccacttacctctgtggatggacagctgacctcgcccgccactccctctccagatgcatccaccagcctggaggactcttttgcccaccttcagctgagtggcgacaatacagccgaaagatcacaccggggcgagggggaagaggatcatgaaagcccttcatccggaagagtcccagcccccgacactagcatcgaggagactgagagcgacgccagctccgactccgaggatgtttcagccgtcgtagcgcagcactccttaacacagcagagactcctggtatccaatgctaatcagacggtgcctgaccggtctgaccgcagcggcaccgatcgcagcgtcgcaggcggtggaaccgttagtgtttcagtccggtcccggaggccggatgggcagtgcaccgtaactgaggtctag

SEQ ID NO: 203854 - DNA, 1716 bp, synthetic construct
  misc_feature 1..1716: note = Description of Artificial Sequence: Synthetic coding sequence
  source 1..1716: mol_type = other DNA
atggccctgcccaaggacgccatccccagcctgagcgagtgccagtgtggcatttgcatggagattttggtggaacctgtcactcttccatgtaatcacaccctatgcaagccctgcttccaatccacggtggagaaggcgtcactgtgttgcccattttgtagacgccgcgttagtagctggacaagatatcacacgcgaagaaattctctggtcaacgtggagctgtggacaattattcaaaaacattatccccgagagtgcaaactgagagcgtccgggcaagagtccgaagaagtcgcagacgactatcagccggtcagattgctgtccaagcctggtgagctgcggagggagtatgaggaggagatctccaaggtagctgctgagagaagggcctccgaagaggaggagaacaaagccagtgaggagtacatccaaaggctgctcgcggaagaggaggaggaagaaaagagacaggcagagaagaggcgtagggctatggaagaacagctgaaaagcgacgaagagcttgcacgaaaactctcaatagatatcaataacttttgcgagggcagcataagtgcaagtcccctcaatagtaggaagagtgacccagtgactccaaaatccgagaagaaatctaaaaacaagcagagaaataccggagacattcagaagtatttgacacccaaaagccaatttgggtctgcttcacacagcgaggctgtacaagaagtgcggaaggattctgtcagcaaagatattgactcttctgataggaagtctcctaccgggcaggacaccgaaatcgaagacatgcccacattgtcaccccaaatctcgttgggcgtaggagagcagggggccgattcctctattgagtcacctatgccctggctgtgcgcatgcggcgcagagtggtatcacgaggggaatgtaaaaacaagaccatccaatcacggaaaagaattatgcgtgctcagccacgagcgacctaagactcgggtaccatactctaaggaaaccgccgtcatgccatgtggcagaacagagagtggctgtgcgccaacttcaggagtgacccagaccaacggcaacaataccggggaaaccgagaacgaggagagctgcttgttaatctctaaggaaatctccaagcgaaaaaaccaggagagtagcttcgaagctgtgaaagacccctgcttcagtgccaaaaggcggaaagttagccccgagagcagtcctgaccaggaggagacagaaataaatttcactcaaaagctcatcgatttagagcatttactctttgagagacataagcaggaggagcaagaccggctgctggctctgcaacttcagaaagaggtcgacaaagagcagatggttcctaatcggcagaagggtagccccgatgagtatcacctacgggctactagcagcccccccgacaaggtgctaaatgggcagcgcaaaaatcctaaagatgggaatttcaaaaggcagacacacacgaaacacccgaccccagagcgcggatcacgtgataagaaccggcaggtatccctgaagatgcaactgaaacaatcagtgaataggaggaaaatgccgaactccactcgcgaccactgcaaggtctccaagagtgctcatagtttgcagcctagcatctcccaaaaaagtgtgttccagatgtttcaacggtgcaccaagtag

SEQ ID NO: 203855 - DNA, 1716 bp, synthetic construct
  misc_feature 1..1716: note = Description of Artificial Sequence: Synthetic coding sequence
  source 1..1716: mol_type = other DNA
atggccctgcccaaggacgccatccccagcctgagcgagtgccagtgtgggatatgtatggagattctggtcgagcccgtgactctgccgtgtaaccacaccctgtgcaaaccttgttttcagtcgacagtggaaaaggccagcctgtgctgccctttttgcagacgccgggtctcttcttggacgcgttatcacacgcggcgtaactccctggtaaatgtggagctctggacaattatccagaaacattacccgcgagagtgcaagctacgcgccagtggccaagagtccgaggaagtggccgacgactaccagccagtgcgcctattgtctaaaccgggagagctgcggagagagtatgaggaggagatctcaaaagtcgccgcggaaagacgggcctctgaagaagaagagaacaaagccagcgaggagtatatccagcgcctcttagccgaggaggaagaagaggagaagcggcaggcagagaagagacggcgcgctatggaggagcagctgaaaagtgatgaggagttggcgaggaagttaagcatagatataaataacttttgtgaaggtagcatttcagctagccccctgaactcacggaagtcagatcccgtaacgcccaaatcagagaaaaaatccaaaaacaagcagaggaataccggcgatatccaaaagtaccttactccaaaaagccagtttggctctgcctcacattcagaggcagttcaagaagtgagaaaagattcagtgtctaaagatattgacagttctgacaggaagagtccaaccgggcaggataccgagatagaagatatgcccaccctttctccgcagataagtctgggcgtgggcgagcagggggctgactcatcaatagagtccccaatgccctggttgtgcgcctgcggcgctgagtggtatcacgaagggaatgtgaagacacgcccaagcaatcacggaaaggagctttgtgtgctctctcacgagcggcccaagacccgtgtcccgtatagcaaggagaccgccgtgatgccttgcggcagaactgaatccgggtgtgcacccactagcggcgtgacccagactaacggtaacaacacaggtgagacagaaaacgaggagtcatgtctgctgatcagtaaagaaatctcaaagaggaagaaccaagagtcttcattcgaggcagttaaagacccgtgtttcagcgccaagaggaggaaagttagcccggaaagtagcccagatcaggaggagacggaaatcaacttcacccagaaactgattgaccttgaacaccttttgttcgagaggcataagcaagaggagcaggatagactgctcgcattacagctgcaaaaagaggtggacaaggagcagatggttcctaaccgtcaaaaaggatcccccgacgaataccatcttcgcgccacaagctccccacccgacaaggtgctgaacggacagcgtaaaaatcccaaagatggcaactttaaaaggcagactcataccaaacaccccacccccgagagaggtagccgagacaagaatcggcaggtatcccttaaaatgcagctgaaacagtcggtgaatagacgcaagatgccaaactctacaagggatcattgcaaggtctcaaagtccgcacactctctgcagccttccatcagtcagaagtccgttttccagatgttccaaagatgcacaaaatag

SEQ ID NO: 203856 - DNA, 4872 bp, synthetic construct
  misc_feature 1..4872: note = Description of Artificial Sequence: Synthetic coding sequence
  source 1..4872: mol_type = other DNA
atggccgccgaggccagcaagaccggccccagccggagcagctaccaaaggatgggccgcaagtctcagccctggggagctgctgagattcagtgtactagatgtggtaggagggtgtcccggagctcaggccatcactgtgagttacagtgtggccatgccttttgcgagctctgcctgcttatgaccgaggaatgcaccacaataatctgtccggattgcgaggtggccacagcagttaatacaaggcaaagatactaccccatggccggctacatcaaggaggatagtattatggaaaaactgcagccaaagacaattaagaactgctcccaagatttcaaaaaaaccgccgaccagcttacaactgggctcgagagaagcgctagcacagataagacactgcttaattcatctgctgtgatgctggatacaaacactgctgaggagatcgacgaggcgttaaacacagcgcaccattccttcgaacagctgtcaatcgctggcaaggcactcgagcacatgcagaagcagaccattgaggagcgcgagcgcgtgatcgaagtggtggagaagcaatttgatcagttgctcgccttttttgatagcaggaagaagaacctgtgcgaagaattcgctagaacgaccgacgactatctgtccaacctgatcaaggccaaatcttacatcgaggagaaaaaaaacaacctgaatgctgccatgaacatcgctcgcgcgctgcagctgtccccgagcctgcgcacatattgcgaccttaaccaaataattcggaccctgcagctcacatccgactctgagttagctcaggtgagctcccctcagttgagaaatccaccacgactgtccgtaaattgtagtgaaatcatctgtatgtttaataatatgggaaaaattgaattccgcgattccacaaagtgctatccacaggaaaacgaaatccgacagaatgtccagaagaagtataataataaaaaggagctgtcgtgctatgacacgtaccctccacttgaaaagaagaaggtggacatgagcgtgctgaccagtgaggccccgcctccgcctctgcaacccgagacgaatgatgtgcatttagaggcaaagaactttcaaccacaaaaggacgttgccactgcaagtcccaagactattgctgtactgccccagatgggctccagccccgatgtgatcattgaggagatcattgaggacaatgtagaatcttccgctgagcttgtgttcgtctcccatgtgatcgacccatgtcatttttacatcaggaaatactcacagatcaaggatgcgaaagtcctggaaaaaaaggtgaatgaattctgtaacaggagctcccatctggatccatctgacatcctcgagctcggtgcacgaatcttcgtgagctcgattaagaacggcatgtggtgcagaggcaccattaccgagctcattccgatcgagggccgcaacacccggaagccgtgttcacccacccgcctctttgttcatgaagtggccctgatacagatttttatggtcgattttggaaactccgaggtgcttatcgtcaccggcgtggtggatacccacgttcggcccgaacatagcgccaaacagcatatcgctctgaatgatctctgcctggtactgagaaagagcgagccgtataccgaaggtctgttgaaagacatacagcccttagctcagccttgcagtcttaaggacattgtaccacagaattctaacgagggatgggaagaagaggccaaggttgaatttctgaagatggtcaacaacaaggctgtaagcatgaaggtgtttagggaggaggacggtgtcctgatagtggatctgcaaaagccacctcctaataaaatctccagcgatatgcccgtctctttgcgggacgcactggtgttcatggagctcgccaaatttaaaagccagagcctgcgcagtcactttgagaaaaatacaactctgcattaccatccacccatccttccaaaggagatgaccgatgtctcagtcactgtttgccacattaactccccaggcgatttctaccttcagcttatagagggtttagacattctctttttgctgaagacaatcgaagaattctataagtcggaagatggagaaaatctggagatactgtgcccggtacaggaccaggcgtgtgtcgcaaagttcgaagatggcatttggtaccgcgccaaagtgatcgggctgcctggccaccaggaagttgaagttaaatatgtcgacttcggcaacaccgcaaagatcacgataaaggacgttcggaagatcaaggacgaattcctaaatgcccccgaaaaggctataaagtgcaaactggcctatattgagccatataagaggaccatgcagtggagcaaggaggcgaaggagaagttcgaagagaaagctcaggataagttcatgacatgttctgtgataaaaattcttgaagacaatgtgctgcttgtcgagctgtttgactctctaggggcccctgagatgacaaccacatcaattaacgaccagctagtaaaggagggcctcgctagctacgaaattggctacattttaaaggataacagtcaaaagcatatcgaagtatgggaccctagtcccgaggaaattatctcaaatgaggtacacaatctgaatcctgtgtccgccaagagtttgccaaacgagaactttcagagcctgtataataaggagctccccgtgcacatttgtaatgttatctctcccgaaaaaatttatgtgcagtggctgctgaccgagaacttgctgaattccctggaagagaaaatgatcgcagcttatgaaaattcaaagtgggagccagtgaagtgggagaacgatatgcactgtgctgtgaaaatccaagataagaatcaatggcggcgcggacagatcatccgtatggtcactgataccctggtggaagttttgctttatgatgtcggtgtcgagctggtggtgaatgtggactgtctgagaaagcttgaggagaacttgaaaacaatggggcgtctttcactcgagtgttctctggtcgacattcggccagccggaggatctgataagtggaccgcaacagcttgcgactgcttgtctctgtatctgactggcgccgtcgcaaccattatcctgcaggtggactctgaggaaaataatactacttggcctctgccggtcaaaatcttttgccgagacgagaagggtgagagggtggatgtctccaaatatctgatcaaaaagggcttagccttgcgagagcgacgaatcaacaacctcgataattcccactctttgtccgaaaagagtctggaggtgcctctggaacaagaggactctgtcgtcaccaattgcataaaaacaaattttgatccagacaagaagaccgccgacatcatctccgaacagaaagtctctgagttccaggagaagattcttgagccacgcaccactagggggtacaaacctcccgccatccccaacatgaacgtgttcgaggctaccgttagctgtgtgggggatgatggaacaattttcgttgtccccaaattgtccgaattcgaactcattaagatgacgaatgagattcagtcaaatttgaaatgcttgggactcctagaaccgtacttctggaaaaagggagaagcctgtgccgtacgcggtagtgacacactgtggtaccggggcaaagtaatggaggtggtaggcggagccgtgagggttcaatatttggaccacggattcacagagaagatcccccagtgccacttatatcctatcctcctatatccagacatccctcagttctgtattccatgccagctgcataacactacgccagtgggaaatgtgtggcagcccgatgctatcgaagtcttgcagcagctgctttcaaaacgccaggtcgacatccatattatggagctgcctaagaatccttgggagaaactgagcattcacctgtactttgacggcatgtccctgagctactttatggcctactataaatattgtacctcagaacacacagaagagatgctgaaggaaaaaccaagaagtgaccacgataaaaagtatgaagaggaacagtgggagatcaggttcgaggagctgctttccgcagagaccgataccccactgcttcccccttacttatccagctcactgccctctcctggagaattatacgcagtgcaggtgaaacatgtggtgtcgcccaatgaggtgtatatatgcttggattccattgaaactagtaaccagtcaaaccaacactcagacacagacgattctggcgtgagcggggaaagtgagagtgagagcttggacgaggcacttcaaagagtgaacaaaaaagtcgaggctcttcctccactgaccgattttaggacagagatgccatgcctggccgagtacgacgacgggctctggtacagggctaaaatcgtggctattaaggagttcaaccctttgtccatactggtccagtttgtcgactacggatcgactgctaaactgactctgaaccgcttatgccagatacctagccatctcatgagatacccagcaagggcaattaaggtgctattggccggttttaaaccaccccttcgcgatctcggcgaaaccagaatcccctattgtcctaagtggtctatggaggcactatgggctatgattgactgtctccaagggaagcagctgtatgcagttagtatggctcctgcccctgaacagatcgtgactctgtatgacgacgaacagcatcctgtccatatgcctctggtcgagatggggctggcagacaaagacgagtag

SEQ ID NO: 203857 - DNA, 1350 bp, synthetic construct
  misc_feature 1..1350: note = Description of Artificial Sequence: Synthetic coding sequence
  source 1..1350: mol_type = other DNA
atggccgccgaggccagcaagaccggccccagccggagcagctaccaacgaatgggacgcaagtcacagccatggggggcggctgagatacagtgcacacgctgcggacggagagtgtctcgctccagcggacatcattgcgagcttcagtgcggtcacgccttttgcgagctttgcctcctcatgacagaggaatgtaccaccattatttgcccagactgcgaggtggcgactgctgtcaatacccgacagcggtactaccctatggccggttatattaaagaagattccataatggaaaaattgcagcccaagactatcaagaactgttcccaggacttcaaaaaaaccgccgatcagttaaccactggtttggagaggtctgcctctacagataaaactcttcttaactctagcgccgtcatgctagacacaaataccgctgaagagattgacgaggctcttaacaccgcccaccactcctttgagcagctctctatagctgggaaagcacttgagcacatgcaaaaacagaccatagaggagagagaacgggtaattgaggttgtcgagaaacagtttgatcagctgctggctttttttgatagccggaagaagaatctctgcgaggagtttgcccgcacaaccgacgattacctgtccaatttaataaaagccaagtcctacattgaggagaaaaagaacaacctgaatgcggctatgaacatcgccagagcattacagctgtctcccagcctacgcacctactgtgatctcaatcagatcattcgcactttacagctgacatcagattccgagctggcccaggtgtcttcaccccagctccgcaatcctcctcgcctgagtgtaaactgctcagagattatttgcatgtttaataacatggggaaaattgaatttagagatagtaccaaatgctacccgcaggagaatgaaatcagacagaacgttcaaaaaaaatacaacaataaaaaagaattatcatgctacgacacatacccacccctggaaaagaagaaggtcgacatgagcgtgttaacatcggaggcccctcctcctcctttgcagccagagactaacgatgttcacctcgaggcaaagaatttccagcctcagaaggatgtggccaccgccagtcccaagactatcgccgttctcccgcagatggggtcctcccccgatgtgattattgaggagattattgaagacaacgtggagacatgcggcactgatgaccttggtgaaacgccgaggtaccctaagaaacccctacagaaaaattcatcggtgcctttcggtagtaaggccgacaccgtgaccactgtttag

SEQ ID NO: 203858 - DNA, 4746 bp, synthetic construct
  misc_feature 1..4746: note = Description of Artificial Sequence: Synthetic coding sequence
  source 1..4746: mol_type = other DNA
atggccgccgaggccagcaagaccggccccagccggagcagctaccagcgtatggggaggaagagccagccttggggggccgccgaaatccagtgtacacggtgtggaaggagagtgtcacggagttcaggtcatcactgcgagcttcagtgcggccatgctttctgtgaactgtgcttactcatgacagaagagtgtactaccatcatctgccctgactgtgaggtcgccacagccgtaaacacacggcagcgctactaccctatggcagggtacatcaaagaggattccatcatggagaagctccagcctaaaactatcaagaattgctcacaagacttcaagaagacggcagatcagttgaccactgggctggaacggtccgcctccactgataaaaccctacttaattcgtctgcggtgatgctcgacacaaatacagccgaggagattgacgaggccctgaatacagctcaccactctttcgaacagctgagcatcgctgggaaggcgctcgagcatatgcagaagcagactatcgaggagagggagcgagtgattgaggtagtagagaagcaattcgatcagctgctagcgtttttcgattccaggaaaaaaaatctatgtgaggaatttgcccgcaccaccgacgactacctgtctaacttgataaaggcgaagtcttatatcgaagagaaaaaaaataacctcaacgccgctatgaacatcgccagagctctgcagctatctcctagtctccggacatactgcgatctgaaccagatcatcaggacacttcagcttacatccgattcagaactggcacaggtgagcagcccccaactgagaaaccctcctcgactgtccgttaattgctcagagattatatgtatgttcaataatatggggaaaatcgagttccgtgatagcaccaagtgttacccccaggagaatgagatcaggcagaatgtacagaaaaagtataacaacaagaaggaactgagttgctacgatacttacccccccttagagaaaaaaaaggtggacatgagtgtactgactagcgaggccccgcccccacctctccaacccgaaaccaatgacgtgcatctcgaagctaagaatttccaaccccagaaggacgtcgccaccgctagccccaagacaatcgccgtgctccctcagatgggatcctccccagacgtgatcatcgaggagatcatagaggataacgtggagtcctccgcggaactagttttcgtcagtcacgtgattgatccctgccacttctacatccgcaaatatagccagatcaaggacgcaaaggtgctcgaaaaaaaagtaaatgagttctgtaaccggtccagtcaccttgacccttcagatattttggagctgggtgcgagaattttcgtatctagtattaagaatggaatgtggtgtagagggaccatcacagaactgattcccatcgagggtaggaacactcggaagccctgtagtcccacccggctgtttgttcatgaggtagcgctcattcagatatttatggtggattttggaaactctgaagtattaatcgtgacaggcgtggttgatacacatgtgcgcccagagcacagcgcaaaacagcacatcgccttgaatgatctctgtctcgtgctcaggaagagcgagccttataccgaagggctgctgaaggatatccaaccactcgcgcaaccctgcagcctgaaggatatcgtccctcagaatagtaatgagggatgggaagaggaggcaaaggtggagttcctgaaaatggttaataataaggccgtgtccatgaaggtgtttcgagaagaagacggcgttctcatcgttgacctccaaaaaccaccaccaaataaaatcagttcagatatgcccgtgagcctccgggacgcgcttgtgttcatggaactggccaaattcaagagccagtcacttagatcacacttcgaaaaaaatacaacactccactaccatccccccattttgcccaaggagatgaccgatgtctcagtgaccgtctgtcacattaacagccccggggacttctatctgcagctcatcgagggactcgatatcctctttctactgaagacaattgaagagttctacaagtcagaggacggtgagaatctggagattctgtgccctgtgcaggaccaagcatgtgtggctaaattcgaagacgggatttggtacagggccaaagtgatcggactgcctggccaccaggaagtggaagtcaagtatgtggattttggaaacacagctaaaataaccattaaggatgtacggaagattaaggatgaatttttaaacgcgccggagaaagctatcaagtgcaagcttgcttatatcgaaccctataagagaactatgcagtggtctaaagaggccaaagagaaattcgaggaaaaggcccaggacaagttcatgacttgttcagtgattaagatcctggaggataatgtgcttcttgtggagctatttgatagcctaggcgcccctgaaatgacaactaccagcatcaatgatcaactggtcaaggagggtctcgcctcctatgagatcggttatatcttgaaggacaattctcaaaagcatattgaagtctgggatccaagcccagaagagattatcagtaatgaggtccataatttgaaccccgtgtccgctaaatccctgcccaacgagaacttccaatcgttgtacaacaaagagctgcccgtccatatctgcaatgtgatttctccggagaaaatctacgtgcaatggctgctgacagagaacttattgaacagtctcgaggaaaagatgattgctgcctatgagaactccaagtgggagccggtgaagtgggaaaatgacatgcattgcgcggtcaagattcaggacaaaaatcagtggcggcggggacagattattaggatggtgacagatactctggtggaggttttactatacgacgtaggagtggaactcgtcgtaaatgtcgactgcctgcgaaaactagaagagaacctgaaaaccatggggcgactcagcctggagtgcagcctagtcgacattagacccgctggtggttccgataagtggaccgctaccgcgtgtgattgcctgtcactctacctgacaggagcggttgccaccataattctgcaggtggattcagaggagaataatacgacctggcctctgcctgttaaaatattctgtcgcgacgagaaaggcgaaagggtagacgtgagcaaatacttaatcaaaaagggccttgctcttcgcgagcgaagaatcaacaatctggataacagccattctctcagcgaaaaatccttggaggtgccacttgagcaggaggactctgtggtgacaaattgcatcaagacgaacttcgatcctgacaagaagaccgcagacatcatctcagaacagaaagtctcagagtttcaggaaaagatcctggaaccacggaccacaaggggctacaagccccctgctatccccaacatgaatgtgttcgaagctactgtttcatgcgttggagacgatgggaccattttcgtggtgcctaagctctctgagtttgaactgatcaagatgacgaatgaaatacagagtaacctcaagtgtctgggccttctggaaccttacttctggaaaaaaggggaggcctgcgcggtacgcggtagtgacactctgtggtaccgcggtaaggtcatggaagtagttgggggcgccgtgcgagttcaataccttgatcatggctttacagagaaaatcccccaatgccacttatacccaatattgttgtatccagatatccctcagttttgcataccatgtcagctgcataacaccacacccgttggcaacgtttggcaacccgacgctatcgaagtgctgcagcagcttttgtctaaacggcaggtagacatccacatcatgaagcctcgatccgaccacgacaagaagtacgaggaggagcaatgggagatcagattcgaggagttgttgtccgccgaaacagatactccactcttaccaccataccttagttcatcattgccaagcccgggcgagctgtatgccgtgcaggtgaaacatgtagtgtctcctaatgaggtctacatttgtctggactccattgaaacgagtaatcagtcgaatcagcactctgacaccgacgactccggcgtctcaggtgaaagcgaatcagagtcgctggatgaggcactgcaacgcgttaataaaaaagtggaagccctgcctcctttgaccgacttccgtaccgagatgccttgtctcgccgagtacgacgacgggctgtggtacagggcaaagattgtcgccattaaagagtttaatccactctccattctcgtccagttcgtggattacggatctacagccaagctgaccctgaaccgcctctgtcagattcctagccacctgatgcgctatccggcacgcgctattaaggtcctgttggctgggttcaagcctcccctgcgcgacctgggggaaaccagaatcccttactgtccgaagtggagtatggaagcgctttgggctatgatagattgcctgcagggaaaacagttgtatgctgtaagcatggcccccgctccagagcagattgtcacactgtacgacgatgaacagcatccagtgcatatgcccctcgtggagatgggtttagctgacaaggacgagtag

SEQ ID NO: 203859 - DNA, 3207 bp, synthetic construct
  misc_feature 1..3207: note = Description of Artificial Sequence: Synthetic coding sequence
  source 1..3207: mol_type = other DNA
atgctggacaccaacaccgccgaggagatcgacgaggccctgaacaccgcccaccacagttttgaacagctcagcatagctggcaaggcccttgagcacatgcagaagcagaccatcgaagaacgagaacgagttattgaggtggtcgaaaagcagttcgaccaactgttagcctttttcgacagccggaagaaaaatctttgcgaggagtttgcaaggacgaccgacgactatctcagtaacctcatcaaggcaaaaagctatatcgaagaaaagaagaacaatttgaatgcagccatgaacattgcaagagctcttcagttaagtccgagcctgagaacatactgtgacttgaatcaaattatccgcactctgcaactgacttcagactcagaactcgcccaggtgagctctccgcaactgcgcaatccaccgcgcttgagcgtgaactgttccgaaattatttgtatgtttaataatatgggcaaaatcgagtttagggactcgaccaaatgctacccacaggagaatgagataaggcagaatgtgcagaagaaatacaataacaaaaaggagctgtcatgctacgacacttatccaccgttggaaaaaaagaaggtggacatgagcgtcctgacctccgaagctccccccccccctctccagcccgagaccaatgacgtacatctggaagcgaaaaattttcagccacaaaaggacgtggccaccgccagccctaagacaatcgctgtgttaccccagatggggtccagtcccgacgtcatcattgaggagatcatcgaagacaatgtcgaatcatcagcggagctggtcttcgtaagtcacgtcattgatccttgtcacttctatatacgtaagtatagtcaaattaaggatgccaaggtcctggaaaagaaagtgaacgagttctgcaacagatctagccacttagatccgagcgacattcttgagttgggtgccagaatctttgtctcttcgattaagaacggtatgtggtgtagagggaccataacggaacttataccaattgaaggaaggaacacacggaagccctgctcacctacacggttattcgttcatgaagtggcgcttatacagattttcatggtcgactttggaaactcagaagttctgatcgtgaccggagtggttgatacacatgttcggcccgagcactcagctaagcaacatattgccctgaacgatctgtgtctggtcctgcgcaagtctgagccatataccgaagggcttctgaaggatattcagcccctcgctcaaccttgctccctaaaagatatcgttccccagaacagcaacgagggctgggaggaggaagcgaaagttgagtttcttaagatggtcaacaacaaagccgttagtatgaaagtctttagagaggaagacggtgtgttaatcgtagacttacaaaagcctcctccaaataagatcagctctgatatgcctgtgtcccttagagatgcactggttttcatggagcttgcgaaattcaaatcacaaagcctgcggtcacattttgagaagaatacaaccctacattatcacccgccaattttgccaaaggagatgacggacgttagcgtaacagtttgccacataaacagccccggagatttttacctgcagctcattgaggggctggacatccttttcctcctaaaaacaattgaggaattttataagtctgaggatggcgaaaacctggaaatcctttgcccagtacaggatcaagcttgcgtggccaagttcgaagacggaatctggtatcgcgccaaggtcatcgggctcccaggtcaccaagaggtggaagtgaaatacgtagattttgggaatactgcaaagattaccatcaaggacgtacggaaaattaaggacgaattcctgaatgcacctgagaaggccattaagtgcaagttagcctatatagaaccatataagcgaacaatgcaatggtctaaggaggccaaagagaaattcgaagaaaaggcccaggacaaatttatgacctgctctgtgatcaaaatcttggaggacaatgtcctattggtggaactcttcgattcactcggagccccagaaatgaccaccaccagtattaacgaccaactcgttaaagaaggactcgcatcctatgagattggctatatcctgaaggacaactcccagaagcacatcgaggtttgggacccctctcccgaagaaattatctcaaacgaggtgcacaatctgaacccagtttctgctaagagcttacctaatgagaattttcagtctttgtacaacaaagagctccccgtgcatatttgcaacgtgatctcacccgaaaagatttacgtgcaatggcttctgacggaaaatctgctcaattctttagaagaaaagatgatcgccgcatacgagaactccaaatgggagccagtgaagtgggagaacgacatgcactgcgctgtgaagatccaggacaaaaatcaatggcggcgcggccaaatcatccgcatggttaccgacacacttgttgaagtccttttgtacgacgtaggtgtcgaactggtcgtcaatgtggactgccttcgtaagctagaggaaaacttgaagacaatgggtagattgagcctcgagtgttcgcttgtggacatcagaccagctgggggctcagacaaatggacggcaaccgcttgtgactgcctgagcttgtatttaaccggagccgtggctaccatcatactgcaagtggattcggaagagaacaacaccacatggcctctccccgtgaagatcttctgtcgcgatgaaaaaggcgagagagttgacgtgtcaaaatatctgataaagaaaggactcgcgttgcgggagagacggattaataatcttgacaattctcatagcctgagtgaaaagtcgctggaagtgccactggagcaagaggactccgtggttactaattgcattaagactaactttgatcctgacaaaaagaccgccgatattatttccgagcagaaggtcagcgagttccaggagaagatcctggaaccaaggactacaagaggctacaagccccccgccatcccaaatatgaatgtgttcgaggccacagtttcctgcgtgggagatgacggtacaatctttgtggtgccaaaactttccgaattcgagctaattaagtag

SEQ ID NO: 203860 - DNA, 462 bp, synthetic construct
  misc_feature 1..462: note = Description of Artificial Sequence: Synthetic coding sequence
  source 1..462: mol_type = other DNA
atggccagctacttcgacgagcacgactgcgagcccagcgaccccgagcaagagacaaggaccaacatgctccttgagcttgctagatccctgtttaatcgcatggacttcgaggacttgggcctggtggtagactgggaccatcatctgccaccgcccgccgctaaaacagtggtggagaatttacctcgcaccgtgattaggggctcacaggccgagcttaagtgcccggtgtgtctacttgagttcgaggaggaagaaactgccatcgagatgccttgccaccacctcttccactcttcctgcatcctgccctggctgtctaaaacaaatagttgcccactctgtcggtacgaacttcccacggatgacgatacctacgaagaacacaggagggacaaggcacgaaaacagcagcagcagcatcgcctcgaaaatctccatggagctatgtatacatag

SEQ ID NO: 203861 - DNA, 684 bp, synthetic construct
  misc_feature 1..684: note = Description of Artificial Sequence: Synthetic coding sequence
  source 1..684: mol_type = other DNA
atggcctgcaccaagaccctgcagcagagccagcccatcagcgccggcgccaccactacgacaaccgccgtggcacccgccggagggcattcgggcagcacagagtgcgacctcgaatgtctcgtatgccgagagccgtactcttgcccacggcttcctaaacttcttgcctgccagcatgccttttgcgcgatttgcctcaagctactcctgtgtgtgcaagacaatacctggtctatcacttgcccattgtgcagaaaagtgactgcagtacccggtggactgatttgttcactgcgtgaccacgaggctgttgtcggccagttggcacaaccatgcactgaagtgagcctatgtccacagggcttggtcgatcccgcagacctggccgccggacacccaagtcttgtcggtgaagatgggcaggacgaggtgtccgcaaatcacgtcgctgctagacgactagccgctcatcttttgctgctggctttgttgataatactgatcggcccgtttatttaccctggagttcttaggtgggtgctcaccttcattatcgctttggctctcctcatgtcaaccctgttttgttgcctgccaagcacccgcggctcttgctggcctagttctaggactttgttctgcagagagcaaaaacacagccacatttcgtccatcgcctag

SEQ ID NO: 203862 - DNA, 795 bp, synthetic construct
  misc_feature 1..795: note = Description of Artificial Sequence: Synthetic coding sequence
  source 1..795: mol_type = other DNA
atgagccaggccgtgcagaccaacggcacccagcccctgagcaagacatgggagttgtctctctatgaattgcaaagaacacctcaagaggcaattactgacggtctggagatcgttgtgagccctcgaagtctgcatagcgaactcatgtgccccatctgcctcgatatgctgaagaataccatgacaacgaaggaatgcctgcaccgcttctgcgcggactgcattattacggccctgaggtccggcctgcagagggggaagaagcagcagatcgagaacgggtcaggagcagaggacaacggagattcaagccattgctctaacgcatcaacccactctaaccaggaagctgggccatctaacaagcggaccaagacatccgatgacagcggtctcgagttagataacaacaacgccgcgatggcgattgaccccgtgatggatggggcctcagaaatagaactcgtgttccgcccacaccctactctgatggaaaaggatgactccgcccagacgaggtatataaaaaccagtgggaatgctacagtggatcatctgagcaagtacctggcagtacgtctggctttagaggaactcagatccaaaggagagagcaaccagatgaacctcgacacggcctctgagaagcagtacaccatttacatcgctaccgcgagtggacagttcaccgtgctgaacggatctttttccctggaattggtgagtgagaagtattggaaagtgaacaaacccatggaactgtactacgccccaaccaaagagcacaagtag

SEQ ID NO: 203863 - DNA, 1011 bp, synthetic construct
  misc_feature 1..1011: note = Description of Artificial Sequence: Synthetic coding sequence
  source 1..1011: mol_type = other DNA
atgagccaggccgtgcagaccaacggcacccagcccctgagcaagacctgggaactgagcctctatgagctccagcggactccgcaggaggcgataacggacggactggagatagtggtgtcgcctcggtcgctgcactccgagctgatgtgtccgatttgcctggacatgctaaaaaataccatgaccactaaggagtgtctccaccggttttgcgctgattgcataatcactgccctccggagcgggaacaaagagtgccccacctgcagaaagaagctggtctcaaagaggtcactcaggccggatccaaacttcgacgctttaatttccaaaatttatccatcgcgggatgagtatgaagcacatcaggagagagtcctcgccaggataaataagcacaataatcagcaagcactcagtcattcaatagaggagggactcaagatccaggcaatgaataggcttcaacgcgggaagaagcaacagatcgagaacggcagtggcgccgaggataatggggacagctcccactgcagcaacgcatctacgcactccaaccaggaagctggaccatctaacaagcggactaaaacctctgacgatagcggactcgaattagacaataacaacgcagccatggcaattgaccccgtgatggatggcgcctctgaaatcgaactggtcttccggccgcaccctacgctgatggaaaaggacgattctgctcaaaccaggtacataaagacaagcggcaatgccacagttgatcatctgtccaagtacctcgctgtacgcctggccctcgaagaactgaggagcaagggggaaagcaaccaaatgaacctggatacagcctctgaaaagcagtatacgatctatatcgcaacagcatcaggccagttcactgttctgaacggatcattttctctggaacttgtcagtgaaaagtactggaaggtgaataagcccatggagctgtattatgccccaactaaggagcataagtag

SEQ ID NO: 203864 - DNA, 741 bp, synthetic construct
  misc_feature 1..741: note = Description of Artificial Sequence: Synthetic coding sequence
  source 1..741: mol_type = other DNA
atgagccaggccgtgcagaccaacggcacccagcccctgagcaagacatgggaactgtccctttatgaactccagaggacacctcaggaagcaatcacagacggcctcgagatcgtggttagccctagaagtttgcactctgaactgatgtgccctatatgcttggacatgctgaagaataccatgacgactaaagagtgcttacacaggttctgtgcagactgtatcattacagccttgcgtagcggcaacaaggagtgccctacttgccgcaagaagctcgtcagtaaaaggagtctgagaccagaccctaacttcgatgcactaattagcaagatttaccccagtagagatgaatacgaagctcatcaggaaagagtgctggccaggatcaataaacacaacaaccaacaggcactgagccattcaattgaggagggacttaaaattcaggcaatgaataggttacagcgcgggaaaaagcagcagattgagaacggtagcggcgccgaggacaatggagactcaagtcattgcagcaatgcatctacacactccaatcaggaagccggcccttctaacaagcgtacaaagacaagcgatgattccggcctggagctggacaacaacaacgcagccatggctatcgatccagtgatggatggcgcctcagagattgagctggtcttcaggccacatcccaccctaatggagaaggatgatagcgctcaaacccgatag

SEQ ID NO: 203865 - DNA, 822 bp, synthetic construct
  misc_feature 1..822: note = Description of Artificial Sequence: Synthetic coding sequence
  source 1..822: mol_type = other DNA
atggccaactgggtgttctgcaaccggtgcttccagcccccccaccgaaccagctgcttctccctgactaattgtgggcacgtctactgtgacgcttgccttgggaaggggaaaaaaaatgaatgcctaatttgtaaagccccctgtaggaccgtcctactgagcaagcatacagatgccgatatacaggctttttttatgtccatcgacagcttatgcaagaaatatagtcgggagactagtcagtacctgagattgtccaggggctgttgtagactcaagctgtgtcccgcaaccagctccaaggaagtgcctcgtgggagtacacacgggagccaagctgccgcgcgggatccacaggagcactgggtctcgaccacacgcgcgcctaggccaggatgccggaggtctcagtcccaacctgaagcccaaggtaacaccattcaagatgcgcctcatccactgacgctacttcatccttcaaggaccttaattcatacaaaatcaccgtggggccagaagctgttggagttcattaagcacgtctgttatcatcgacaccagagccatcgaccttgcgctcccggatggttctgccaagtccttcaaaggccaggcgcagttagtggcgaaaaaacccaacagacccggcccgccccacccgcgacctgtctcctatgtttaagctgcttaagtggtttccggcacggcccttggcgctctcaagctcttcccagcgacctcgtggccccgttatttgttagctacacggtcgaggtgagtatcaccaacgccgggtggagcttccccgccgcagtttag

SEQ ID NO: 203866 - DNA, 699 bp, synthetic construct
  misc_feature 1..699: note = Description of Artificial Sequence: Synthetic coding sequence
  source 1..699: mol_type = other DNA
atggccaactgggtgttctgcaaccggtgcttccagcccccccaccggacttcgtgcttctccctaacaaactgtggtcacgtgtattgtgatgcttgcctaggaaaaggaaagaaaaatgagtgcctgatctgtaaggcaccatgtcggacagtcctgctaagcaaacatacggatgccgatattcaagcctttttcatgagcatagactccctttgcaaaaaatacagcagagagacctcgcagatattagagtttcaggagaagcaccggaaacggctgctcgcattttatcgcgaaaagatctcccgcctcgaggaatcattaaggaaaagtgttctgcaaatcgagcagcttcagagcatgcggagcagtcagcagacagctttcagcacgataaaatcttctgtcagcacaaaaccacacggctgcctgctgcctccacactccagcgctcctgaccgcctggagagcatggaggtcgatctgtccccttctcctatcagaaagtctgagattgccgcaggaccggcccgcatctccatgatcagtcccccccaagatggtagaatggcgccctgtgctagaagagtgtgccactttcaaaggttcaccatgttcctgcatcggagactaagctcactcgctgctcccccgagcgttcagttttggaaagccagggggacccatcagttgtag

SEQ ID NO: 203867 - DNA, 894 bp, synthetic construct
  misc_feature 1..894: note = Description of Artificial Sequence: Synthetic coding sequence
  source 1..894: mol_type = other DNA
atggccaactgggtgttctgcaaccggtgcttccagcccccccacagaacatcctgcttctctctgaccaattgtggtcacgtttactgtgacgcctgtctgggcaaaggaaaaaagaacgagtgcctgatatgtaaggccccatgtcgcaccgtgctcctctctaagcatacagacgcagacatacaggccttctttatgagtattgacagtttatgtaagaaatactcacgcgaaacgtcccaaattcttgagttccaggaaaagcacagaaaaagactgctcgctttctatcgtgagaaaattagcagactggaagagagtttgagaaagtccgttctccagattgagcaattgcaaagcatgagatcgtcacagcaaaccgcttttagcacaattaaatcaagtgtaagcaccaagccgcacggctgtttgttgcccccacattctagcgcccccgataggctggaaagcatggaggttgacttgtccccatccccaatccgtaagagcgaaatcgcagccggccctgcgcggatatccatgatctctccaccccaggatggccggatgggtcctcacctcaccgcgtcattctgctttatcccctggcttacactctcaaaaccccctgtacccggagaatgtgtaatcagcagaggctccccatgcttctgcatagacgtgtgtccccactggttgctgctgctagctttcagttccgggcgacatggggaactcactaactccaaaacattaccgatttacgccgaggtgcagcgggctgttctatttcctttccagcaggcggaaggaactctggacacatttagaacccccgctgtatcagttgtgttccctttgtgccagtttgagaggaaaaagtctttttag

SEQ ID NO: 203868 - DNA, 3192 bp, synthetic construct
  misc_feature 1..3192: note = Description of Artificial Sequence: Synthetic coding sequence
  source 1..3192: mol_type = other DNA
atggagtgccccagctgccagcacgtgagcaaggaggagacccccaagttctgctctcagtgcggagaaaggctgcctcccgctgcacctatcgctgactcagaaaataacaattcaaccatggctagtgcgtcagaaggtgaaatggagtgcggccaggagttaaaggaggaggggggcccctgcctgtttccaggatccgatagttggcaggagaatcctgaggagccctgctcgaaagcgagctggaccgttcaagagagcaaaaaaaaaaaacggaagaaaaagaaaaaagggaacaagagtgcctcatcagaactggcatccctccccctgtcacctgcctcaccatgccaccttacactgctgtctaacccatggccacaggacaccgctctccctcattcccaggctcaacaatctggccctactggacagccaagccagcccccgggcactgccactacgcccctggaaggcgatggactgtcagccccaaccgaggtgggggattctcccttgcaggcgcaggcactcggcgaagccggagttgccacagggtccgaggcacagagttctccccagttccaggaccacaccgaaggggaggaccaggatgcgtcaattcctagcgggggacgcggactttctcaagaggggaccggtccaccaacttccgctggggagggtcacagcagaacggaggacgccgcccaggaactcctcctgccagagtcaaaaggcgggagctctgagcccgggactgagctgcagaccacagagcagcaggcaggggcgagtgccagcatggctgtggatgcagtggccgaacctgctaatgctgttaagggggccggaaaggaaatgaaagagaagacccaacggatgaaacagcccccggccaccacaccaccgtttaaaacccattgtcaggaagccgaaaccaagacaaaggacgagatggccgctgctgaggagaaagttggaaagaacgagcagggtgagccagaggacttgaaaaagccagaaggtaaaaataggagtgccgctgccgtgaagaacgagaaagagcagaaaaaccaggaggccgacgttcaggaagtcaaggctagtaccctctctcccggcggcggggtgacagtatttttccatgcaataatcagtttgcactttccttttaaccctgacctgcacaaggtattcatcagaggaggtgaagagttcggggaatcaaagtgggattcgaacatatgcgagctgcactacactagggatctggggcacgaccgcgtcttggttgaaggaattgtttgcatctccaagaagcacctggacaaatatatcccttataagtacgtgatctataatggagaaagtttcgaatatgagtttatctataagcaccagcagaagaaaggggagtatgtcaaccggtgcctgtttataaagtccagtctactcggcagcggggactggcaccagtactatgatatcgtctatatgaagcctcatggtagacttcagaaggtgatgaaccacatcacagatggccccagaaaagacttggtgaaaggcaagcagatcgccgccgctttgatgctggacagcacctttagcatcctgcagacatgggacacaataaacctcaattctttcttcacccagtttgaacaattctgtttcgtattacagcagccaatgatctatgaaggccaagctcagctttggacagacctacagtacagggaaaaggaagttaaacgctatctctggcagcacctgaagaagcacgtagttcctctgccggatggaaaaagcaccgatttcctaccagtagattgccctgtccgtagcaaactcaagaccggattgatcgtactgttcgtggtcgagaagattgagctgttactcgaagggagcttggattggctttgtcatctcttgacgtctgacgccagcagccccgacgagtttcaccgcgacctttctcatatccttggcatcccacaatcttggaggctatacctggttaacctgtgccagcggtgcatggacacccggacttacacttggctgggggctctgccagtgctgcactgctgcatggaactggctcctcggcataaagatgcctggagacagccagaagacacctgggccgcgctggagggcctctcgttcagcccattccgcgagcagatgctcgatacgagctcccttctgcaattcatgagagagaagcagcacttgctgagcatagatgaacccctctttcggtcctggttttctttgctgccccttagccatctcgtgatgtatatggagaatttcattgagcatctcggtagattcccggcacacattctggattgcctgagcggaatttattataggctgccgggactagagcaggtgctcaatacgcaagacgttcaggacgtgcaaaacgtgcagaatatcctagagatgctgctccggctcctagacacctacagggataagattccagaggaggccctgagtccaagttacctgactgtgtgtctgaaactacatgaggcaatttgcagctccaccaaactactcaaattctacgagctccccgccttatctgctgagattgtctgcagaatgataagacttctgtctctggtggattccgccggccaacgagatgagaccggaaataatagtgtgcagaccgtcttccagggcaccctggccgccacaaagagatggttacgagaagtgttcacaaaaaatatgctcacaagttccggtgctagctttacttatgtcaaagagatcgaggtctggcgaagactagtcgagattcagttcccggctgagcacggttggaaggagagtttgctcggtgacatggagtggcgtctcactaaggaagagcctctcagccagattaccgcctactgcaacagttgttgggacacaaagggtctagaggactcagtggcaaagaccttcgaaaaatgtattattgaagccgtgagcagcgcctgccaggtgaataatcttagctcatgggagactgatagcggtagtcagctgtgttctgctatgacccagcttcgggccatgaagcatcctcttggattgtcatcgtccgcgaatagtgagataggtaagtgggcgcctagctccctggctaaaggcaacggtgccgagatctag

SEQ ID NO: 203869 - DNA, 9843 bp, synthetic construct
  misc_feature 1..9843: note = Description of Artificial Sequence: Synthetic coding sequence
  source 1..9843: mol_type = other DNA
atggtgtgcgacggcgactgggagcactgctacctgcccagcgccttctctcaacataaagtgtttgtaaccccacaggcgcctctggaagccatacaggcctatttggcaggtcactacagagtccctaagcagacactgagcgcagctgctgttttcaatgatcgcctctgcgtagggattgtggcttctgaaagagccggagtcgggaagtctctatatgtaaaacgcctacatgataagatgaaaatgcagctcaacgtcaagaacgtacccttgaagaccatacggttgattgatccgcaggtcgacgagtctcgggtactgggcgccctgttgccttttctagatgcgcagtatcagaaagtacctgttctatttcacctggatgtcacaagttcagttcagaccggcatttgggtgtttctgtttaagctgcttattttgcagtacctcatggacatcaacggcaaaatgtggctgagaaatccctgtcatctgtacatcgtagagatattggaaagacggaccagtgttccgtcgaggtcttcaagcgcactacgaacacgggtgccccagttctccttcctagatatctttcccaaggtgacctgccgccctccgaaagaggtgattgacatggaactttctgcactgcggagtgacaccgagcccgggatggacctatgggagttctgctccgaaacctttcagcgaccgtatcagtacctcaggcgctttaatcaaaatcaagaccttgacaccttccagtaccaggagggctctgtggagggaaccccagaagaatgccttcagcacttccttttccactgcggagtgattaatcccagctggtctgagcttcgtaacttcgcgaggtttctgaactaccagttgagggattgtgaggccagcttgttttgcaaccccagttttattggggacaccctgcggggatttaagaagttcgttgtcacatttatgatttttatggcccgtgatttcgccactccttctctgcatacatctgaccagtcgccaggaaagcacatggtcaccatggatggagtgcgtgaggaggacctcgccccgtttagcctgaggaagcggtgggaatctgagcctcacccttatgtattttttaatgacgaccacaccactatgacctttatcggattccacttacagcccaatatcaatggaagcgttgacgccatttcccacttgaccggcaaggtgattaaaagagacgttatgacccgagacctctaccagggactgcttctgcagcgcgtcccatttaacgttgatttcgacaagttaccccgacacaaaaagttggagaggctctgtctgacactggggattccccaagctacagaccctgataagacgtatgagcttaccacagataatatgctgaaaatactagcgattgaaatgcgttttaggtgcggcattcctgtcatcattatgggcgagactggttgcggcaaaacacggctgatcaaatttctgtctgatttgagaagaggaggaactaatgctgacacaatcaaactagttaaagtacacggtgggactactgcggatatgatctactcccgggtgcgagaggccgaaaatgtagctttcgccaacaaagaccagcatcagctggataccatcctgttcttcgatgaggcgaataccaccgaggccattagctgtatcaaggaagtcctatgcgaccatatggtcgatggccagcctctggccgaggattctggcctacacatcatagccgcctgtaacccttatagaaaacatagcgaggaaatgatctgtcgcctggaatctgccggtctagggtaccgcgttagcatggaggaaacagctgacagactcgggagtataccgctccgccagctggtatatcgcgtgcatgctctccctcccagtctcatcccgctggtttgggatttcggacagctgagtgacgttgcggagaaactgtacatccagcagatcgtccaaaggctggtggagagcatcagtctggatgagaacggaacccgcgtgattaccgaggtgctctgcgcgagccaaggttttatgaggaagactgaggacgaatgctccttcgtctccctgcgcgacgtggaacgatgtgtaaaagtctttagatggtttcatgaacattccgctatgctgctggcccaacttaatgcgtttctgagcaaatccagcgtatctaaaaatcacacggagcgcgacccagttttatggtcactgatgctagcaattggggtgtgctatcatgccagtctcgagaagaaagattcttatagaaaggctatcgcccgcttttttcccaagccgtatgacgatagcaggttactactggacgagatcacccgagcccaggacttgtttctcgacggcgtcccgctgcgcaaaacaattgccaagaatctggccctcaaagagaatgtcttcatgatggtcgtatgcatcgagctgaagattcccctgtttctcgtcgggaagcccggctctagtaagagcctggccaagaccatcgtggctgacgccatgcaaggacctgccgcttacagcgatctatttcgcagcttgaagcaggttcacctcgtgtcttttcagtgttccccccatagcactccgcagggaattatatccacttttagacaatgcgcacgattccagcaaggtaaagatttgcagcagtacgtgagcgtcgtggtgctggacgaagtcggcttggccgaggatagtcctaaaatgcctcttaagacactgcatcctctgctggaagatggatgtattgaagacgacccggctcctcataaaaaagtagggttcgtaggaatctccaattgggccctggaccccgccaagatgaatcgcggcatttttgtgtctcgcggatccccaaacgaaaccgagctgatcgaatctgcgaagggaatttgtagcagcgacatcctggtgcaggaccgcgtgcagggatacttcgccagcttcgctaaggcttacgagactgtctgtaagcgccaggataaggaattttttgggctgcgtgactattatagcttgattaagatggtgtttgccgcagccaaggcctctaatcggaagcctagcccacaggacattgctcaagccgttctaagaaacttcagtggaaaggatgatatacaagcactggatatatttctcgcaaacctgcccgaggccaagtgtagtgaggaagtgtcaccaatgcagctcattaagcagaacatcttcggtcccagccagaaggtgccaggaggcgagcaggaggacgccgaatccaggtaccttctggtcctgacaaaaaattacgtggccctccagatcctgcagcaaaccttcttcgagggggaccagcagcctgaaattatctttggaagtggattccctaaggaccaagaatatacacagctatgtcgaaacattaatagagttaagatttgcatggagacaggcaagatggtgctgcttctgaatcttcagaatctgtatgaatcactgtacgacgctctgaatcagtactacgtccatctcgggggccagaaatacgtcgatctgggcctcggaacccaccgggtgaaatgtcgggtccacccaaattttaggctaatagttattgaggagaaggatgtagtgtacaaacattttcccatccccctgatcaatcgcctcgaaaaacattacctggatattaacacagttttggaaaagtggcagaagagcatcgtggaggagttgtgcgcttgggtggaaaagtttatcaatgtgaaagctcaccacttccagaagcgccacaaatacagtcccagtgatgtgttcatcggctatcactctgacgcttgtgcttctgttgtcctgcaggtgattgagcgacagggcccaagggcgttgactgaagagttgcatcagaaagtttccgaggaagctaagagtatcctcctgaactgcgccactcctgatgccgttgtaagactctccgcatacagccttgggggatttgcggccgaatggctcagccaagagtatttccaccgacaacgacataacagttttgccgatttcctgcaggcacacctccacacggccgatttagagcgacatgcaatttttaccgagattaccaccttctctaggcttctgacaagccacgattgtgagatcctggaaagtgaggtgaccgggcgggcaccaaagccaaccttgctgtggctgcaacagttcgataccgagtactcttttctgaaagaggtgcggaattgtctgactaacaccgctaaatgtaagattcttatttttcagaccgactttgaagatgggatccggtccgcccagctgatagcaagcgccaagtactccgtgattaacgaaataaataagatccgcgaaaatgaagacagaattttcgtgtacttcattactaagttatcaagagtcggacgcggcacagcctacgtgggatttcacggtgggctgtggcagtctgtacacattgacgacctgaggcgatccactctcatggtttcagacgtcactcgactgcagcacgtcactatctcacaattgtttgcacccggcgacttgcccgaacttggtctggagcaccgagcggaggacggacacgaggaggcaatggaaaccgaggcctccacttccggcgaggttgcagaagtcgccgaggaggctatggagactgaatcctccgagaaagtgggcaaagagaccagcgagctgggcgggagcgacgtatccatactcgacaccacacgcctgctgagatcttgtgtacagtccgccgtggggatgctcagggatcaaaacgaaagctgcactcgaaatatgcggcgcgtggtacttctgctgggtcttctgaacgaagacgacgcctgccacgcatcatttctgagggtgtccaaaatgcggctttctgtgttcttgaagaaacaggaagagagtcagttccatcctttggagtggttggcccgcgaagcctgtaaccaggacgcactccaggaggctggcacttttcggcatactctgtggaagcgcgtgcaaggagctgtgacacccctacttgctagtatgatctcctttatcgatagggatggaaacctggagttgctgactagacccgatacccctccctgggccagggatctgtggatgttcattttttccgataccatgctgctaaatatccctctggtaatgaacaatgagagacacaagggagaaatggcctacattgtagtgcagaaccatatgaacttaagtgaaaacgcctccaacaacgttcccttttcatggaagattaaggattatttagaagagctgtgggtacaggcacaatatatcaccgatgccgaaggcctccctaaaaaattcgttgatatctttcagcaaactccattggggcgatttttagcccagcttcacggtgagccccagcaggagttgctccaatgttaccttaaggattttatcctgctgactatgcgcgtgagtacagaagaggaattgaagtttttacagatggccctgtggtcctgtactagaaaacttaaggctgcctcggaagccccagaggaagaggttagcttgccatgggtgcatttggcttatcagagattcaggtctcgtctgcagaatttttcccgtattctgactatctacccacaggtattgcatagcctcatggaagcaagatggaaccacgagctggctggctgcgagatgaccttggatgctttcgccgctatggcatgtaccgagatgcttacccgaaacacccttaaaccttccccccaggcatggttgcagctggtgaaaaacctgtccatgccactggaacttatctgctctgatgaacacatgcagggcagcggttccttggcacaggcggtcatacgcgaagtgcgcgcacagtggtcaaggattttcagtactgcattattcgtcgagcacgtgcttctcggaacagagtccagagtgcccgaactacaggggctcgtgaccgagcatgtgtttctgctggacaagtgtctgagggagaattcagacgttaagactcatggaccttttgaggctgtgatgcggaccctctgcgaatgcaaggagacagcctcgaaaacactgtcccgcttcggaattcagccatgctccatttgtctcggcgatgcaaaggatcctgtctgtcttccttgcgaccacgtccactgtctgcggtgcctacgggcctggtttgcctcagagcagatgatctgcccatattgcctcacggccctcccagacgagttttccccggccgtttctcaggcccaccgggaggctatcgaaaaacacgcaaggtttcggcagatgtgcaattctttctttgtggacctggtatccaccatctgtttcaaggataatgcaccaccagagaaagaggtaatcgaatccctgctttctctgctattcgtccaaaagggccggctccgcgatgcagctcagaggcactgcgagcatacaaagagcctgtcacctttcaacgacgttgtggacaagactccagtaattaggagtgtcatcctgaaacttttactgaaatattctttccatgatgttaaagattatattcaggaatatcttaccctgctgaagaagaaagccttcatcaccgaagacaagaccgagctttacatgctgttcatcaactgtctggaggattccattctcgaaaagacttcagcctactccagaaatgatgaactcaatcatttggaggaagaagggaggtttctcaaggcatatagccccgcctctaggggacgggagcctgcgaacgaggcatctgtggagtatctgcaggaagtcgccagaattcgcctgtgcttggatagggctgccgatttcctgtctgagccggagggaggaccggaaatggcaaaggagaagcagtgctatttacagcaggtcaagcagttttgtatccgggtggaaaatgattggcacagagtttatctcgttcggaagcttagcagtcaaagagggatggaatttgtgcagggcttaagcaaacccggacgtcctcaccagtgggtttttccaaaggacgtggttaagcagcagggattgcgtcaggatcatcctgggcagatggaccgttacctggtgtacggtgacgagtataaggccctacgcgatgccgtggctaaggcggtgttggaatgtaaaccactagggatcaagaccgcattaaaagcttgtaaaactccccagagccagcagagcgcctacttccttcttaccctattcagagaagtcgccatcctttatcgtagccataatgctagcctgcatccaacgcctgaacagtgtgaagcagtctcaaagtttatcggggaatgcaaaatcctttctccaccggacatctcccgcttcgccacctctctggtggataattccgtgcccctccttcgagccggaccaagtgacagcaacctggatggaactgtgaccgagatggcgatccatgctgcggcggtgttgctgtgcggccaaaacgaacttctggagcccctgaagaatctggcgttctctcctgcaaccatggcacatgccttcttacccacaatgcccgaggatcttctagcccaagccagacgctggaagggcctggaaagagtgcactggtatacttgcccaaacggccacccctgctccgtgggggagtgcgggcggccaatggaacagagcatctgcatagattgtcacgccccgatcggagggatagaccataagcccagggatggcttccacctcgtgaaagacaaggccgatagaacccaaaccgggcatgttctgggaaaccctcagcggagagacgtggtaacatgcgaccgcggtctgcctccggtggtctttctgctgatccggctcctcacacacctggcattgctgttaggtgcatcccagtcaagtcaagctctgatcaacatcatcaaacctccagtgcgtgaccccaagggtttcttgcaacagcatatcctgaaagacctggagcaattagcaaaaatgctaggtcattccgcagatgaaacgataggagtagttcaccttgtgctgaggaggcttttgcaagaacagcaccagctgtctagtcggaggctgcttaactttgacactgagctgagtacaaaagaaatgagaaacaactgggagaaagagatcgccgccgtcatcagcccagaattggaacacttagacaagactctgccgacaatgaataatttgattagtcaggacaagaggatatcatccaatcccgtggcaaagataatctacggcgaccctgtgacattcctcccccatctgccacggaagtctgtggtacattgcagtaaaatatggtcttgcaggaaaaggataaccgtcgaatatctccagcacattgttgaacagaaaaatgggaaggaaagagttcccatactctggcactttctccaaaaggaggccgagctgaggctcgtgaagtttcttcctgagatattggcccttcagagggatttagtgaaacagttccagaacgtgcagcaggtggaatacagcagcattcggggtttcttatctaaacacagcagcgacggactccgacagctgctgcacaatcggattacagtcttccttagcacatggaacaagctgagaaggtcactggaaaccaatggagagatcaacctgccaaaggattactgttccacggatttagacctcgacaccgaatttgaaatcctcctccccagacgccggggtctgggtctgtgtgctactgcgctcgtctcatacctaatccgcctgcataacgagattgtttacgctgttgagaagctctccaaagaaaataactcctatagtgtagatgccgccgaggttacagagctgcatgtgatttcttacgaggtggaacgagacctcacacccctgattttgagcaactgtcagtaccaggtggaggagggcagggagaccgtccaggaatttgacctagaaaaaatccaacgccagatcgtatcccgctttctgcagggtaaaccgcggttgagcctgaaggggattcctactctagtgtatcggcacgattggaactacgaacatctgttcatggacatcaaaaacaagatggcccaggactccctgcccagctctgtgatttccgccatctcaggccaattgcagagctattccgatgcctgcgaagtgctgagcgtagtggaagttaccctggggtttcttagtaccgctgggggggaccctaatatgcaactgaacgtctacacccaggatatcctgcagatgggtgaccagacaatccacgtgttgaaggctctaaaccgctgccaattaaaacatacaatcgccctgtggcagttcctgtctgcccataagtccgagcagcttctgcggctccataaagagccctttggtgaaattagtagcagatataaggcggatctgtctcccgagaatgccaaactgctctccacgttcctgaaccagaccggtctggacgctttcctcctggagctccatgagatgattatactgaaactgaagaatccgcagactcagaccgaggagaggtttcgtccccagtggtccctgagggacactctagtctcctacatgcagacaaaggagtccgagatcctgcctgagatggcatcccagtttcccgaggagattctcctggctagttgtgtctccgtgtggaaaacagccgccgttctcaagtggaatagggagatgcgctag

SEQ ID NO: 203870 - DNA, 4653 bp, synthetic construct
  misc_feature 1..4653: note = Description of Artificial Sequence: Synthetic coding sequence
  source 1..4653: mol_type = other DNA
atggagtgccccagctgccagcacgtgagcaaggaggagacccccaaattctgttcccagtgtggtgagcgtttgccaccggcggcccctattgcagatagcgaaaataataattccacaatggcttctgcttcggagggcgagatggagtgcgggcaagagctaaaggaagaaggcggcccgtgcctatttcctggaagcgatagttggcaggaaaacccagaagagccgtgctccaaggcctcttggaccgttcaggagtctaagaaaaaaaaacgtaaaaagaagaagaaaggcaataaatccgcttcttccgagctcgcatccctgccattgtctccagcaagtccctgtcatctaaccctcctgagcaacccatggcctcaggataccgctctgccacatagccaggcccaacagtccggtcctacaggacagcccagccagcctccaggcacagcaacaaccccactggagggggatggactcagcgcccccaccgaggtcggagactctcctcttcaggctcaggctttgggcgaggctggcgtggccaccggctctgaagcccagtctagcccacagttccaggatcacacggaaggggaggatcaggatgccagcattccctctggcggacggggactgtcccaggagggcactgggccccctacaagtgctggggaaggccactccaggacagaggatgctgctcaggagctcctgctccctgaaagtaagggagggagcagtgagcctggtacagaactgcagaccaccgaacagcaggcaggagccagtgccagcatggccgtcgacgcggtagcggaaccagccaatgccgtgaagggagccgggaaagaaatgaaggaaaaaacccagcgaatgaaacagccacccgcgaccacacctccattcaaaacccactgccaggaggccgaaaccaagaccaaggatgaaatggcagccgctgaggaaaaggtggggaaaaatgagcaaggcgagcccgaggatttgaaaaagcccgaaggtaagaacagaagcgccgccgccgtgaagaacgaaaaagagcagaaaaatcaggaggccgatgtacaggaagtcaaggctagcactctctctcctggtgggggcgtgaccgtgttcttccacgcgattatcagcttacattttcccttcaaccctgatctccataaggtgttcattaggggcggggaagaatttggcgagtccaagtgggattcaaacatttgcgagctgcactacactcgggatcttggccacgaccgcgtgctggtagaaggaatcgtgtgcatcagcaaaaaacaccttgacaagtatattccctacaagtatgtgatctacaacggcgaaagcttcgagtatgaattcatatacaagcaccagcaaaagaagggggaatacgtgaaccggtgtttgttcatcaagagttcactgcttggatcaggagactggcatcaatactacgacatagtgtatatgaagccccacggccggctccagaaggtcatgaaccacatcactgatgggccccgtaaagacttagtcaaaggcaaacaaattgcggctgccctgatgctggattctacattctccatcctacagacttgggacaccattaacctgaacagttttttcacgcagttcgaacaattctgttttgtgctccaacagcccatgatctacgaaggccaggctcagctgtggaccgaccttcagtatcgtgaaaaagaagtgaaacgctacttgtggcaacacctgaagaagcatgttgtccctcttcctgacggaaagtctacagattttctgcctgtcgactgtcctgtgcgatccaagctgaaaactgggcttatcgtgctgtttgtcgttgaaaaaattgaactgctcctcgaaggcagcctggactggttgtgccaccttctgacaagcgatgcctccagccccgatgagttccacagagatctgagccatatactgggcattccccagtcttggcgcttgtatttggtgaatctatgtcagcggtgcatggatacgcgcacctacacgtggcttggtgccctgccagtccttcactgctgcatggaattggccccgagacacaaggacgcttggcgtcagccggaggacacttgggccgctcttgagggtctcagtttctcgccttttagagagcagatgctggatacctccagtctgcttcaattcatgcgagagaaacagcacttactgagtattgatgaacctttgtttagaagctggttcagtctgcttcccctgagccacctggtcatgtatatggagaattttattgaacatctcggcagattcccagcacacatattagattgcctgtccggaatatattacagattacccggtctggaacaagtgctgaacactcaggatgtacaagatgtgcaaaatgtacagaacattctggaaatgctgctgcggctacttgacacatacagggataaaataccggaagaagccctaagtccgagctatcttaccgtatgtctcaaactacacgaagccatctgctcatctactaagctgctcaagttttatgaactgcccgccctttctgctgaaatagtatgccggatgatcaggctgttgagtctagtggattccgccggtcaacgtgacgagacaggaaataattctgtgcaaacagtgttccaaggaactttagctgctacaaaacgctggttgagagaggtgttcaccaaaaatatgctcaccagtagtggcgctagtttcacatatgtaaaggagatcgaagtctggcgtagactcgtggaaatccagtttccagctgaacatggatggaaggagagcttactgggagatatggagtggcgacttacaaaggaagaacctctttcacagatcaccgcctactgtaactcttgctgggacaccaagggcctcgaagactccgtggcgaaaacattcgagaaatgcatcatcgaggccgtcagcagtgcctgccagtcccagacgtccattcttcagggattcagttactccgatttgaggaaatttgggatcgtgctcagcgccgtgatcacaaaaagttggccacgcacagccgacaattttaacgacatcctcaagcacctcctcacacttgcagatgtcaagcatgtgtttaggctttgcggtactgacgagaaaattctggccaatgtgaccgaagatgcgaaaaggctgatcgccgtggctgatagtgtcctcaccaaagtcgtgggggacctgctaagtggtaccatcctggtgggccagttggaactcattataaagcataaaaatcaattcctggatatttggcagctcagggagaagtcattatctcctcaggatgaacagtgtgccgtcgaggaggcattggattggcgcagagaggaactgctactactgaagaaggagaagagatgtgttgattcacttctgaaaatgtgcggaaacgttaaacacctgattcaggtcgacttcggcgtcctcgcagtgcggcattctcaggacttgtcctccaagaggttgaacgataccgtcaccgtacgattgtctacctcaagtaactcacagcgtgctactcactatcatctgtcatcccaggtgcaggaaatggcaggaaaaatcgacctactaagggattcacacatcttccagctcttctggcgggaggcggccgagcctctttcagaaccaaaggaggaccaggaggccgctgagcttctttcagaacccgaggaggagtctgaaaggcatattctggagctagaagaagtgtacgactacttataccagccgagctatagaaagtttatcaagttgcaccaggatctgaaaagcggcgaggtgaccttagctgaaattgatgtgatctttaaggacttcgtcaacaaatataccgatttggactccgagctcaagatcatgtgtacggtcgaccatcaggaccagagagactggatcaaggatcgtgttgaacaaataaaggaataccaccatctccaccaggccgttcatgcggccaaagtcatcctgcaagttaaggagtctctcggcctgaatggcgacttctcagtgctcaacacacttttaaactttaccgataattttgacgactttagaagagagacgctcgaccagataaaccaggagctgattcaggctaaaaaactgctgcaggacatcagcgaagcaagatgcaagggtctgcaagctctcagtctgaggaaggaatttatttgttgggtaagggaagctcttggcggcatcaacgaactcaaggtattcgttgatctagcgtccattagcgctggggagaatgatattgacgtggatcgagtggcgtgcttccacgatgccgtccaggggtatgcttctttgttgtttaagttggatccaagcgtggacttctctgccttcatgaagcacttgaagaaactctggaaggctctggataaggatcagtatctcccacggaagctcgtaagtctgattctctcccttatgcagatcctcctgaatcgggctctgttgagcaatgtcagagctgtcacagttgaaatggtcgcacacttgtgcgggcgttttgtgcattccagattccagtag

SEQ ID NO: 203871 - DNA, 15771 bp, synthetic construct
  misc_feature 1..15771: note = Description of Artificial Sequence: Synthetic coding sequence
  source 1..15771: mol_type = other DNA
atggagtgccccagctgccagcacgtgagcaaggaggagacccccaagttctgcagccagtgtggagaaaggttgcctccagcagctcccatcgccgattctgagaataacaattcaaccatggcttcggctagcgagggcgaaatggagtgcggacaagaactcaaggaagaggggggcccatgcctatttcctggctccgattcctggcaggagaatcccgaagaaccttgtagcaaggcttcttggactgtgcaggaaggggctacttctgaggtcttggtcgacgctgctgtcgacctgatcagcgatgagtgggaggcagctaatgcaatcccttctaagcggagaaagcaggacgcggcacctctggaggcagcttcagtaccgtctgctgattgtgaacagtccaaaaaaaagaaacgcaagaaaaaaaagaaaggcaataaaagcgcttcttctgagctggctagtttgccactctcgcccgcatctccgtgccacttgactctcttgtctaacccctggcctcaagacaccgctttgccccactcgcaggcacagcaatccgggcctactggtcaacctagccagccccctggaacagcaaccaccccacttgagggtgatgggctgtcagctccgactgaggtgggcgactcacccttgcaagcacaggccctcggagaagccggggtggcaacgggctctgaggcgcagtccagtcctcagttccaagaccacacagagggagaggaccaggatgcgtcaatcccttctggtgggaggggactgtcccaggaaggaacagggcctcccacctcggcgggcgagggccactcaagaacagaagacgccgcccaggagttgcttctgcccgagagcaaggggggtagctctgaaccagggacggagcttcagactaccgaacagcaggctggtgcttctgcctcaatggccgtcgacgccgtggcggaacccgccaatgccgtgaaaggggctgggaaggagatgaaggagaagacacagaggatgaagcaaccacctgccaccacgcccccatttaaaactcactgccaggaagccgagacaaagacgaaggatgagatggctgccgctgaggaaaaagtgggcaagaatgagcagggagagcccgaagacctcaaaaaacccgagggcaaaaaccgctcagccgcagccgttaagaatgagaaggagcaaaagaatcaagaggctgatgtgcaagaagtcaaagcaagcactctctctcctggagggggggttacagtcttcttccacgccataatttcactccacttcccctttaaccccgacttgcacaaggtcttcatccgggggggagaagagtttggagaatccaagtgggacagcaatatctgcgaactccactacactcgagacctgggacatgatagggtgctggtggaagggatagtctgtatctctaaaaaacacctggataagtatattccctacaagtacgtgatctacaatggggaatctttcgaatacgagttcatttacaaacatcagcagaaaaagggggagtatgtgaatcgctgtctcttcatcaaaagttcgcttcttggaagtggggattggcaccaatactacgatatcgtctatatgaaaccacacggtcgcttgcagaaggtcatgaaccacatcactgatgggccaagaaaggaccttgtgaaagggaagcaaatagcagcagccttgatgctcgattcgacgttctccatcctccaaacatgggacacgattaatctgaactccttttttacacagtttgagcagttctgctttgtgcttcagcaaccgatgatatatgaggggcaggcgcagctctggaccgatctccagtatcgggagaaggaggttaagcgctacctgtggcagcatttaaagaaacacgttgtcccacttcctgatgggaagtccacggactttcttcctgttgattgccctgtgagatcaaaattaaaaacaggtctgattgttttatttgtcgtggaaaagattgaacttttattagagggaagtttagattggttgtgccatctgttgacctcggacgcgagcagccctgatgagttccaccgggatctctctcatatactggggattccccagagctggagactgtacttagtaaacctttgtcagcgctgcatggacacacggacatatacctggctgggagctctgcccgtgcttcactgttgcatggagttagccccccgacataaagacgcatggcgccaacccgaagatacatgggcagccctggaaggcttgtccttctccccttttagggagcagatgctggatacatcttctttgctccaattcatgagggagaaacaacacctgctatctatcgatgagccgttgttccgatcttggttcagcttgttaccactttcacacttggtaatgtacatggagaacttcattgagcacctcggtaggtttcctgctcatattcttgactgcctctccgggatctattatagactccctggcctggagcaggtgctgaacactcaggatgtacaggacgtccaaaatgtgcagaacatactcgagatgctgctcagactcctggacacttatagggataaaataccggaagaggcattgtcgccctcctacttgactgtctgtctgaagttgcatgaagcgatttgtagctccaccaagctgctgaaattttacgagctgcccgcactgtctgcagagatagtttgtaggatgatccggctgttgtcgctggtcgatagcgccggccagcgtgacgaaacaggcaataactccgtacagactgtgtttcagggcactctggccgcgaccaagaggtggctaagagaagtgttcacaaagaacatgcttacaagttctggcgcgtccttcacttacgtaaaggaaatcgaagtttggcgacgacttgttgagatccaattccccgccgaacatggctggaaggaaagcctgttgggggatatggaatggcgcctcactaaggaggaaccactttcccagatcacagcgtattgcaatagttgttgggataccaagggcttggaggattctgtcgccaagacatttgagaagtgtataattgaggctgtgagtagcgcttgtcagagtcagacttccattctccagggattcagttactctgacctgagaaaattcgggatagtcttaagcgcagtgattactaagagctggcccagaacagcggacaacttcaatgacattcttaagcacctgttaacactggccgacgtgaagcatgtttttagattatgcgggaccgacgaaaaaatcctggccaacgtgaccgaggatgcaaagcggctaatcgccgtggctgacagcgtgctgacgaaggtcgttggcgacctattatccggcactatcctcgtgggccaattggaacttatcatcaaacacaagaaccagttcttggacatctggcagctgcgagagaagtccctttcccctcaagacgaacagtgtgctgtggaggaggctttggactggcgcagggaagaacttcttctgttgaagaaagagaaaaggtgcgtggattctttgctgaaaatgtgcggtaacgtgaagcatctgattcaggtggactttggcgtgttagccgtacggcacagccaggacctcagtagcaaaagactgaatgacactgtaacagttcgcttatctacctcaagtaactctcagcgggccacccattaccatctctctagccaggtgcaggaaatggccggcaagatagatcttctccgcgactcacacatattccagctcttttggagggaggctgccgagcccctgtcagagcccaaagaggaccaagaggcagccgagcttctatccgagccagaagaggagtcagagagacatatactcgaactggaagaggtgtatgactatctatatcagccatcctataggaaattcataaaattacatcaagacctcaaatcaggggaagtgaccctcgcagagatcgatgttatcttcaaggatttcgtaaataagtacacagatctagatagcgagctcaagatcatgtgcaccgttgaccatcaggatcagagagattggataaaggatcgcgtggaacagataaaggagtaccaccatctgcatcaagccgttcacgctgcgaaggtcatcttgcaggttaaggagtccctaggcctaaatggcgatttctccgtgctcaatacactgctcaattttaccgataactttgacgatttcaggagggagacacttgatcagatcaaccaggagctgatacaggctaagaaactgctgcaggacatctccgaagccagatgtaagggtcttcaagccctcagccttagaaaagaatttatttgttgggtccgggaagccttgggaggaattaatgaactgaaagtgttcgtcgatcttgcctcaatcagtgctggcgagaacgacatagacgtggaccgcgtcgcatgctttcacgatgctgtacaaggctacgcgtcactgttgtttaaacttgatccaagcgtcgacttttccgcattcatgaagcacctgaagaagctgtggaaggccttggacaaggaccagtatttgccccggaagctctgcgattccgcacgaaacctagagtggttgaagacagttaacgagtcccacggctctgtcgagcgcagctccctgacattagccacggctattaatcagagaggtatttacgttatccaggcacctaaagggggacagaagatttcccccgatacagtactgcaccttatactgccagagtctcctggctcgcacgaagaatcacgagagtattcccttgaggaggtaaaggaactgctgaataagttaatgctaatgtcgggtaaaaaagaccggaacaatacagaagtagagagatttagcgaggtattctgttccgtgcagcgactgtcccaggctttcatcgacctgcattccgctggtaacatgttgttccgtacttggattgccatggcttactgtagtcctaaacaaggagtttccctgcagatggacttcgggctggatctcgtgactgaactgaaagagggaggtgatgtgacggaactactggctgccctgtgtcggcagatggaacatttccttgactcctggaaaagatttgtcacgcagaaaaggatggaacacttttatcttaacttttatactgcagaacagcttgtctacttgtccaccgaactgcgtaagcagcccccatctgacgctgccctaacgatgctgtcctttatcaagagcaactgcacactcagggacgtgctcagggcctcagttgggtgcggatcagaggctgcacgatataggatgaggagggtcatggaggagctgcctctgatgctgctgagcgaattcagcttggtcgataagcttaggattatcatggagcaatccatgaggtgtttaccggcattcctgccagattgtctagacttagaaactctgggacattgcctggcccacctggccgggatgggtggctcccccgtggaacggtgcctgcccaggggtttacaagtgggccagccaaatctcgtcgtatgcggacactctgaggtcctacctgctgctttggccgtgtatatgcagaccccgtcacaacccctgcccacctatgatgaggtgctgctgtgtacacctgctactactttcgaagaggtggccttgctgctccggcggtgcctcacactcggctcactggggcataaagtctactccctgctctttgccgaccagctcagctacgaagtagcccgtcaggccgaggagctttttcataatctatgcacccagcaacatagagaggactatcaactggtcatggtctgtgatggcgactgggagcattgttacctgccttcagcttttagccagcataaggtgtttgtcaccccacaggctcccctggaagcaatccaggcctacctggccggccactacagagttcccaaacagactttgtccgccgcagcggtatttaacgacaggctgtgcgttggcatcgtggccagtgagcgggccggtgtgggcaagtctctgtacgtgaaacgcctccacgataagatgaaaatgcagcttaacgttaagaacgtgcccctgaagaccattcggttaattgatccccaggtcgatgagagcagggtcctgggcgcactgctgccatttctggatgcccagtaccagaaggtccccgttttatttcatctggacgttactagctccgtgcagactggtatttgggtgtttctgtttaaactactgatcctgcaatacctgatggacattaatgggaagatgtggctgaggaatccatgccacctttacatcgtcgaaatcctggaaaggaggacctccgtaccaagtaggtcgtctagcgccctaagaacaagggtccctcagttctctttcctagatatcttccctaaggtgacatgtaggcctcccaaagaagtgatcgacatggagctgagcgctctgcgcagcgacaccgagcccggcatggatctgtgggagttttgcagtgagacttttcaaagaccctatcaatatctgagaagatttaaccagaatcaggatttggataccttccagtaccaggaaggctccgtcgagggtacacctgaagaatgcttacagcacttcctttttcactgcggggtgattaacccatcgtggagcgagctgcgcaactttgctcgtttccttaattaccagcttcgcgattgcgaagcctcacttttctgcaatcccagctttatcggtgacacattacgtggatttaaaaaatttgtcgttacatttatgattttcatggcgagggacttcgctaccccctcacttcatacatccgatcagtccccgggaaaacatatggtgacaatggacggcgttcgcgaagaagacctggcccctttttccctgcgcaagaggtgggagtcagaaccacatccatacgtcttctttaatgacgaccacacaactatgacttttatcgggtttcacctccaacctaacataaatgggagtgtggacgcaatatctcacctcactggcaaggtgatcaagagagacgtgatgacccgggatctttaccaagggctgctgctgcagcgagtgccattcaacgtagacttcgacaaattgccaagacataaaaaactggaacggctatgtctgacactgggcatccctcaggccacagacccagacaagacttacgagcttaccaccgacaatatgctgaaaattctggctattgagatgagatttcgctgcgggattcccgtgattatcatgggcgagacaggctgtgggaagactagattgataaaattcctttctgatctgcggcggggaggcacaaacgcggataccattaagctcgtaaaagtacatggtgggacgaccgccgacatgatctactcccgggtcagggaggcagagaacgtggcctttgccaacaaggaccagcaccaactggatacaatcctattcttcgatgaggccaataccacagaggccatttcctgcatcaaagaagtgctttgcgaccacatggtggatgggcagccactggccgaggactcggggttgcacattattgccgcatgtaacccctatcgcaagcactctgaagagatgatctgtcgtttggagtccgcaggtctgggctatagagtgtcaatggaggaaactgcagaccgcctcggctccatccccctgaggcagttggtgtatagagtgcacgccctccctcctagtctgattccactcgtgtgggattttggccagcttagcgacgtcgctgaaaagctgtacatccagcagattgtgcaaagactggtcgagtccatcagcctggacgagaatggtactagggtcatcaccgaagtattatgcgcttctcaaggctttatgaggaagactgaggatgagtgcagttttgtctccctccgagatgtggagaggtgtgtcaaggtttttaggtggttccacgaacacagcgcaatgcttctggcacagttaaatgcattcctctcaaaatcatcagtgtccaagaatcacaccgaaagggatcctgtgctctggtcgctgatgctggctattggagtctgctaccatgcctctctggaaaagaaggactcttatcgcaaagccatcgctcgcttttttccaaaaccatacgacgatagtcgccttttgttggatgagatcactcgagcccaagatctttttctggacggggtgcccctcagaaagacgatcgccaagaacttagcactgaaagaaaacgtgttcatgatggtcgtgtgcattgagctaaaaatccctttgtttttggttggaaaacccgggtcttctaagtctctggcaaagacgatcgtcgccgacgccatgcaaggccctgccgcctattcagatctgtttaggtccctgaagcaagtgcatttggtctcttttcagtgcagtccccactccacccctcaaggcattatctccacattccgccagtgtgcccgtttccaacaaggcaaggacctccagcaatacgtgagtgtcgtggtactcgacgaagtcggtctggcggaagattcccccaagatgccattgaagacccttcaccctctgttggaggatggttgtatcgaggacgatcccgctccacacaaaaaagtaggcttcgtcgggatctcaaattgggcactggaccctgctaagatgaaccgtggcatttttgtgagccggggctcgcccaacgagaccgagctgattgagtctgctaagggaatttgctccagcgatattttggtccaggatcgcgtccagggctatttcgcctcctttgccaaggcatacgaaacagtgtgtaagcgacaagataaggagttcttcggcctgagggattattattcactcattaagatggtgttcgccgcggcaaaggcatcgaatagaaagccgagtcctcaagatattgcccaggccgtgctgcgtaatttctccgggaaggatgacatccaggccttggatatctttctcgcaaacctgccagaagctaagtgttctgaggaggtttcacctatgcaactgattaaacagaatatatttggaccgagtcagaaagtgccaggcggtgagcaggaggacgctgagtcacgctatttactggtacttaccaaaaattacgtcgctctgcagatccttcagcagactttcttcgagggggatcaacaaccagagattatattcggatctggctttccaaaagatcaagaatatacccagctatgtcggaatatcaaccgagttaaaatctgtatggaaaccggaaagatggtcctgctgctgaatttgcaaaacctgtacgagtctttatacgatgcccttaaccagtactacgttcatctgggcggacaaaagtacgtcgacctcggcctgggcacccacagggtaaagtgtcgcgtacatccgaacttccgcctgatcgtgatcgaggaaaaagatgtcgtatataagcacttcccgattccacttatcaaccgacttgagaagcactatcttgacatcaacaccgtcttagagaagtggcaaaaatctattgtggaggagctttgtgcctgggtggagaaatttatcaatgtaaaggcacaccacttccaaaagaggcacaagtacagcccctctgatgtgttcataggatatcattcggacgcatgcgcctccgtggtgctccaggtgatcgagcgccagggtcccagggcattaacagaagagttgcatcagaaagtatctgaagaggctaaatcaattttgctcaactgtgccacgcccgacgccgtagtcagactgagcgcctatagcctggggggcttcgcagcagaatggctgagccaggagtatttccaccggcagcgccataatagcttcgccgacttcctgcaggcccaccttcatactgctgatcttgaaaggcatgccatcttcaccgagattaccaccttcagcaggctcctgacatcacacgattgtgagatcttagaatctgaggtcacgggcagagcccccaagccaaccctgctttggctccagcaattcgatacagagtactcattcttaaaggaggtgaggaattgcttgacaaacacagctaagtgcaagatattaattttccaaacggatttcgaagatggcatcagatccgctcaactcattgcaagcgctaaatattctgttataaacgaaatcaataagattagagaaaatgaggatcgaatttttgtgtactttatcacaaagctctcaagagtgggtagaggtacagcatacgtgggttttcatggagggttgtggcagtcggttcacatcgatgacctccgccggtctacgctcatggtctctgatgtcacaagattacaacacgtgacgatttcccagttatttgcacctggcgatctgccagagttaggtctcgaacacagggctgaagatggccacgaggaggctatggaaactgaggcaagtacgagcggcgaggtggcagaggtcgctgaggaggccatggaaactgaatccagcgaaaaggtcggaaaagagacaagtgagctcggcggatctgatgtgtcaatcttggacactaccaggctactgcgatcttgcgtccaaagtgccgtggggatgcttagggaccaaaacgaaagctgcactcgcaacatgagaagggtggtgttactgctgggcctcctcaacgaggacgacgcctgtcacgccagttttctgcgagtatctaagatgagacttagcgtgttcctgaaaaagcaggaggaatcgcagttccatccgctggaatggctggcgcgtgaggcttgcaatcaagacgccctgcaggaagcaggaaccttcagacacacactctggaaacgcgtgcagggcgccgtgacccccttactggcttcaatgattagtttcattgatcgggatggcaacctggagctgttgacgcgacccgacacccctccctgggctcgtgacctgtggatgttcatattctcagacacaatgttactgaatatcccactcgtgatgaacaacgaaaggcacaaaggcgagatggcctacattgtggttcagaatcacatgaatctgtcagagaacgcatcgaataatgtccctttctcctggaaaattaaagactatcttgaagaactgtgggtccaggctcagtatatcacggacgccgagggactacctaaaaaattcgttgacatttttcagcaaacacccctcggccgattcttagcccaattacatggcgaaccccagcaagaactattacagtgctacctgaaggattttatcctactgacaatgcgtgtgtcaacagaggaggagcttaagttcctgcagatggccctgtggagctgcactaggaagcttaaggccgcatcagaggcccctgaagaagaagtctctctgccatgggtgcatctggcttaccagagatttcggagcagactccagaatttttctagaattctgactatatacccacaggttctccacagtctcatggaagcccgctggaaccacgaactggccggttgcgaaatgacgctggatgcctttgctgccatggcatgtaccgagatgctgacccgcaacactctgaagccctctccccaggcatggctccagctcgtgaaaaatctaagtatgcccctggagttgatttgttctgacgaacatatgcaggggagcggctccctggcccaagccgtgatccgcgaggttagagctcagtggagtagaatattttctactgcactgtttgtcgagcacgtgctactcggaaccgagtcacgggtcccagaacttcagggactggttaccgagcacgtctttctgctcgataaatgtcttagagaaaatagcgacgtcaaaacccacggtccttttgaggctgtaatgagaactctctgcgagtgcaaggagacggctagcaaaactctatcacgcttcggaattcagccatgctcaatttgcctgggcgacgccaaagaccctgtctgtctgccttgtgaccacgtgcactgtctgcggtgtctaagagcatggttcgcatcggaacagatgatttgcccttactgtttgacggccttgcccgatgagttcagccccgccgtgtcacaggcccatcgtgaggcgatcgaaaaacatgctcgattcagacagatgtgcaactcgtttttcgttgacctggtaagcacaatatgtttcaaggataacgctccacctgagaaagaggtgatcgagtctctgcttagtttgctcttcgttcagaaaggccgactccgcgacgcggcccagaggcactgcgagcacacgaagtctttaagccccttcaatgacgtggtggataaaacccccgtgatccgtagcgtaatactcaagttacttttgaagtactcttttcacgacgtcaaagactacattcaagagtacctcacattactgaagaaaaaggctttcatcaccgaggacaagaccgagctatacatgctttttatcaactgtctcgaagatagtatccttgagaaaacatccgcctatagccggaatgacgaactgaatcatctcgaggaggagggccgattcctgaaagcatactcacctgcttccagaggcagggagcccgccaacgaggccagcgtggaatatcttcaggaggtcgccaggatcaggctctgcctggatcgtgccgcagattttttatcagagcccgagggaggtcccgaaatggcaaaggagaagcagtgttatctgcaacaggtgaaacaattctgtatccgtgtggaaaacgactggcaccgcgtctatttagttcgaaagctgagctcccagcgaggaatggagttcgtgcaaggactgtccaagccaggtagaccccaccagtgggtctttcctaaagacgtggtgaagcagcaagggctccgtcaggaccacccaggtcagatggaccgctatctggtctatggcgacgagtataaagcactgcgagatgccgttgccaaagcagttctggaatgcaaacctctcggcattaagacagccttaaaggcatgcaagactcctcagtcccagcagagcgcgtactttctgttaaccctctttcgggaggtggcaatcttgtaccggagtcacaatgcgtccctccatccgactcctgaacagtgtgaagctgtgtccaaatttatcggtgaatgcaagattttatcaccccccgacatttctagattcgccactagcctggttgacaactctgtgcctcttttaagagcaggtcccagtgactctaacctggacggcacagtaacagagatggccatccacgcggctgccgtgctgctatgtggccagaatgaactgttagaaccccttaagaacctcgccttttcacctgccaccatggcccatgcctttttgcccacaatgcccgaagacttgctcgcacaggcgaggcgatggaaaggcctggagagggttcactggtatacatgtcccaacggccacccctgctccgtaggagagtgcgggcgcccaatggaacagtccatatgcatcgactgtcatgcccccatcggaggaatcgatcataaaccacgtgatggcttccatctagtgaaggataaagccgacaggacacagactggccacgttctgggcaatccccagcgacgggatgttgttacttgcgacaggggacttcccccggtggtgttcctcctgatacgtctgctgactcaccttgcactgctcctaggcgcgtcccagtcatcccaggcactgataaacatcatcaagccgcccgtgagagatcccaaaggtttcctccaacagcatatcctcaaagatttggagcagctggctaaaatgctcggccattcagctgacgaaacgatcggggtcgtgcatctcgtgttgagaagacttctgcaggagcaacatcagctctcctcccgaaggctcttaaacttcgatactgagttatctacgaaagaaatgcgtaacaactgggaaaaagagatagccgcagttattagcccagaactagagcatctcgacaaaaccctgcccacgatgaataacctgatcagccaagacaagcgaatctcctccaatccagtagcaaaaattatctatggagaccctgtcacatttctcccccatcttccccggaagtccgtggttcactgctctaagatctggtcctgccgcaagaggatcactgtggagtatctccagcatatcgtcgaacagaagaacggaaaagagagagttcctattctctggcacttcctgcagaaggaagctgaattacgcctagtgaagttcctgcctgaaattcttgctctgcaaagggacctagtcaaacaattccagaacgtacagcaggtggagtatagcagcatccggggttttctgtccaaacactcaagcgatggcctcagacagctgctgcacaatcggattaccgtttttctatcgacgtggaataagctgaggaggtcactcgaaaccaatggtgagatcaatctgcctaaggactattgctccacagacctcgatttggacaccgagtttgagattctgctgccaaggcgacgcgggttgggcctctgtgcaacagccctagtgtcatacctgatccgattgcacaacgaaatcgtgtatgcagtggaaaaactgagtaaagagaataactcatactccgtcgatgcagcggaggttaccgagctgcacgtgataagctacgaggtcgaaagggaccttacacccctgatcctcagcaattgtcaatatcaggtggaggagggacgcgagacagtacaggagttcgatctcgagaagatccaaaggcagatcgttagtcgcttcctgcaggggaaaccaagattgtcactgaagggcattcccacgctggtctaccggcacgactggaactacgagcacctgtttatggacattaaaaataagatggctcaggactccctcccatccagcgtcatctccgctattagcggccaattacagtcttactccgatgcctgcgaggtgctttctgtcgtggaggtgactctgggatttctcagcaccgcaggcggggaccctaacatgcagctgaatgtctatacccaggatatcctgcagatgggagaccagacaattcacgtgttaaaagctctgaatcgctgccagcttaaacatacaatagctctctggcagttcttgagcgcccataagtcggagcagctgctgcgactgcataaagagccctttggcgaaatttcgtctagatacaaggccgacctgtcacccgaaaatgccaagcttttgagcacattcctcaaccaaaccggattggatgctttcctgttggaactgcacgagatgatcattctgaagctcaagaaccctcagacccagaccgaagagaggtttcgaccacagtggtctctgcgcgatactctagtatcttatatgcaaacaaaggagtcagagatcctacccgagatggcctcgcagtttcctgaagaaattcttctggcgtcatgtgtgtctgtctggaaaaccgccgccgttttgaagtggaacagggagatgcgttag

SEQ ID NO: 203872 - DNA, 15624 bp, synthetic construct
  misc_feature 1..15624: note = Description of Artificial Sequence: Synthetic coding sequence
  source 1..15624: mol_type = other DNA
atggagtgccccagctgccagcacgtgagcaaggaggagacccccaaattctgttctcagtgcggggaaagactgcctcccgccgcacccatcgctgactccgagaataacaactccacaatggcctccgcctccgaaggcgagatggagtgcggacaggagcttaaagaggagggcggaccttgtctgtttcctggatccgatagttggcaggaaaaccctgaggaaccctgttcaaaagcctcttggactgtacaagaatctaaaaaaaaaaaacggaagaaaaaaaagaagggtaataagtctgcaagcagcgagcttgcttccctgcctttaagtccagcatctccatgccatctcacgttgctctccaatccttggccccaggacacagctctacctcatagccaggcacaacagtcgggccctaccggacaaccatcacaaccgcctggaactgccacaaccccccttgaaggcgatggattatccgccccaactgaggtgggagacagtcctctgcaggcccaagcactgggggaggctggcgtggcaacgggatccgaggcccaatccagcccccagttccaggaccacacagaaggggaggaccaggatgcttcaatcccttctggaggcaggggccttagtcaggagggcaccgggccccccacatcagccggagagggacattctaggaccgaggatgccgcccaagagctcctgttgcctgaatctaaagggggctcatctgagccaggcacggaattacagactaccgagcaacaggctggcgcatccgcaagcatggccgtggacgctgtcgccgagcccgctaacgcagtgaagggggccgggaaggaaatgaaagagaaaacgcaacgcatgaagcaaccccccgccacaacaccaccttttaaaacacactgccaggaagcggagactaagaccaaagatgaaatggctgcggcagaggagaaagtgggcaagaatgagcagggcgagcctgaagatctcaagaagcccgaaggtaagaacaggagcgctgccgcggtaaaaaacgaaaaagaacagaaaaatcaggaggccgatgtccaggaggtgaaagctagcaccctctcccccggaggcggcgtaactgttttttttcacgcgatcatcagcttgcacttcccatttaatcctgatctgcacaaggtgtttatcagaggcggagaggagttcggagagtccaaatgggactctaacatttgcgagctccattacacgagggacttggggcacgatcgcgtgctcgtggaaggtattgtctgcattagtaagaaacacctggacaaatatatcccttataaatacgtgatatataacggcgaatccttcgagtacgaattcatatacaaacaccagcagaaaaagggtgagtacgttaaccggtgcctcttcatcaaatcatctttgctggggtcaggagattggcaccagtactatgacatcgtgtacatgaagcctcatggcagattacaaaaggtcatgaaccacatcaccgatggcccaagaaaagatctggtgaaaggaaaacagatcgccgcagctctcatgctggatagtactttctcgattcttcaaacctgggataccattaacctcaactcattctttacacagtttgagcagttctgctttgttcttcagcagcctatgatttatgaggggcaggcccagctttggactgatctgcaatatcgggagaaggaagtgaaacgatacctgtggcagcatctgaagaagcatgtggtgcccctgcctgacggtaaatccactgacttcttgcctgtggattgtccagttcgaagcaagctgaagacgggactcatcgtgcttttcgtggtggagaaaattgagctcctattagaggggtcactcgattggctttgtcacttgctgaccagcgacgcaagttccccagacgagttccaccgcgatcttagtcatattctgggaatcccacagtcctggagactttatcttgtgaatctatgccagagatgtatggatacaaggacttacacctggcttggcgccttgcccgtgctccattgttgtatggagctggccccccgacacaaagatgcttggagacagcccgaagacacctgggcagcccttgaaggactaagcttctctccttttcgggagcagatgctagatacatcctctttacttcagtttatgagggagaagcagcatctgctgagtattgacgagccactcttccggtcatggttctcactcctgcctctgtcgcaccttgtgatgtacatggagaacttcatcgagcatctgggtaggttcccagcccacatcctggactgcttgagcggcatctattatcgattgccgggtctagaacaagtgctgaatactcaggacgttcaggacgtacaaaatgtgcagaacattctggaaatgctgctgcgcctgctagatacctacagagacaagattccggaggaagccttgagcccaagttacttgaccgtatgtctcaaactgcatgaagccatttgctcatctactaaacttctgaagttttacgagctacccgcgctgtcagcagaaatagtttgcaggatgattcgtcttcttagtctcgtggacagtgctggacagagagacgaaaccggtaacaactctgttcagactgtcttccagggcacacttgctgccacaaaacgctggttgagggaggtttttacaaaaaatatgctcacatcttccggtgcaagcttcacgtacgtgaaggagatagaggtgtggcggcgattggtcgaaattcaatttccggccgaacatggctggaaagagagcctcctcggtgatatggaatggaggctcaccaaggaagagcccctgtcccagataactgcttactgcaatagctgttgggacaccaaaggtttggaggatagcgttgctaaaacctttgagaaatgtatcatagaagcggtttctagcgcatgtcaatctcagacaagcatcctgcagggcttcagctattccgacctgcggaagttcggcattgtattgagtgctgtcattaccaaatcatggccccgtactgccgacaatttcaacgacatacttaagcatctactgaccctagcggacgttaaacatgtgttccggttgtgcggtaccgatgagaagatcctggcgaacgtgacagaagacgctaagcgacttattgctgtggccgattctgtgctaacgaaagtcgtcggcgacctcctgtccggaactattctcgtgggacagctggagctcattataaaacataaaaatcaattcctggacatctggcagctgcgagaaaagagtttaagtccacaggacgaacagtgcgctgttgaggaggccctggactggcgtagggaggaactcctgcttctgaaaaaagagaagcggtgtgtagacagcctgctgaaaatgtgtggcaatgtgaagcatctcatacaggtggactttggtgtgctggcagtaagacacagtcaggatctgtcgtccaagaggttgaatgataccgtgacagttcgactgtcgacatccagcaactcacagcgtgcgacacactaccatctgagcagtcaggtgcaagaaatggcaggcaagattgacctactccgggattcccatatttttcagctattttggcgcgaggcggctgaacctctgagcgagcctaaagaggaccaggaggccgctgagctgctgtccgaaccagaggaagagtccgagagacatatcctggagttggaggaggtgtacgactacctctatcagcccagttataggaagtttattaagctgcaccaggacttgaaatccggagaagtgacactggctgagatcgacgtgatcttcaaggacttcgtgaacaaatatactgacctcgattcagagcttaagatcatgtgcacagtagatcatcaggatcagcgagactggatcaaggaccgggtcgaacagatcaaagaatatcatcacttgcatcaggcagttcacgccgccaaagtgattttgcaggtgaaggagagcctgggtttgaacggcgattttagcgtgctgaatactcttctaaacttcactgataactttgacgacttccgtcgggagaccctggatcagatcaaccaggagcttatacaagcaaagaaattactccaggatatttccgaggccaggtgcaagggtttgcaggccctgtccctgagaaaggagttcatttgttgggtaagagaagctcttggtggaatcaatgagctaaaagtgttcgttgatttagcgagcatatcagcgggcgaaaacgacattgatgtggacagagttgcctgtttccacgatgctgtgcaaggctacgctagtctcctttttaaacttgaccctagcgtggacttttctgccttcatgaaacatctcaagaagctgtggaaggccctggataaagaccagtaccttccgcgtaagctctgcgactcagctaggaatctggagtggctgaaaactgtgaatgaatcacacggcagtgtggagaggtcaagcctaacactagccactgccattaatcagagagggatctacgtaattcaagccccaaaggggggacaaaaaatcagccccgacacagtcctccatctcatactacctgagtcccctggaagccatgaggagtcaagggagtactctttggaggaagtgaaagaactcttgaataaacttatgctgatgtcaggcaaaaaggatcgcaacaacactgaggttgaacgattctcagaagtgttctgttcagtgcagcgattgtcccaggcgttcattgacctccacagcgctggtaatatgcttttccgaacttggattgcaatggcctattgctctcctaagcaaggagtatctttgcagatggactttgggctggacttggtgacagaactcaaagagggaggtgacgtgacggaattgttggccgccctgtgtcgccaaatggagcatttcctcgattcctggaaacgctttgtgacccagaagagaatggagcatttctatcttaacttctataccgccgagcagcttgtgtatctcagcacagagctgcgtaagcagccacctagcgacgccgctttaacaatgctttcctttatcaagtctaactgcaccctgagggacgttctcagagcatcagtgggctgcggctccgaggctgcacgctataggatgaggagggtgatggaagagctcccattaatgctgctgagcgaattttccctggtagacaagctcaggataatcatggaacagtctatgagatgcctcccagcttttctcccggattgtctcgaccttgagacactggggcactgcttggcccatctggcgggcatgggaggtagtcccgttgaacgctgtctgccacgggggctccaggtcggacaaccgaacctggtagtctgtggccactccgaggtgctacctgccgctctggctgtttacatgcagactccttcacagccccttccgacatacgatgaagtgctgctatgcacccctgcaacaacctttgaagaagtggctttgctgttgcgccggtgtctgaccctggggtcactgggacacaaggtgtatagcttactcttcgccgatcaactgtcttacgaggtggcgagacaggccgaggagctgtttcataacctttgcacgcagcagcaccgggaggactatcagctggttatggtgtgtgacggtgactgggaacattgttatcttccatccgcattcagccaacacaaggtgttcgtcactcctcaggcgcctctcgaggctatccaggcttacctcgcgggtcactaccgagtgccgaaacaaacgttgtctgctgctgctgtctttaatgaccgcttgtgtgtaggtattgtcgccagcgagcgggccggggttggtaagagcctgtacgtcaaaaggttacacgacaaaatgaaaatgcagcttaacgtcaagaatgtgccacttaaaacgattaggctaatcgatccgcaggtcgacgaatctcgggtacttggagcgctactgcccttcttggacgctcagtatcagaaagttcccgttctgttccacttagatgtgaccagcagcgttcaaacaggaatctgggtttttttgtttaagttgcttattctgcaatatctgatggacatcaatggaaaaatgtggctgagaaacccctgccatttgtatattgtggagattctggaacgccgtaccagtgttccatctcggtcaagctccgccctgagaacccgcgttccccagttctcgttcctggatattttccccaaggtgacgtgcagacctccaaaagaggtgattgacatggagctctcagctcttcgatccgatacagagcccggaatggacctttgggagttttgtagcgaaaccttccaacgtccttaccaatacctgaggagattcaatcaaaaccaagacctggatacctttcagtaccaggagggatcagtcgagggtacaccggaggaatgcctccagcatttcctgtttcactgtggcgtgattaatcctagttggtctgagctcagaaacttcgcgaggtttttgaactaccaactgcgcgactgtgaagcatccctgttctgcaatcccagctttatcggagatacattacggggcttcaagaaatttgtggtgacatttatgatttttatggctagggactttgccactccatctctgcacacctctgaccaatcacctggcaagcacatggtgaccatggatggcgtgcgcgaggaagacttagctccgttctcacttcgaaaacgctgggaaagcgagccgcacccatacgtcttcttcaatgacgaccataccaccatgacatttattggcttccacctgcagcccaatataaacgggtcggtcgatgccattagtcatctgacaggcaaggttattaagcgtgacgtgatgacaagagatctgtaccagggtttgctattacagcgcgttccctttaatgtggacttcgacaaactaccccgacacaaaaaactggaacggctgtgcctcacactcgggataccacaggctacggatccagataagacctatgagctgaccactgataacatgttgaagattctggcgattgagatgagattcagatgcggcatcccagtgatcataatgggggaaacagggtgcgggaaaactcggctgatcaagttccttagcgatctcaggcggggaggaaccaacgccgacactataaaactcgtgaaggtacacgggggtaccaccgcagacatgatctacagtagagttagagaggctgaaaatgttgcctttgcaaataaggatcaacaccaattggataccattctgttttttgatgaggcaaataccaccgaagcaatctcctgcattaaggaggtactctgcgaccatatggtggacggccagcctctggctgaagactccggcctgcacattatcgctgcatgtaatccataccgtaagcacagtgaagagatgatttgccggcttgagtctgccgggttgggctaccgggtcagcatggaggagaccgccgaccgtctgggctccattcccctccgccagctcgtgtaccgcgtccatgcactgccaccgagcctgatccccttggtatgggacttcggacaacttagcgacgtggctgagaaactctacattcaacagatcgtccagcgcttagtagaaagcatctctttggatgagaacggcactagggtgatcacagaggtgctctgcgcctcgcagggatttatgcggaaaacagaggacgaatgtagcttcgtctcactgcgcgatgtcgaaagatgcgtaaaagtgttcagatggttccatgaacactccgcgatgctgttagcccagctgaacgcctttctgtcaaagtcttctgtgagtaagaatcacaccgagagagatcccgttctctggagcctcatgcttgcaatcggagtgtgctaccacgctagtctggaaaaaaaggattcttacagaaaggccatcgccagattcttccccaagccctatgacgactccagactgctgctagatgagataacacgggcccaggatctgttcctggacggcgtgcctctacgcaaaactattgcgaagaatctcgccctaaaggaaaacgtgtttatgatggtcgtatgtatcgaacttaagattccactgtttctcgttggtaagccagggtcgagtaaatctctggctaaaaccatcgttgccgacgccatgcaggggcctgctgcatattccgatttgtttcgctcacttaagcaggtgcacctcgtttccttccagtgttcacctcacagcactcctcagggcattatcagcaccttccgccagtgtgccagattccaacaaggaaaagacctgcagcagtacgtgtccgttgtggtactagatgaagtgggtctggccgaagattcaccaaaaatgccccttaaaactctgcaccccctgttggaagacggctgcatcgaggacgatccggctccacataagaaggtgggatttgttggtatctcgaattgggctcttgatcccgccaaaatgaatcggggcatctttgtaagccgcgggagtcccaatgaaactgagctcattgagagcgccaaaggaatctgtagttccgatattctggtccaggatcgagtgcagggctactttgccagttttgccaaggcatacgaaaccgtgtgtaaaagacaggacaaggaattctttggcctgagggactactatagcctcatcaagatggtctttgcagccgccaaggccagcaaccggaagcccagcccacaggacatcgctcaggctgtcctgcgtaatttcagtgggaaggacgacatccaggccctcgacatattcctggctaacctgcctgaggcaaagtgctctgaagaggtatcccccatgcagctcattaagcaaaatatcttcggtccaagtcagaaggttcccggcggtgagcaagaggatgcagagtccaggtacctgcttgtcctcacaaagaattatgtggcactccagattcttcaacagactttctttgaaggtgaccaacaaccagagatcatctttgggagcggcttccctaaggatcaggagtacacgcaactctgtaggaacatcaacagggtgaaaatctgcatggaaaccggtaaaatggtccttttgctcaatttacagaatctctatgagtccttgtacgacgccctgaaccagtactatgtgcacctcggcggccagaagtacgtcgatctcgggctcgggacacatcgggtcaaatgtagagtgcaccctaacttccgccttatcgtgatcgaggagaaagatgtggtctacaaacattttcccattcctcttattaatcgactggagaagcattatctggatatcaatacagtgttggagaagtggcagaaatcgattgtcgaggagctgtgcgcttgggtggaaaaattcattaacgtcaaggcacaccactttcaaaagagacataagtattctccctcagacgtctttatcgggtatcattctgacgcttgtgcgtcagtggtgcttcaagtaatagagcggcagggtccaagggccctaaccgaagaattacatcagaaggtttcggaggaggccaagtctattctccttaactgcgccactcccgacgcagttgtgcgcctgagcgcatattctctcggaggattcgctgcagagtggctgtctcaggaatattttcaccgtcagagacataacagcttcgccgattttctacaggctcacctgcatactgccgatctcgagaggcacgccatctttactgagataaccacctttagcaggctgttgacctctcacgactgtgagattcttgagagtgaggtgactggcagggcgcccaaaccgactctgttgtggctgcagcagtttgataccgagtattctttccttaaggaggtacgcaattgtttgaccaacacagctaaatgtaagatactgatcttccagaccgatttcgaagatggtatccgaagtgcgcagctgattgcctctgctaaatacagcgtcatcaacgaaatcaacaagattcgcgaaaatgaggacaggatattcgtatattttatcactaagctctctagagtgggccgaggcacagcttatgttggctttcacgggggcctgtggcagagcgtccatatcgacgacctgcggcgttccaccctgatggtgtccgatgtgacacggttacagcacgtgactatcagtcagctgtttgctcctggagacctgcctgagctcggtctcgaacaccgtgcagaagacggccatgaagaggccatggagaccgaggcatcgacttccggggaggtcgccgaggttgcagaggaggccatggaaaccgagtcatcagagaaggtagggaaggaaacatcagagctgggcggttccgacgttagcatcctggacaccactagactcctgaggtcttgtgtacagtccgctgtgggtatgctgcgagatcaaaacgagtcatgtacaaggaatatgaggagggtggtgcttctgcttgggcttcttaacgaggatgacgcgtgccatgccagttttcttcgcgtgtctaagatgagattgtcagtgttccttaagaaacaggaggagtcccaattccacccgctggaatggttggctcgtgaggcatgcaaccaggacgcacttcaggaggctggaacctttagacacaccctgtggaaacgtgtacagggcgcagtaacgcccctgctggcatcaatgataagctttatcgaccgcgacggcaatcttgagctgttgacgagacccgacacgccaccttgggctcgagatctgtggatgttcatcttttccgataccatgctcttaaacattcctctagtgatgaacaatgaacgtcataaaggcgaaatggcttatatcgtggtgcagaaccacatgaacctgtctgaaaatgcgagtaataatgtgccattctcttggaagataaaagattatttagaggagctgtgggtccaggcacagtatataaccgatgcggaaggattgcctaaaaagttcgttgacatcttccagcagacgcctctcggcaggttcttagctcagctccatggggagccacagcaagagctcctccaatgttacctgaaggacttcatcctgctaaccatgagggttagtacagaagaggagctgaagttcctccagatggccctgtggtcatgcacgagaaaactcaaagccgcctctgaagcccccgaggaagaggtgagtctgccttgggtccacctggcctaccagcgattcagatctcggttacagaattttagtagaatcctcaccatctatcctcaggtcctgcattctctcatggaggcacgctggaatcacgaactggccgggtgtgagatgaccttggatgcctttgctgcaatggcttgcaccgagatgctcactcggaacacgctcaagccatctccgcaggcttggctgcagctggtgaaaaatctgagcatgcctcttgagttgatctgctctgacgagcatatgcagggttcgggctccctcgcccaggctgttatacgagaggtgcgggcacagtggagccggatcttttcaaccgccctgttcgttgagcatgtgttgctgggcaccgagagcagagtccccgagctgcaaggcttggtgactgagcatgtgtttctgctggacaaatgtctgagagagaatagcgatgtaaagacgcacgggccttttgaagccgttatgcggactttatgcgaatgtaaagagaccgcctccaagaccctgagtcgttttggtattcagccctgcagcatatgtctgggtgatgcaaaggatccagtatgtctgccttgcgatcatgtgcattgcttacgttgcttacgggcctggttcgccagcgaacagatgatttgcccctactgcttgacagctctgcctgatgagttcagcccggccgtgagccaagcccatagggaagccatcgagaagcacgccagatttcgccagatgtgcaacagttttttcgtggacctggtcagtactatctgcttcaaggataatgcgccgcccgaaaaagaggtcattgagtccctgttatctctgctgttcgtccagaagggccgactgagagacgctgcccagaggcattgtgagcacaccaagtccctgagtcccttcaacgatgtagtcgacaaaacgccagttattaggtccgtgattctgaagctcctgctgaagtactcttttcacgacgtaaaagattatattcaggagtacctcacgctgctgaagaaaaaagccttcataacagaagacaagacagagctgtatatgttgttcattaattgtctggaggactctatacttgagaaaacctcagcttactcaaggaacgacgagctaaatcacctcgaggaggaggggcgcttcctcaaagcctattcacctgcttcacgagggcgcgagcccgctaatgaggcaagtgtggaataccttcaggaagtggctcggattagattatgcctggaccgcgctgcggattttctgtccgagcctgagggcggacccgaaatggcaaaagagaagcaatgttacctgcagcaggtgaagcagttttgcatccgagtggagaatgactggcaccgcgtatacttggtgagaaagctctcttctcagaggggaatggagtttgtgcagggactctccaagcctggacgcccccatcagtgggtattccctaaggatgtggtcaagcagcagggcctccggcaggatcatcctggccagatggaccgttatctagtctacggcgatgaatacaaagcgctgagagacgccgtagcaaaagcagtgctcgaatgcaagccactcggtatcaagactgccctgaaagcatgcaaaacgccccagtcccagcagagcgcctacttcttgctcacgctcttccgcgaggtcgcgattctatacaggagccacaacgcttccctccaccccacgcctgaacaatgcgaggcagtgtctaagtttatcggagagtgtaagattctctcaccaccagacatttcccgcttcgccacttctctcgtcgataatagcgtccccctccttagagctggaccatctgatagtaatctcgatgggactgtgacagaaatggctattcatgccgccgcggtcctcctttgcggccagaacgagctgttagaaccgctgaagaatttggcgttctctcccgcgactatggcccacgcttttctccctactatgcccgaggacctgttagcccaggccagacgctggaagggtttggagagggtgcattggtacacctgcccaaacgggcacccatgttctgtgggcgagtgtggcaggcctatggaacagtctatctgcatcgactgccacgctcctatcggcggtattgaccacaagcctcgggacggatttcatttggttaaagataaagcagataggacacagacagggcatgttctcggcaacccgcagagacgcgatgttgttacatgtgaccgaggtcttccgcccgtggtgtttctgttgattaggctcctgacccatctcgcactactgttaggagcatctcagtccagccaggccctcatcaacattattaagccccccgttcgtgacccaaagggcttcctgcaacagcatatcttgaaagacctggaacaacttgccaaaatgctcggccattccgccgacgagaccataggagtcgtgcacctggttctccgacgactcctacaggaacagcaccagctgtcttcgcgtaggctcctgaattttgacactgagctctcaaccaaggagatgcggaacaattgggaaaaggagatcgctgccgtcattagtcctgaacttgagcatctggacaaaacgctccctactatgaacaatttgatctctcaggacaagcgcatttcttccaaccccgtcgccaagatcatctatggcgaccctgtgacctttctgcctcatctgcccagaaaatccgtcgtgcattgcagtaaaatctggagctgcaggaaaagaatcactgtggagtatttgcagcacatcgtggaacaaaagaacgggaaggaacgggtccccatcctgtggcactttctccagaaggaggctgagttgaggctggtcaaattcctccctgagatcctcgctctccagcgcgatctcgtaaaacaattccagaatgtgcagcaggtcgaatactcctccatccgcggttttttgtctaagcactcttccgatggactcagacagcttttgcataatcgcattacagtgtttctcagcacatggaacaagctgcgaaggtccctggaaactaacggggagattaacctgccaaaagactactgctctaccgatctcgatctcgatactgagtttgagatattgttgcctaggcgccgcggattgggtttgtgtgctactgccctggtctcatatctgattcgcctgcacaatgaaatcgtttacgcggtggaaaagcttagcaaggaaaacaactcatacagtgtggacgccgcagaggtaacagaactgcacgttattagctacgaggttgaaagagacctaacacctcttattctgtccaactgtcaataccaggtcgaagaaggccgagaaactgttcaggagtttgatctcgaaaagatccagcgacaaatcgtttcaaggtttctccaaggcaagcctaggctgagcctgaagggtatacctacgctggtgtacaggcatgactggaactatgaacatctgtttatggatattaagaacaagatggcccaggatagtttaccttcctctgttatctcggcaatcagtggacagctgcagagttacagtgacgcatgtgaagtactgtcggtggtcgaagtgacccttggatttctgtcgaccgctgggggcgacccaaacatgcagttgaacgtctatactcaggatattctgcaaatgggcgaccagactattcatgtcctgaaggccctgaaccgctgccagcttaagcacactattgccttatggcagtttctttctgctcataaaagtgagcaactattacgattgcataaagaaccattcggagagatttcttcccggtataaagccgacctgagccccgagaatgctaagctcttaagcaccttcttaaaccagacaggtctcgacgcctttctgctcgagctgcacgagatgattatcctgaaattaaagaacccccagactcagaccgaggagcgctttcggccccagtggtctctccgggatacactagtctcttacatgcaaacaaaagagagtgaaatcctgcctgaaatggcttcccaattcccagaagagatcctacttgcaagctgcgtctccgtttggaagacggccgctgtccttaagtggaacagggagatgaggtag

SEQ ID NO: 203873 - DNA, 2772 bp, synthetic construct
  misc_feature 1..2772: note = Description of Artificial Sequence: Synthetic coding sequence
  source 1..2772: mol_type = other DNA
atggaggagggcaacaacaacgaggaggtgatccacctgaacaacttccactgtcataggggccaagaatggatcaatctgagggatgggcctatcacaatctcagacagcagcgacgaagaaaggatccccatgctggttacgcctgccccccagcaacatgaggaagaggatttggacgatgatgtgattttaaccgaaactaataaaccccagcgaagtcgtccaaacctgatcaagcctgcagcccagtggcaagaccttaagcgccttggtgaggaaagacccaaaaaaagtagagctgcctttgaaagcgacaagtcaagctacttctctgtgtgcaataatcccctcttcgattcaggcgctcaggacgacagcgaggacgactacggcgaatttcttgacctcggccctccaggtattagcgagttcaccaagccgtcagggcagacagagcgcgagccaaagcctggtccctcgcataaccaggctgccaatgacatagtgaacccccgttctgagcagaaggtgataatcctggaggaaggcagcctgctgtataccgagagcgatcctttggagacgcagaaccaatctagcgaagacagtgagaccgaattactatcaaatctgggtgagagtgccgcactcgcagacgatcaagctatcgaggaggattgctggctagaccacccatatttccaaagtctgaaccagcagcctcgtgaaatcacgaaccaagttgtcccacaagagcggcagccagaggccgagttagggcggctgctgtttcaacacgagttccccggcccagcttttcctaggcctgagcctcagcagggcgggatatcggggccgtcgtcaccccagccagctcaccctttgggcgagtttgaagaccaacaactggctagtgacgacgaagagcctggtcctgcgtttccaatgcaggagagccaggaaccaaacctcgaaaacatctggggacaggaggctgctgaggtggatcaagaattagtcgaattactggtgaaagagacggaagcccgcttcccagacgtggcaaatggattcatcgaggagatcatacacttcaagaactactacgatttaaacgtactctgtaattttttgctcgaaaaccctgattatcctaaaagggaagataggattatcattaacccgtcctcctctctgcttgcctcgcaggatgagaccaaactgcccaaaatcgatttcttcgattacagtaagctgacgccattggatcaaagatgtttcattcaggccgccgatcttcttatggctgacttcaaggtgctctcatcccaggacattaagtgggcacttcatgagttaaagggtcactatgccatcacccggaaagccctctcagatgcgatcaaaaagtggcaagagttgagtcctgagacttctgggaaacgcaagaagcggaagcaaatgaatcagtacagctatatagattttaaattcgagcagggggacattaagatcgagaagcggatgttcttcctggaaaacaaaaggaggcattgccgcagctacgacagaagagcactgttacccgctgtgcagcaggagcaggaattttacgagcagaagattaaagaaatggctgagcatgaagactttcttcttgcactgcagatgaacgaggagcaatatcagaaagacgggcaactcatagagtgtcgttgctgttatggtgaattcccattcgaggagctgacgcaatgcgccgatgcacatctgttttgtaaagagtgtctcattagatacgctcaagaggctgtcttcggttccggaaagctggagttgagttgcatggaaggatcatgcacttgttcctttccaacttccgagctagaaaaagtgcttcctcaaactatcctctacaagtattatgagagaaaagccgaggaggaggtagctgccgcctatgccgacgagctggtgcggtgcccttcatgtagtttcccagccttactcgattcagatgtgaagagattttcttgtccaaacccccattgcaggaaagaaacgtgtagaaagtgtcagggtctctggaaagagcacaacgggctgacttgtgaagagctagccgaaaaagatgatattaaatatcggacgtctatcgaggagaagatgactgctgcacgaattaggaaatgtcacaaatgcggcacaggtttaattaagtccgagggatgcaacagaatgtcttgtcgatgtggggctcaaatgtgctatctgtgccgagtgtcaattaacggttacgatcatttttgccagcatccaaggagtccaggcgccccatgccaagagtgtagccggtgctctttatggacagatccgacagaggacgatgaaaaactgattgaagaaatacagaaagaagccgaagaagagcagaaacgcaagaatggggagaacacctttaagaggattggtcctcctctagagaaacctgtggagaaggtacaaagagtggaggccttacccagacccgtaccccaaaatctgccccagcctcagatgccaccatacgctttcgcccatcccccattcccactaccgcccgtgcggccggtgttcaataatttcccgttgaacatgggacctattcctgcaccctacgtgcctccattgcccaacgtgcgcgtgaattatgatttcggccctattcacatgcctttggaacacaatctgccaatgcatttcggtccccagccaagacacagattttag

SEQ ID NO: 203874 - DNA, 63 bp, synthetic construct
  misc_feature 1..63: note = Description of Artificial Sequence: Synthetic coding sequence
  source 1..63: mol_type = other DNA
atggaggagggcaacaacaacgaggaggtgatccacctgaacaactttcattgccacaggtag

SEQ ID NO: 203875 - DNA, 2601 bp, synthetic construct
  misc_feature 1..2601: note = Description of Artificial Sequence: Synthetic coding sequence
  source 1..2601: mol_type = other DNA
atggaggagggcaacaacaacgaggaggtgatccacctgaacaactttcactgccatcgcggccaagagtggataaacctgcgcgatggcccaatcacgatatcagatagttctgacgaggaacgaataccaatgttagtgacgccggctccccagcagcacgaggaggaggaccttgacgatgacgtcatcctcaccgaggatgattccgaagatgattacggggagttcctggacctgggcccgcccggtatatctgagtttacaaagccaagtggacaaacagagagagagcccaaaccagggccatcacacaaccaagcagccaacgacatagtgaatccacgtagtgagcagaaggtcataattctggaagagggtagcctcctctacactgagagcgacccccttgagactcaaaaccaatctagcgaagactctgagaccgaactgcttagtaacctgggcgagtcagctgcacttgcggacgatcaggcaattgaggaagactgttggttagatcatccatattttcaatctctcaatcaacagcctcgcgagatcacaaatcaggtagtgcctcaggagcgacaaccggaggctgagctgggacgcctcctgttccagcatgaatttccaggaccggcctttccccgccccgaacctcagcaggggggaatttctggcccatcatcaccccagcctgcccatcctctgggcgagttcgaggaccagcagctggcaagcgatgacgaagaaccggggcccgctttcccaatgcaggagtctcaagaacctaatctggagaatatctggggacaggaagccgccgaggtggatcaggagctagtcgagttactggtgaaggagacagaagcgcggtttccagatgtggccaacggctttatcgaagagatcatccacttcaaaaactattacgatctcaacgtgctgtgcaactttcttctggaaaatcccgactatccaaagcgcgaggatcgtataattatcaatccctctagcagcctgctcgcctcccaggacgagactaagctgccaaaaattgacttcttcgattattccaagctgacaccgctcgatcaaaggtgcttcattcaggccgccgatctgctgatggcagacttcaaagtactcagttcccaggatataaagtgggctctgcacgaactgaagggccattacgcgatcacaaggaaagctctttccgacgctattaaaaagtggcaggaactgagcccagagacatcaggcaagcggaagaaacgcaagcagatgaatcaatattcctacatcgacttcaagttcgaacagggtgatattaagatcgaaaagcggatgttctttctcgaaaacaaacgcagacattgccgaagttacgatcggcgagccctcctgcctgcagtccaacaagagcaggagttttacgaacagaagatcaaagaaatggccgaacatgaggatttcctgctggccctccaaatgaacgaggagcaataccagaaagacggtcagctgattgaatgtagatgttgctacggtgagttcccattcgaggagctaactcagtgtgcagatgcccacctgttttgtaaggaatgccttattcgctacgcccaggaggccgtctttgggtctggtaaattggagctctcttgcatggaaggatcctgtacatgttcattcccaacttccgaactggagaaagtgttaccccaaaccatcctttacaagtactatgaaagaaaagccgaagaggaggtcgcagccgcctacgccgacgaactcgtgcgctgtcctagttgctccttcccggcacttctagattctgatgtgaagagattttcttgcccgaacccacattgcagaaaagagacctgtaggaaatgccagggtctgtggaaagagcataatgggcttacttgcgaggagttggccgaaaaagacgacataaagtacagaacttcaattgaggagaaaatgaccgcagctagaattcggaaatgccataaatgcggcacgggactcatcaaaagcgaaggttgcaaccggatgagctgtcgttgcggagcacagatgtgctatctgtgtcgggtctccataaatgggtatgatcatttttgtcagcaccctcgtagccctggagctccatgccaagaatgcagcagatgttcactgtggaccgaccctacagaagatgatgagaaactgattgaagaaattcaaaaggaggccgaagaggagcagaagagaaaaaatggcgagaacaccttcaagaggattgggcctccactggagaagcctgttgaaaaagttcagcgggtcgaagcacttcccagacctgtgccccagaacttgccgcagcctcaaatgcccccttatgcttttgcccatcccccatttccattgccccctgtccggcccgtgttcaataattttcctctaaacatgggtcccattccagcaccttatgttccgcccctgcccaacgtacgggtcaactatgacttcggaccaatccacatgccgctcgagcataatctgccgatgcacttcggacctcagcctcgacataggttctag

SEQ ID NO: 203876 - DNA, 2037 bp, synthetic construct
  misc_feature 1..2037: note = Description of Artificial Sequence: Synthetic coding sequence
  source 1..2037: mol_type = other DNA
atggaggagggcaacaacaacgaggaggtgatccacctgaacaacttccactgtcacaggggacaagaatggataaatctcagggacggtcccatcactatctcagacagcagtgatgaggagcgcataccaatgctggtcactccagccccccagcagcacgaggaggaggatttggatgatgacgtcattttgacggaaaccaacaagccacagagatcaaggcccaacttaatcaaaccagccgcacagtggcaggaagccgccgaggtggatcaggaactcgttgagttactcgtaaaggagacagaagctcggtttcctgacgtggcgaatgggttcatcgaagagattattcattttaagaattattatgacctcaatgttctctgtaactttttgttggagaaccccgattatccaaagcgcgaagatcgcataatcatcaatcctagttccagtctgcttgcgtcgcaagatgaaacaaagctaccgaagatagactttttcgactactctaaacttacccctctcgaccagcgctgcttcattcaggctgctgacttattaatggccgattttaaggtgttaagctcgcaggatatcaaatgggcactgcatgaactcaaaggccactacgctatcaccaggaaagctctctctgatgctatcaagaaatggcaagagcttagcccagaaactagcgggaagcggaagaagcgtaaacagatgaatcaatatagctacatagacttcaagtttgaacagggcgacatcaaaatcgagaaaagaatgtttttcctggaaaataaacgacggcactgtcggtcgtacgatcggcgggctctgcttccagcagtccagcaagaacaggaattttacgagcagaaaattaaggagatggctgagcatgaagactttcttttagccctgcagatgaacgaagagcaataccaaaaggacggccagcttatagagtgtcgttgctgctatggtgagttcccatttgaagaattaacccagtgcgcagacgcccatctgttctgtaaggagtgcctgatccgttacgcccaggaagctgtcttcggatctggaaagcttgagctgagctgcatggagggttcctgtacatgtagttttccgacatcagagctcgaaaaggttctgcctcagaccatactctataaatactatgaaaggaaggcggaagaggaagttgcggcagcttacgccgatgaacttgtgcggtgcccgtcatgctccttccccgctctgctcgacagcgatgtgaaacgattttcttgtcctaatcctcattgccggaaagagacttgcagaaagtgccaaggcttatggaaggagcataatgggcttacgtgcgaggagctcgctgaaaaggacgacataaagtaccgcacctccatcgaagagaaaatgaccgccgcccgaatacggaaatgccacaagtgcggaacgggccttattaaaagtgaaggatgtaatagaatgagctgtcgatgtggcgcacagatgtgttatttatgcagggtctcaattaatggttatgaccatttctgccagcaccctaggagccccggcgccccctgtcaagaatgttctcgctgtagcctctggaccgatcctacagaggacgatgagaagcttatcgaagagatccaaaaagaggccgaggaagaacaaaaacgtaaaaatggagagaatacctttaagagaattggcccacccctagagaagccagtcgaaaaggtgcagagggtcgaggctctgccacgtccagtgccccagaatctgccacagccacagatgccgccatatgcgtttgcacatcccccatttccactccctcctgtgcggccggtgtttaataacttccctctgaacatgggtccaataccagccccatacgtcccacctcttcctaacgtgcgcgtcaactacgacttcgggccaattcatatgcctctggaacacaatcttcccatgcactttggccctcagccccgccacagattctag

SEQ ID NO: 203877 - DNA, 447 bp, synthetic construct
  misc_feature 1..447: note = Description of Artificial Sequence: Synthetic coding sequence
  source 1..447: mol_type = other DNA
atgagcagcgacttcccccactacaacttccggatgcccaacatcggtttccagaatctccctttgaatatttatatagtggtgtttggcacagctatatttgtttttatcttgtcccttcttttctgctgctatctgattcgacttcgacaccaggcacataaggagttttacgcttacaaacaagtcatcctgaaggaaaaagtgaaggagttgaacctgcacgagttatgcgcagtgtgtctggaagactttaaaccccgcgacgaactaggcatctgcccttgtaagcacgcatttcataggaagtgtctgatcaagtggctcgaagttcggaaggtttgtcctctatgtaatatgcccgtgcttcagctggcacaactgcactccaagcaggaccgcggtcccccccagggacccctaccaggagctgaaaacatagtgtag

SEQ ID NO: 203878 - DNA, 447 bp, synthetic construct
  misc_feature 1..447: note = Description of Artificial Sequence: Synthetic coding sequence
  source 1..447: mol_type = other DNA
atgagcagcgacttcccccactacaacttccggatgcccaacatcggcttccagaacctgccactgaacatttacatcgtggtctttggaactgcgatttttgtgtttatccttagcctcctgttctgctgttatctcatcagattacgccaccaagcccacaaggaattctatgcatacaaacaggtcatcctgaaggagaaagttaaggagctgaaccttcatgaactttgcgcagtgtgtcttgaagacttcaagccacgggacgagctggggatctgtccctgcaagcacgctttccatcgcaaatgtctcataaaatggctggaggtgagaaaagtctgtccgctgtgcaatatgcctgtgctgcaactggcgcaactccatagcaaacaagacagaggaccaccccagggaccactgccgggagccgagaatatagtgtag

SEQ ID NO: 203879 - DNA, 510 bp, synthetic construct
  misc_feature 1..510: note = Description of Artificial Sequence: Synthetic coding sequence
  source 1..510: mol_type = other DNA
atgctgaacaagagcggcgagagccggtaccccgccctgttccccgtgctgggaggcagttccatgtcaagcgatttcccccactacaactttcgcatgccaaatattggtttccagaatctgcctctcaacatctacattgtcgtgtttggaacggccatcttcgtcttcatcctgtcccttctgttctgttgctatctgatcagactcaggcatcaggctcacaaagaattctatgcctacaagcaggtcatattaaaagagaaggtcaaagaactgaacctccacgagctgtgcgcggtctgcctcgaagacttcaaaccccgggatgagctaggaatctgtccgtgtaaacatgcctttcaccgcaaatgtttaattaaatggctcgaagttcgcaaggtgtgtcctctctgcaacatgcccgttctacagctggcccagctgcatagcaagcaggaccgcggacccccccagggtccattaccaggtgccgaaaacatcgtctag

SEQ ID NO: 203880 - DNA, 510 bp, synthetic construct
  misc_feature 1..510: note = Description of Artificial Sequence: Synthetic coding sequence
  source 1..510: mol_type = other DNA
atgctgaacaagagcggcgagagccggtaccccgccctgttccccgttttaggaggctctagcatgtcctccgactttcctcactataatttcaggatgcctaatataggtttccaaaatttgccactgaacatatatattgttgtatttgggacagctatcttcgtgtttattctgtcacttttgttctgttgttacctgattagactcagacatcaagctcataaggagttctatgcgtacaaacaggttatattgaaggagaaggtcaaggaattaaatctacacgagctgtgtgcagtgtgcctggaggatttcaagcccagagacgagcttgggatatgtccttgcaagcacgcatttcatcgcaagtgtctgattaaatggttggaagtgagaaaggtgtgtcccctgtgcaacatgcctgttctgcaacttgcacagctccattccaagcaggatcgcgggcctcctcaaggcccactgcccggtgctgaaaacatcgtatag

SEQ ID NO: 203881 - DNA, 1302 bp, synthetic construct
  misc_feature 1..1302: note = Description of Artificial Sequence: Synthetic coding sequence
  source 1..1302: mol_type = other DNA
atggaggccgtgtacctggtggtgaacggcctgggcctggtgctggatgttctaacactggtgttggatttaaactttctgctggttagctccctgctggctagtcttgcctggctgcttgcgtttgtgtataacctgcctcataccgtcctgaccagcctgctgcacctgggccgcggcgtgctgttgtccttgcttgctttaatagaagcagtcgttcgcttcacttgcggcggtctgcaggcattatgtacacttttgtacagttgctgttccgggctggaatcactgaagctcttaggccatttagcgagccatggcgcactgagaagcagagagattctccaccggggcgtgctgaacgtcgtctcctccggacatgcgctgctccggcaggcatgcgatatctgtgcaatcgctatgtccctggtggcatacgtcattaactccctcgtgaacatttgtcttataggcacccagaatttgttttctctggtcctggccctgtgggatgccgtcacaggccccctgtggcgcatgaccgacgttgttgccgcctttctggcgcacatttcttcatccgcggtggccatggccatactgctatggacaccttgccagctcgcgttggagttactagcatccgccgcgaggttgttggccagtttcgttttggtcaatctgactggcctcgtgctgttagcctgtgtgcttgccgtgactgtaactgtcctgcaccctgatttcacactgagacttgctacacaggccctgtcacagctgcacgccagacctagctatcaccggctgagagaagatgtgatgcggttgtccaggctggccctgggctcagaagcgtggcgaagggtctggtctaggagcctccaactcgctagttggcccaatagagggggcgctccgggcgccccacaaggcgacccaatgcgggtttttagtgtccggactcgcagacaggatacactgcctgaagccggccgcagaagcgaggcagaggaagaagaggcccgaactatccgcgtgacgcctgttagaggtagggagaggctaaatgaggaggagccccctggaggacaagacccctggaagctgctgaaggagcaggaggaaaggaaaaagtgtgtcatctgccaggaccagagcaagactgtgcttctactgccctgtagacatctgtgcctctgccaggcctgtaccgagatattgatgcgccaccccgtgtatcatcgcaactgccctctgtgcagaagaggaattttgcagacattgaacgtgtatctatag

SEQ ID NO: 203882 - DNA, 3219 bp, synthetic construct
  misc_feature 1..3219: note = Description of Artificial Sequence: Synthetic coding sequence
  source 1..3219: mol_type = other DNA
atgcccggcgaggaggaggagcgggccttcctggtggcccgggaggaactcgccagtgcactgcgaagagactcaggacaggccttcagcctcgaacagttacgccctctgctggcttcaagcctccccctggccgcgcggtacctgcagctcgacgccgctcggctcgttcgctgcaacgcgcatggcgagccaagaaactacctaaatactttgagcacagccctaaacatactcgaaaagtatggccgcaatcttctttcgcctcaaagaccgcgctactggcgcggagtcaagttcaacaatccagtcttccgcagtaccgtggatgccgttcagggaggcagagacgttttgcgcctgtacggctatacagaagaacagcccgacggtctgtcctttcctgagggacaggaggagccagacgagcaccaagtagccactgtgacattggaggtgctgctgctgaggactgagctgtcattattactacagaacacacaccctaggcagcaggcgctggagcagctgctagaggataaggttgaggatgatatgcttcaactctctgagttcgatccactgttacgcgagattgcaccgggccctcttaccaccccaagcgttccagggtccacccctggtccttgttttctctgcggcagcgcacctggaacactccactgtccgagctgcaaacaggcgctctgtccagcttgcgatcacctttttcatgggcacccctcaagagcccaccatcttcggcagaccttgcctggggtgctccagggaacccatctgtcacctagcctgccagcttccgcccagccaaggccccagtcaacgtctttgctggcgctgggagatagttcgctgtcctctcctaaccccgcctctgcccatttaccttggcactgcgcagcatgcgcaatgcttaatgaaccttgggcagtgctgtgcgtcgcctgcgatagacctcgggggtgtaaaggacttggtctcggcacagagggcccgcagggcacaggcgggctggagcccgacctggctcgagggcgatgggcctgccagtcttgtaccttcgagaacgaagccgcagcagtgctgtgcagcatttgtgaacggccacggctcgcacagccaccaagtcttgtggttgactctcgcgacgcgggaatttgcctgcaaccactgcaacagggggacgcgctcttagcttcagcccagtcacaagtgtggtactgcatccattgcacgttctgcaattcctctcccggttgggtttgcgtgatgtgtaaccgcaccagctcccccatccccgcccagcatgctccacggccttatgcatccagtctggaaaaaggccctccaaagcccggaccaccccgccggcttagcgcaccactgcctagcagttgtggcgacccagagaaacagaggcaggataaaatgcgggaagagggcttacagcttgtgtccatgatccgcgagggcgaagcggccggggcctgtccagaagagatattctctgcgcttcagtattctggcaccgaagtcccattgcagtggctgaggtcggagctgccctatgtcctcgagatggtggccgagctggccggacagcaggatccaggtcttggggcgttctcctgtcaggaggcccgtagggcgtggctggatagacatggcaatttagatgaagctgttgaggagtgtgtgaggaccagacggcgcaaggtgcaggagttacagagcctgggctttgggccggaggagggtagtttacaggcactgttccaacacgggggcgacgtgtcccgagctctgaccgagcttcaaagacagcggcttgaaccttttcgccagcgactctgggattcgggacctgaaccaacaccctcgtgggacggccccgataaacagtcactcgtgcgccggctgcttgctgtgtatgccctcccaagttggggtcgggctgagctcgccctcagcctgctgcaggaaacccctcgaaactacgagcttggtgacgttgtagaagcagtgagacattcccaggaccgagccttcctgcgccggctattggctcaagagtgcgcggtctgtgggtgggcccttccccataataggatgcaagccctgacatcttgcgagtgcacaatttgccccgattgtttccgtcagcactttacaatcgctctgaaagagaagcatattacagacatggtttgtcccgcttgtggccgcccggacttgaccgacgacacacagctgctctcttatttcagcactctggacattcagttgagagagtctctggagcccgacgcttatgctctttttcacaaaaaactgaccgagggggtcctcatgcgtgacccaaaattcttatggtgcgcgcagtgcagtttcggcttcatatacgagagggaacagcttgaagccacttgtccccaatgccaccagactttttgcgtgcgttgtaaacgccaatgggaggaacagcaccgagggaggtcgtgtgaggacttccagaactggaaacgtatgaacgatcctgaataccaggcacagggcctggccatgtatctccaggagaacggtattgactgccccaaatgcaaattctcctacgccctggctcgtgggggatgtatgcatttccactgtacccaatgccgccatcaattctgcagcggttgttataacgccttctacgccaaaaacaaatgccccgagccaaattgtcgggtaaagaaaagcctgcacgggcaccaccccagagactgtttattctatctacgtgactggaccgccctgcggctgcagaagctgctccaggataataatgtcatgtttaatactgagccacctgctggcgcaagagccgttcctggaggaggctgtcgagtgatagagcagaaagaggtgccaaatgggctccgagacgaggcatgcgggaaagagacccccgccggctacgccggactgtgccaggctcactataaggaatatctcgttagccttattaatgcccacagcctcgacccagccactctgtacgaagtcgaagaactggagacagccaccgagaggtatctgcacgtgagaccgcaaccattggccggcgaggatcctcccgcctatcaggcacgcctattacaaaaacttaccgaggaggtcccgttgggccagtcaataccccgcagaaggaagtag

SEQ ID NO: 203883 - DNA, 1518 bp, synthetic construct
  misc_feature 1..1518: note = Description of Artificial Sequence: Synthetic coding sequence
  source 1..1518: mol_type = other DNA
atgcccggcgaggaggaggagcgggccttcctggtggcccgggaggagctggcaagcgctttaagacgcgattcaggacaggctttctccctggagcagctccgccccttgttggcttccagcttacctctcgccgctaggtacctccagttggatgctgccaggcttgtccggtgcaacgcccacggagagcctagaaattaccttaatacccttcccacaccgtcttgggacgggcccgacaagcagtcactcgtcagaagacttctcgctgtgtatgcacttccctcctggggcagagcagagctcgccctttcattgctccaagaaacaccacggaactacgagctaggagacgtcgtggaggcagtcaggcattcccaggatagagccttcctgaggcgactcctcgcccaagaatgtgcagtatgtggatgggccctcccccataacagaatgcaggctctgaccagctgtgagtgtaccatctgtccagactgcttccgtcagcacttcaccatcgcactgaaggaaaagcacattactgatatggtgtgcccagcttgtggccggcctgatctgactgacgacactcagctcctttcttacttcagcactttagatatacagctgagggagtctctggagccagatgcctacgctttatttcacaagaaattaaccgaaggggtgctcatgcgggatcctaaatttctatggtgtgcccaatgcagtttcgggttcatttacgaaagagaacagctcgaagcaacttgcccgcagtgtcaccaaaccttctgtgtccggtgcaaacgacagtgcgaggatttccagaattggaaacgtatgaatgaccctgagtaccaggctcaggggctcgctatgtatttgcaggaaaatgggatcgattgccctaaatgtaagttttcatatgctctggcccgggggggctgtatgcactttcattgcactcaatgtcgacaccagttttgcagcggatgctacaatgcgttctatgcaaaaaacaagtgtcccgagccaaactgtcgcgttaagaagtctcttcatggccaccaccctagagattgtctgttttatttacgagactggaccgccctgaggttgcagaaactgcttcaggataacaacgttatgttcaacactgaaccgcccgccggcgcacgagccgtgcctggcggcggatgcagagtcatcgagcagaaggaagtgcctaatggactgcgcgacgaggcttgtggcaaggagacacctgcaggttatgctggcctttgtcaggcccactacaaagagtatttagttagcctgattaacgctcattcattggacccagcaacactctacgaagttgaggaattggagacggctacagaacgatacctccacgttaggccccagccactcgcaggcgaggatccacctgcttaccaggcacggttgctgcaaaagctgaccgaggaggttccactgggccagtctatccccaggcgcagaaagtag

SEQ ID NO: 203884 - DNA, 2766 bp, synthetic construct
  misc_feature 1..2766: note = Description of Artificial Sequence: Synthetic coding sequence
  source 1..2766: mol_type = other DNA
atggacctgtgcacccgggccggcgagcccagcctgacccagaacacacaccccagacagcaggcgctggaacaattactggaagacaaagtagaagacgatatgcttcaactttctgagtttgatccactactgcgggaaattgcccctggaccacttaccactccctcagtgccgggatcgacacccggcccatgcttcctgtgcggctctgcaccaggcaccttgcactgcccgtcgtgtaaacaagccctgtgtcctgcctgtgaccacctcttccacggccacccttcccgggcccaccatttgagacagactctgccgggggtgctgcagggaacgcacctctccccctcactgcctgcctctgcccaaccaaggccacagagtactagtctcctcgcactcggagacagcagcttgtcaagcccaaaccctgccagtgcccacctaccttggcactgtgccgcttgcgccatgctgaacgaaccttgggccgtcctgtgcgtagcctgcgacaggcccaggggttgcaaggggctaggcctgggaaccgagggaccccagggcactgggggcctggaacccgacctagcccgcggccgatgggcatgccagtcttgtacttttgaaaatgaggcagcggcggtgctatgctccatttgtgagcgtcccaggctcgcccagccaccctctctggtggtggactctcgggacgcaggtatctgcctacagcctctgcaacaaggggacgcgttgctggcctcggctcagtctcaggtgtggtactgcatccattgtactttttgtaattcttctccagggtgggtttgcgtgatgtgtaaccgtaccagcagccccatcccagcgcagcacgctccccggccttacgcctccagtttggaaaaaggtcctcctaagccaggaccccccaggcggctgagcgcacctttgcctagctcctgtggggacccagagaaacagcggcaggacaaaatgcgggaagaaggactccaactggtcagcatgatacgcgagggcgaagcggccggagcctgtccagaagagattttctcggcccttcagtattccggaaccgaggttccactgcaatggttacggtctgagctgccatacgtgttagagatggtggctgaactggccggccagcaggatcctggtctcggagcattctcatgccaggaggcaaggagggcgtggctggaccgccacggtaacctggatgaggccgtggaggaatgtgtgaggacccggaggcggaaggtccaggagctgcagtcgttggggttcggccctgaggagggcagcctgcaagccctgtttcagcacggtggtgacgtgagtcgtgctctgacagaactccaaaggcagcgactagagccattcagacagagattgtgggattccgggcccgagccaacaccatcctgggacggtcctgataaacagtccctcgtccgccggctgctggcggtctacgcattgccatcctgggggcgagccgaactcgctctatctctgctgcaggagaccccgcggaattacgagctcggagacgtggtggaggccgttagacacagccaggatcgtgcctttctgcggcgtctcctggcacaggagtgcgccgtgtgtggatgggccctgccccacaacagaatgcaggccctaacatcctgcgaatgcacaatctgtcccgattgtttccggcagcactttaccattgccctaaaagagaaacacataacggacatggtgtgtcctgcctgcgggaggcctgatctcactgatgacactcagttgttgagttatttctctacactagatatccagctgagagagtcgctcgaaccggacgcttacgcattatttcataaaaagcttaccgaaggggttctgatgagagacccaaagttcctttggtgcgcgcagtgtagtttcggcttcatctacgaacgggaacaacttgaagctacatgtccgcagtgtcatcagacattctgcgtcaggtgtaaaaggcagtgggaagaacagcacagaggaaggagttgcgaggacttccaaaactggaaacgcatgaatgacccagagtaccaggcccaggggcttgccatgtacctccaggagaatggtatagattgccccaagtgtaaattctcctacgctttagctcgaggaggttgtatgcatttccattgtactcagtgcagacatcagttctgcagcgggtgctataatgcgttttatgcgaagaataaatgtccagagcctaattgccgagtgaagaaaagcttgcatggacatcatccgcgggactgcctgttctatctccgggattggaccgcactccggttacagaaactactccaggataataacgttatgtttaacacagagccccctgctggggcaagagccgtgccagggggagggtgcagggtcatcgaacaaaaggaggtccctaacggattgcgggatgaggcatgcggaaaggagacccctgccgggtacgctggtctttgtcaggcacactacaaagaatacctcgtttccctgataaacgcccattcactggacccagctactctatatgaagtggaggagttagagacggcaaccgagcgctatctccacgtgcgccctcagcctctggccggtgaggacccacccgcctatcaggctcgacttctgcagaagctgaccgaggaagtgcccctgggtcagagtattccacgaagaagaaagtag

SEQ ID NO: 203885 - DNA, 513 bp, synthetic construct
  misc_feature 1..513: note = Description of Artificial Sequence: Synthetic coding sequence
  source 1..513: mol_type = other DNA
atgcccggcgaggaggaggagcgggccttcctggtggcccgggaggagctggcttccgcgttgagacgggattcgggtcaagcattctctctggagcagctccggcctctcctagcatcgagcctcccattggctgccaggtacttgcagctggatgccgcgcggctcgtgcggtgtaatgctcatggagaaccgagaaactacctgaacaccctaagcacggcgctgaacatcttggagaaatacggcagaaaccttttgagtcctcagcgtccaagatactggcggggtgttaagttcaacaatcccgtgtttagatccacagtggacgcagtgcagggaggccgcgacgtgctcaggctctacggttacactgaggagcagcctgatggactgtcttttcctgaaggccaagaggaacctgatgagcaccaggttgcaactgttacactggaggtgttgctcttacggacagaattgagcttgctcctgcagaacacccatccgagatag

SEQ ID NO: 203886 - DNA, 171 bp, synthetic construct
  misc_feature 1..171: note = Description of Artificial Sequence: Synthetic coding sequence
  source 1..171: mol_type = other DNA
atgcccggcgaggaggaggagcgggccttcctggtggcccgggaggaactagcttccgccctaagacgggattctggccaggccttctctctggaacaactgcgcccactgctggcgagtagcctccccctggctgctaggtacttgcaactcgatgccgcgcgactttag

SEQ ID NO: 203887 - DNA, 1122 bp, synthetic construct
  misc_feature 1..1122: note = Description of Artificial Sequence: Synthetic coding sequence
  source 1..1122: mol_type = other DNA
atgcggaaggccggcgccaccagcatgtgggccagctgctgcggcctattgaatgaggtgatgggcaccggcgctgtgcgagggcagcagtctgctttcgctggggcgaccggtccattccgatttactcctaatccagaattttccacttacccacctgctgccacagaagggcctaacatcgtatgtaaggcttgcggtctttcatttagcgtttttaggaagaaacatgtatgctgtgattgcaaaaaggacttctgctcagtctgttctgtcttgcaggaaaatctgagacgctgttccacctgccatctcttacaggagaccgcatttcaaaggccacagctcatgcggcttaaggttaaggacctcagacagtaccttattctgcgcaacattccaattgacacgtgtagagagaaggaggacctcgtggatctcgtcctctgccaccatggcctaggctccgaggacgacatggacacatccagcctcaactcatctaggagtcagacttcaagcttctttacgcgctcattcttcagtaattacactgccccttctgccacaatgagcagtttccaaggcgagctgatggatggtgatcagacgtcacgctctggggtgccagcccaggttcagagcgaaatcacctctgccaacacagaagacgacgacgacgatgatgatgaggatgatgacgatgaggaggagaatgccgaggatagaaatccaggcctgagcaaagaacgtgtgcgtgcgagtctctccgatttgtcgtcccttgacgacgtggaaggcatgtccgttcgccagctgaaggaaatcctggcccgaaacttcgtcaactatagcggttgttgtgagaagtgggaattggtcgagaaagtgaaccgtttatataaagaaaatgaagaaaatcagaaaagctacggagagaggctgcagctgcaggatgaggaggatgattctctctgccgtatctgtatggacgccgtcatcgactgcgtgttactggaatgcggccacatggtaacttgcacaaagtgtgggaagcgaatgagtgagtgtccaatatgccggcagtacgtggttcgtgcggttcacgtgtttaagtcctag

SEQ ID NO: 203888 - DNA, 1119 bp, synthetic construct
  misc_feature 1..1119: note = Description of Artificial Sequence: Synthetic coding sequence
  source 1..1119: mol_type = other DNA
atgaaggccggcgccaccagcatgtgggccagctgctgcggcctgctaaacgaggtgatggggactggcgcagtgaggggccaacagtctgccttcgctggagccacgggtcccttccgctttacaccgaacccggagttctctacgtacccacctgctgccacagagggccccaatatcgtgtgtaaagcctgtggacttagcttctcggtgtttagaaaaaagcacgtgtgctgcgactgcaagaaggacttctgttcagtgtgcagtgttcttcaagagaacttacgacgctgtagtacatgtcacctcctacaggaaaccgcgtttcagagacctcagctgatgagactaaaagtaaaggatctacgacagtatctcatcctgcgcaacattccaatcgatacctgtagagaaaaggaagacctggtggacttagtgctgtgccatcatggactggggtccgaagacgatatggacacttcctctttgaatagctcccgcagccaaacgagctcctttttcacaaggtcgtttttttccaactataccgcccctagcgcaaccatgtcctcatttcagggggagctcatggacggcgatcagactagcagatcaggcgtacccgcacaggtgcaatccgagataacctctgctaacacagaagacgacgatgacgatgacgatgaggatgacgacgatgaggaagagaacgcagaggaccggaacccaggattaagcaaagaaagggttcgggcctcgctgtccgatctctccagcctggacgacgtcgaggggatgtctgtgaggcagttaaaagagatacttgccagaaactttgtcaattactctggttgctgtgaaaaatgggaattggtagagaaggttaacagattgtacaaggagaacgaggaaaaccagaaaagttatggcgaaagactccagcttcaggacgaagaagacgactctctgtgcaggatatgtatggatgcagtgatcgactgtgtgcttctcgagtgcggccacatggtgacctgcactaagtgcggcaaaagaatgagcgaatgccccatatgccgacagtacgtggtgagagcagtgcatgtattcaaatcatag

SEQ ID NO: 203889 - DNA, 1122 bp, synthetic construct
  misc_feature 1..1122: note = Description of Artificial Sequence: Synthetic coding sequence
  source 1..1122: mol_type = other DNA
atgcggaaggccggcgccaccagcatgtgggccagctgctgcggcttgctaaacgaggtgatggggactggggcagtgagaggtcagcagtcagcatttgcgggggcaactgggccgttccgcttcacgcctaaccctgaattcagcacctaccccccggccgcaactgaaggtcctaacatcgtctgtaaagcttgcggtctctcattcagcgtctttaggaaaaaacacgtttgttgcgactgcaaaaaagatttctgctctgtgtgcagcgtcctgcaggagaacctgcgacgatgtagcacttgtcacctgctccaggaaacagcatttcaacgcccccagttaatgcggcttaaggtgaaagacctcagacagtatcttatcctgagaaatatcccaattgacacctgcagggagaaggaggatctggtggatctggtcctttgccatcacggattggggtccgaagacgatatggatacatccagtctgaactcttcccgtagtcagacctccagcttcttcacaagatcttttttttcaaactatactgccccttcagcaactatgtcctcgttccagggagagctgatggatggagatcagacctccaggtccggtgtgccagcacaggtccagtctgagatcactagcgcaaatacagaggatgatgatgacgacgacgatgaggacgacgatgacgaggaggagaatgctgaagaccgcaacccaggtttatccaaagagagggtcagagccagtttgtctgacctgagctcactcgatgatgtggaagggatgtccgtacggcaactgaaggagatcctggcccgcaatttcgtaaactactctgggtgttgcgaaaaatgggaactggtggagaaagtgaacagactgtacaaagaaaacgaggaaaaccaaaagtcctatggggaacgactccagttacaggacgaggaggatgactcactgtgtcgcatatgtatggatgctgtcatcgactgcgtcctactcgaatgcgggcacatggtcacttgcacgaagtgcggtaaaagaatgtcggagtgcccaatttgcagacaatatgtggtgcgagccgtccacgtctttaaatcatag

SEQ ID NO: 203890 - DNA, 1548 bp, synthetic construct
  misc_feature 1..1548: note = Description of Artificial Sequence: Synthetic coding sequence
  source 1..1548: mol_type = other DNA
atggcctgcaagatcagccccggcgccaacagcgccagcctgcccgggcaccctaataaagtcatctgcgagcgagtgagactccaaagtctgttcccactcctgccgtccgatcaaaatactaccgtgcaggaggacgcccatttcaaggctttctttcagagtgaagattccccatcccctaagcgccaacgcctgagccatagcgtatttgattacacctcagccagcccagcccccagtccccctatgcgcccttgggagatgacgagcaaccgacagcccccaagcgttcgcccgagccaacaccacttctcaggcgaacgatgcaatacccccgctcggaatcgaagatctcctccggtgagacggcaacggggcagaagggatcggctcagcagacacaattccatcagccaggatgagaactaccaccaccttccctacgcacagcagcaggccatagaggaaccacgggcctttcacccgcccaacgtgtccccgagattgctccatcctgccgcccatccaccacagcagaatgccgtgatggtggatatccacgatcagctgcaccaaggcactgtccctgtcagctataccgtgaccacagtcgctccgcacgggatccccctctgtaccggccaacatataccagcgtgctctacacaacaagtacccggctgtagtgtggtcttcagcggccagcatttgcctgtttgtagcgtaccgccacccatgctgcaggcctgtagcgtgcagcatctgccagtgccatatgctgccttccccccgttaatctccagtgacccctttctgatccatccgcctcacctaagcccccaccacccaccgcaccttccacccccaggtcagttcgtaccctttcagactcaacagagtcgctcccctctgcaaagaatagagaacgaggtcgagttgctcggtgagcatttaccagtgggagggtttacataccctcctagcgctcatcctccaacactgccaccctccgctcccctgcagttcctgacccatgaccccctgcatcaggaggtgtccttcggggttccctaccctccgtttatgccgagaagactgaccggtagatcaagataccgaagtcagcagcccatccccccccccccgtatcatccctcccttcttccttatgttctcagtatgctaccggttccgccagcagtcgggccgaccttcagttttgaactagacgttgaggatggcgaggttgagaattatgaagcactactcaatctagcagagcggctcggagaggcgaagcctcgtggcctgaccaaggctgacatagagcagctgccgtcttacaggttcaatccgaataatcaccagtccgaacagactctgtgcgtggtctgtatgtgtgattttgagtctaggcagctgcttcgggtactgccctgcaaccacgagtttcatgccaagtgcgtggataaatggctgaaagccaaccgtacatgccccatatgccgcgccgacgcatcagaagtccaccgtgacagtgaatag

SEQ ID NO: 203891 - DNA, 1299 bp, synthetic construct
  misc_feature 1..1299: note = Description of Artificial Sequence: Synthetic coding sequence
  source 1..1299: mol_type = other DNA
atgcggccctgggagatgaccagcaaccggcagccccccagcgtgagaccttcccaacaccacttctcaggagagaggtgtaacacacccgctagaaatcgacggtcaccaccagtgaggcgccagaggggccgcagggatcgcctttcacgacataactcgatctcgcaggacgaaaactaccaccacttgccctacgcacaacagcaggccatagaagagccacgagcatttcatccccccaacgtcagcccacgtctcctccatccagctgcccaccccccacagcagaatgctgtaatggtggacatccatgatcaactgcaccagggaaccgttcccgtgagctacaccgtgacaactgtcgctccgcacgggattcctctgtgcacgggacaacatatccctgcctgctctactcagcaggttccagggtgttccgtggtgtttagcgggcagcacctccctgtatgcagcgtcccgccaccaatgcttcaggcgtgctcagttcagcatctaccagttccatacgctgcattcccacccctcattagctcagacccgttcctaatccaccccccccatctaagcccccaccatcccccccacctcccgcccccgggacaatttgttccatttcagactcaacaatcccggtctcccctgcagagaatcgagaatgaggtggagctgctcggcgagcacttgcccgtggggggattcacgtatccaccatcagctcacccaccgacgctccctcctagtgcccccctccagttccttacccacgaccctctacatcaggaagttagttttggcgttccttacccacccttcatgccacggagactcacaggcaggtctagataccggagccagcaacccatacctcctccaccctatcatcctagtctgctaccatatgtgctgagtatgctgcccgtgccaccagcagttggccctacattctcttttgagctggatgtagaagacggagaagtcgaaaactatgaagcgctcctgaatctcgccgagcgattaggcgaagccaagcctcggggactgacaaaagccgacatagagcaactgcccagctacaggttcaatcccaacaaccaccagtcagagcagacactctgcgtcgtttgtatgtgtgactttgagtcccgacagctgctgcgtgtgctgccctgtaaccatgagttccatgcaaagtgtgtggacaagtggctgaaagcaaacagaacttgtccaatctgcagagcagacgcatccgaggtgcaccgcgattctgagtag

SEQ ID NO: 203892 - DNA, 1398 bp, synthetic construct
  misc_feature 1..1398: note = Description of Artificial Sequence: Synthetic coding sequence
  source 1..1398: mol_type = other DNA
atggcctgcaagagcgaggacagccccagccccaagcggcagcggctcagccattcggtttttgattatactagcgcttcccccgccccatcccctccaatgaggccctgggagatgactagcaatcgccagcctccatctgtacggccctcccagcaccactttagcggggagagatgcaacacgcccgcccgtaaccgtcgatcacccccggtcagacggcagagaggacgtcgagataggctgagtagacataattcaatctcacaggacgaaaattaccatcatctgccttatgctcagcagcaggctatcgaagaacctcgggcttttcatcccccaaatgtctcccctcggctcttacacccagcggcccacccaccccagcaaaacgcagtgatggttgatatccacgatcagcttcaccaaggaaccgtacctgtatcctatacagtcaccactgtggccccgcacggcatccctttatgcacagggcaacacattcccgcctgctcaacccagcaagtgcccggatgttccgtggtgttcagcgggcagcacttgcctgtgtgcagtgtgccgcccccaatgctgcaggcctgcagtgtgcagcatctgcccgtaccctatgctgcctttccacctctcattagctctgaccccttcttaatccatcccccccacttgagcccccaccatccaccccacctgccaccgccaggacagtttgtaccctttcagacgcagcagagccggtctccgctgcagcgcatcgagaatgaggtcgagcttctcggggagcatctcccggtgggtggctttacataccccccctctgcacacccgcccaccctgcctcccagcgcaccactccaattccttacacacgacccattacaccaggaagtgagctttggcgtgccttaccccccattcatgccaagacgtctgacagggaggtctagataccgatcacagcagcccatccccccgccgccctatcaccccagcctgttaccctacgtcctgtccatgttgcccgtgcctccagccgttgggcctactttttctttcgagctcgacgttgaggacggcgaagtggagaattacgaagccctgctgaatttggcagaacgcctgggagaggccaaacccaggggcctcaccaaggccgacattgagcaacttccatcctaccgatttaatcccaataaccaccagagtgaacagacattgtgtgttgtctgcatgtgtgatttcgaaagccgacagctgctgcgggtgctgccctgcaaccacgaatttcatgccaaatgcgtagacaagtggctgaaagccaacaggacttgccccatttgtagagccgacgcctcagaagttcaccgggactccgaatag

SEQ ID NO: 203893 - DNA, 1299 bp, synthetic construct
  misc_feature 1..1299: note = Description of Artificial Sequence: Synthetic coding sequence
  source 1..1299: mol_type = other DNA
atgcggccctgggagatgaccagcaaccggcagccccccagcgtgagacctagccaacatcacttttcaggcgagcgatgcaacacccctgcaaggaacaggcggtcccctcccgtgcgccgccaacgcggacggagggataggctgtccaggcacaattctatcagtcaggacgaaaactaccaccacctcccctatgcgcagcagcaggctatcgaagaacctagagccttccatccacctaatgtcagccctcggcttctgcaccctgccgcacacccaccgcagcagaacgctgtaatggtggacatacatgatcagctgcaccagggaacggtgcccgtttcctacaccgtcacaactgtggcccctcacggcatccccttatgtacgggccagcacattcccgcatgctccacacaacaggtgcctggatgtagtgtcgtttttagcggtcagcacctgcccgtctgctccgttcctccgccaatgcttcaagcatgcagtgtgcagcacttaccagttccctacgcagcctttccccccttgataagcagcgatccatttctgattcaccccccccacctgtcaccacaccacccaccacacttgcccccccccggacagtttgtgccatttcagactcaacaatcgaggagtcctctccagaggatcgaaaacgaggttgaactgctgggagagcatcttcctgtggggggattcacgtacccacctagtgcccaccctcctacattgcccccaagtgctcccctgcagtttctgacacacgacccactacaccaggaggtcagctttggcgtgccctaccctcccttcatgccaagaagactaacaggtcgctcaagataccgtagccaacagcccattcctccgcctccatatcacccctccttgcttccctacgtgcttagtatgctccctgtgccccccgctgtgggccccacatttagtttcgagctggacgtggaagatggtgaagtcgagaactacgaggcccttttaaatcttgcagagagactgggcgaggccaagccaaggggcctcactaaagctgatattgaacagctaccttcttaccgttttaatcccaacaatcatcagtctgagcagacgctgtgcgtcgtgtgtatgtgtgactttgagagcagacaactgctgagagtcctgccctgcaaccatgagttccacgccaaatgtgtggataagtggctgaaagccaatcggacttgcccgatttgcagagcggatgcctccgaagttcaccgggacagtgagtag

SEQ ID NO: 203894 - DNA, 1320 bp, synthetic construct
  misc_feature 1..1320: note = Description of Artificial Sequence: Synthetic coding sequence
  source 1..1320: mol_type = other DNA
atgcagcacacctgcacccagcagaagaaggtgacctacaagcacatagcccgattctcgccacgcaatcgcctttgccaggcagatgccgtgttcaataataatctggctggctttcaactccagagccccccagttaggcgccagcgcggacgaagagaccggttgtctcggcacaattccatttcccaagatgagaattatcaccaccttccctatgctcagcaacaggccatcgaagagcctcgggcttttcatccaccaaacgtgagccctagactgctgcatccagcggcacatccgccccagcagaacgccgtaatggttgacatccatgaccagctccaccagggcactgtcccagtgtcatatacggtcaccactgtagcaccacacggcatccctttgtgtactggccaacacattccggcttgctctacccagcaagtgcccgggtgttccgtggtcttttccggacagcatctacccgtgtgcagcgtccctcctcccatgctccaggcctgttctgttcaacacttaccagttccttatgcggcttttcccccgctaatttctagcgatccttttttaatacatcctccgcacctgagcccccatcacccacctcaccttcccccgcccgggcagtttgtcccattccagacgcaacagagccggagccccctgcagcggatcgaaaatgaggtggagttgttgggcgagcatttgccggtggggggatttacttaccctccttcagcccatccgccaactttgccacccagtgcccccctccaattcctgacacacgacccgcttcatcaagaggtttcatttggagtcccatacccaccatttatgccacgacgcttgacaggacggagtcgatataggtctcagcagcctattccaccgcctccttatcacccatcattgttgccatatgttctaagcatgctgcctgtccccccagctgtgggccctaccttttcctttgaactggacgtagaggacggagaggtggaaaattatgaggccctgttgaacctggcggagcgacttggggaggctaagccacgcggcctgacaaaagcggatatcgagcagttaccaagttacaggtttaatccaaacaatcatcagtccgagcagaccttgtgtgtcgtctgtatgtgcgatttcgagtctagacagctgctacgcgttctgccatgtaaccacgaatttcatgcaaaatgcgtggataaatggttgaaggctaatcgcacctgtccgatctgtcgggccgatgcctccgaggtccaccgggatagcgagtag

SEQ ID NO: 203895 - DNA, 999 bp, synthetic construct
  misc_feature 1..999: note = Description of Artificial Sequence: Synthetic coding sequence
  source 1..999: mol_type = other DNA
atggtggacatccacgaccagctgcaccagggcaccgtgcccgtgtcctatactgtcactacagtggcaccccacgggataccactttgtacagggcagcatatcccagcatgctccacccagcaggtgcccggttgctcagtggtcttctctgggcagcatttaccagtctgctccgtgcctccgcccatgctgcaggcctgcagcgtgcaacacctgcctgtcccttacgcagcattcccccctcttatttcttccgacccctttctgatccacccgccccacctgtcaccacatcatccccctcacctcccccctccgggccagtttgttcctttccaaacacaacagtccagatcccccctacagaggatagaaaatgaggttgaattattgggcgagcacctgccagtgggtgggttcacatacccaccaagcgcccaccctcccacactgcctccatcagccccacttcagttcctgactcatgacccactgcatcaggaggttagttttggtgtcccttaccccccatttatgccccgtagactaaccggacgatcccggtaccgcagtcagcagcctattccaccccctccataccatccatcgttgctgccctacgtcctttctatgttacccgtaccccctgcagtgggcccgacattcagctttgaactcgacgtggaggatggcgaagttgaaaattacgaggcacttctgaaccttgccgaaaggctgggggaggctaaaccccgcggactgaccaaggcagacatcgagcagctgccttcataccgcttcaaccccaataatcaccaaagtgaacaaacactttgtgtggtgtgcatgtgtgattttgagtctaggcaacttctaagggtcctgccgtgtaaccacgagttccacgccaaatgcgtggataaatggttgaaagcgaatcggacatgcccaatttgtagggctgatgctagcgaagttcatcgggattcagagtag

SEQ ID NO: 203896 - DNA, 1320 bp, synthetic construct
  misc_feature 1..1320: note = Description of Artificial Sequence: Synthetic coding sequence
  source 1..1320: mol_type = other DNA
atgcagcacacctgcacccagcagaagaaggtgacctacaagcacattgctcggttctcgcctagaaaccgactgtgtcaggccgatgccgtattcaataataatctcgccggctttcagcttcagtctccaccagtgagacgccaacggggtagacgagatcgtttgtccagacataattctatcagccaggacgaaaactatcaccacctcccttacgctcagcaacaggccatcgaggagcctcgagccttccaccctcctaatgtcagtcccaggctgctgcacccagccgctcaccctccgcaacaaaacgctgtcatggtggatattcatgaccagctgcaccagggcaccgtgcccgtctcttacacagtgacaacagtggcgccccacgggataccgctgtgcactggtcagcacataccggcatgctccacacagcaggttcctgggtgcagcgttgtttttagtggtcagcatcttccagtgtgctcagtgccgccgcctatgctgcaggcctgctccgtgcagcacttgcctgtcccgtacgcagcattccccccactaatctctagtgatccttttctgatccacccccctcacctctcaccacaccacccaccccatctcccccctccgggccaatttgtgccattccagacccagcagtcccgttcacccctgcagaggattgagaatgaggttgaacttcttggcgagcatctgccggtgggcggattcacctaccctcccagcgcacatccccctacactcccacccagcgcgcctctgcagtttctcacccacgatcccctgcaccaggaggtgagtttcggagtgccatacccacccttcatgccaagacgactgactggtcggtccaggtatcggtcccagcagccaatcccaccgcctccctaccatcctagtcttctcccatacgtcctatccatgcttccggtgccccccgccgtgggtcccaccttttccttcgagctggacgtggaggatggggaggtggagaattatgaggcattgctgaacttggccgagaggctaggagaggctaagccgcggggactgaccaaagcagacatagagcagctcccctcttacaggttcaatccaaacaaccaccagtccgagcagacactttgtgtcgtgtgcatgtgcgattttgagagccgacagctgctcagagtgttgccatgcaatcacgaattccatgctaaatgcgtggacaagtggttgaaagccaacaggacctgtcccatttgccgcgctgacgcgagcgaagtgcatcgtgactccgagtag

SEQ ID NO: 203897 - DNA, 1299 bp, synthetic construct
  misc_feature 1..1299: note = Description of Artificial Sequence: Synthetic coding sequence
  source 1..1299: mol_type = other DNA
atgcggccctgggagatgaccagcaaccggcagccccccagcgtgcgcccctcgcaacatcatttctctggggaacgatgtaatacaccagcacggaaccgccgatcccccccagtcaggcgacagagagggagacgagaccgcctctcccgacataattccatttcccaggatgaaaattaccaccatctcccctacgctcagcagcaggctattgaagaacctagagccttccatccaccaaacgtttcccctagacttctccaccccgccgcgcacccaccgcagcaaaatgccgtaatggtcgacattcacgaccagctccatcagggaaccgtgcctgtgagctacacagtgacgaccgtcgccccgcatggcatacccctatgtacagggcagcatatccccgcctgttccactcaacaggtccctggttgttcagtcgtgttctcagggcagcacctgccggtgtgttcggtacccccacccatgcttcaggcttgttctgtgcaacacttacccgtgccctatgctgccttcccccccctgatctcaagcgacccctttctgatccatcccccacacctgagcccacatcacccccctcatcttccaccacctgggcagtttgttcctttccagacccagcagagtagatccccacttcagaggatagagaatgaggtggaactgcttggagaacatctgcctgtgggcggttttacttaccccccgtccgcccacccccctactctgcctccctccgcacctctgcagttcctgacacacgacccattacaccaggaggtgagtttcggagtgccatacccacctttcatgcctcggcgactgacaggacgctcacgctaccgatcccaacagccgatcccgccacccccttatcatccttccctcctgccctacgtactgtccatgctgcctgtgcctccagccgtcgggccaaccttcagcttcgaactggatgtggaagacggcgaggttgaaaactatgaggcactgctcaacttggctgagagactgggcgaggctaagcctagggggctcaccaaggctgatatcgaacagctgccctcatacagatttaatccgaacaaccaccagtcagagcagactctgtgcgtcgtgtgtatgtgcgactttgagagccgacaactgctgcgcgtgcttccttgtaaccatgaattccacgccaagtgtgttgacaagtggctcaaagcgaaccggacctgtccaatttgccgtgcagatgcatccgaggtacatcgcgattccgaatag

SEQ ID NO: 203898 - DNA, 1263 bp, synthetic construct
  misc_feature 1..1263: note = Description of Artificial Sequence: Synthetic coding sequence
  source 1..1263: mol_type = other DNA
atgtggtggcgggacctgacccggctgcggctgtggctgaagcgggaggcaatccctggagagggacggaaagcagctaaagtcaacgccggtgtgggcgaaaaaggtatctacactgcctcgtccaggggggggccgcccagtgctagatctaaggcagtgacagtggtcgcagagggggctgcatctcggtcctggctgtcaatggatgctcccgaactgggacccggcctggtagagaggctagaacagctcgccacttgccccctttgtggaggctccttcgaagacccggttcttctagcttgcgagcactccttttgcagagcatgcctggcacgccggtggggaactcccccggcgactggtaccgaggctagccccacagcctgtccctgctgcggtctgccctgtcctcgaagatcacttcggagcaacgtgcgcctagccgttgaggtgcggatatcgagggagttacgcgagaaactagccgagcccggggcgcgagccggccgtaggagaggtggtagaatacctacgatggggtgtctggacttaccaggagaagacatgcgcaaaacgtggcgtaggttcgaggtcccgacttcaaaatcttctaactccgaagacgacttgcctgaggattacccagttgtgaaaaagatgcttcatcgcctgactgccgaccttacactcgatcccggtactgcgcaccgaagacttcttatctctgctgatcggcgtagcgtacagctcgccccacctggaactcccgctcctcctgacggccccaagagattcgaccaactgcccgctgttctcggagctcaaggctttggagccggacgccactgttgggaagtcgagaccgcagacgcggctagctgtcgcgatagctccggagaggatgctgatgatgaagaatctcattatgccgtgggtgctgccggggaatcagtccagaggaaggggtgcgtgcggctgtgccctgccggcgccgtttgggccgtggagggtagaggcggcaggctgtgggcgctgaccgctccagaacccacgttactcgggggtgtggaacccccacctcgccggattagagtggacctggattgggagcgcggccgcgttgctttttatgatggcagaagcctggacctgctgtatgctttccaggcccctggacctctgggtgagaggatctttcctctgttttgcacctgcgatcccagagccccactaagaattgtgcctgctgagtcttag

SEQ ID NO: 203899 - DNA, 756 bp, synthetic construct
  misc_feature 1..756: note = Description of Artificial Sequence: Synthetic coding sequence
  source 1..756: mol_type = other DNA
atgtggtggcgggacctgacccggctgcggctgtggctgaagcgggaagccattcctggcgaaggtaggaaagctgctaaagtgaacgccggcgtcggggagaagggaatctacacagcctcttcacgaggcgggccccctagcgcccgttcaaaggcggtgaccgtggtcgctgaaggagcagctagccgctcttggctctctatggacgccccagaactgggccccggcctggtcgaacggctggagcaactcgcaacttgccccctgtgtggtgggtccttcgaggaccccgtgttactggcttgcgagcacagcttttgcagggcctgcctggcaagacgctgggggacgccccctgccactggtaccgaggctagcccaaccgcctgcccatgttgtggcctgccctgtccaaggagatcccttaggtcgaacgtgaggctcgctgtcgaggtgcgtatttctagggagctgctcttcggcggcggcatcccacattccttcctcgggacccattcacacgctcattgtaggagcattaacagtaacccacactttcgtccaaagattatgagaccgcacctggtgtccaccttccctcgtccatgcagtaaacctaacccatttcttccaagtggcagccaaaatttgctctctccaaccgcaaccacagtgttgccagatttttctcacagtaatcattcaagacccgcgatgggcaacagaccaagtccctctgtcctcgtgaagtag

SEQ ID NO: 203900 - DNA, 1065 bp, synthetic construct
  misc_feature 1..1065: note = Description of Artificial Sequence: Synthetic coding sequence
  source 1..1065: mol_type = other DNA
atgtggtggcgggacctgacccggctgcggctgtggctgaagcgggaggctatccctggagagggccgtaaagccgcaaaggtgaacgccggcgtcggggagaagggcatatacactgcgagctctcggggcggcccccctagcgccaggtccaaagcggtcaccgtggttgcagaaggcgccgcaagtcgtagttggcttagcatggacgcccctgagctcggcccaggactagtagagagactcgagcaacttgcgacttgccctctgtgcggaggatcctttgaggatcccgttttactggcttgcgagcactccttctgtagagcatgccttgccaggaggtggggcactccaccagcgacaggcacagaagctagtcccacagcctgcccctgctgcgggctgccttgcccacggagaagcctacgcagtaacgtcagattagccgtcgaggtccgcatctcgcgcgaattaagggaaaagcttgctgagccaggtgccagggcgggccgaaggagaggcggccggatcccaacaatgggctgcctagacttgcccggcgaagatatgagaaaaacatggagaaggttcgaggtgcccactccaaagtcttccaattctgaggacgacctcccagaggactacccggtcgtgaagaagatgctccataggttaactgcagatctgacgctggaccctggtaccgctcaccgtcggctcctgattagtacagacaggagatccgttcagttagcaccacctggtacccccgccccacccgatggaccgaagagatttgatcaactgcccgctgttctgggggcccaaggtttcggcgccgggcggcattgttgggaagttgagacggccgatgcagcaagctgcagggacagttccggagaagatgaggatgatgaggaatctcattatgcggtgggcgccgccggagagtccgtgcagcgaaaagggtgtgcacccgggcctctaggggaacgcatctttccgttattttgcacatgtgatccccgtgcaccactgcggatcgtgcctgcagagtcctag

SEQ ID NO: 203901 - DNA, 1065 bp, synthetic construct
  misc_feature 1..1065: note = Description of Artificial Sequence: Synthetic coding sequence
  source 1..1065: mol_type = other DNA
atgtggtggcgggacctgacccggctgcggctgtggctgaagcgggaagcgattcccggggagggcaggaaggccgccaaggtgaacgcaggagttggcgaaaagggtatctatacggcctctagccggggtggcccgccgtccgcaaggtcaaaggctgtgaccgtggtggctgagggggccgcttcccggtcatggctgtccatggacgcgcccgaactcggaccaggccttgttgagcggcttgaacaacttgcgacttgcccactatgcggcgggagctttgaggatccggtcttgctggcgtgcgagcattccttctgcagggcatgccttgccagacgatggggaactcctccagctaccgggaccgaggcctccccaacggcatgtccctgctgcgggttaccctgcccacgtaggagccttaggagcaatgtgcgcctggcggtggaagttaggattagcagggagctgcgtgagaagctagccgagccaggtgctagagcaggaagacgtcgcggggggagaatcccgacaatggggtgtctagaccttcctggggaggatatgcgtaagacttggcgccgctttgaggtccctacgtccaagagctcaaatagtgaagatgacctcccagaggattacccagtggtaaaaaaaatgctgcatcgcctgaccgctgacctgactctcgacccaggtacggcccatcggagactgctcatctcagcagataggagaagcgtgcaactggctccccctggcactccagcaccgcccgacggccctaagcgtttcgaccaacttccagccgtgctgggtgcacaaggtttcggtgcaggtcggcactgttgggaggtagagacagcagacgcggcttcttgcagggattctagtggggaggacgcagacgacgaggaatcccactacgcagtcggcgcagccggtgagtctgttcagagaaaggggtgcgccccaggaccactcggcgaaaggatttttccactcttctgcacctgtgatccccgggcgcccctcaggatcgtcccggcagaatcatag

SEQ ID NO: 203902 - DNA, 1263 bp, synthetic construct
  misc_feature 1..1263: note = Description of Artificial Sequence: Synthetic coding sequence
  source 1..1263: mol_type = other DNA
atgtggtggcgggacctgacccggctgcggctgtggctgaagcgggaggctattcccggagagggcagaaaggctgccaaagtaaatgctggagttggggaaaagggaatctacacggccagtagtagaggaggcccgccaagtgcacgcagtaaagccgttactgttgtagcggaaggagctgccagcaggtcctggctgagcatggatgcaccagaactagggcctggacttgttgagcggcttgaacagttggctacatgtcctctctgtggtggtagcttcgaagatcccgtgctgctggcatgtgaacattccttctgtcgtgcctgtctggcacgtcggtggggaacaccccccgccacgggcacagaggcatcacctacagcctgcccctgttgcgggcttccatgtccccgccgctccctgagaagcaatgtgcgactcgcagttgaagtgcggatctctcgggaattgcgcgagaagctggccgaaccaggtgcaagggctggcagaagaagggggggacgaatcccaacaatgggttgtctggacttgcctggggaagacatgcggaaaacttggcgaaggtttgaagtcccgacccctaagtcctccaactcagaggatgatctccctgaagactatcctgtcgttaagaagatgctccatcgccttactgccgacctgacactggacccaggcacagcacataggaggttgttgataagtaccgatcgaaggagcgtgcagctggcccccccaggaacccccgcgccccccgatggaccaaagcggtttgaccaactgcccgccgtgcttggcgcacagggatttggcgccggccggcattgttgggaagtggaaactgccgatgccgcatcttgccgggatagctccggggaggacgaagacgatgaagaaagccattacgccgtgggcgcagcaggtgagtcagtgcagagaaaggggtgcgttaggctgtgtcctgcgggcgcggtgtgggctgtagagggccgtggagggagattgtgggcccttacggcgcccgaacctaccctgctgggcggagttgaacctcctccaaggaggattagggttgaccttgattgggagaggggaagggtggctttctatgacggtagatccctggacctcctgtatgcctttcaagcccccggacctctgggggagcgcattttcccgctgttctgcacatgtgatcctcgcgctcctctccgcatagttcccgcagaatcttag

SEQ ID NO: 203903 - DNA, 1065 bp, synthetic construct
  misc_feature 1..1065: note = Description of Artificial Sequence: Synthetic coding sequence
  source 1..1065: mol_type = other DNA
atgtggtggcgggacctgacccggctgcggctgtggctgaagcgggaggccattccaggcgaagggagaaaggccgcgaaggtaaatgccggggtgggcgaaaaagggatatacacagcttcaagccgcggcggcccccctagtgcccgttctaaggcagtgactgtggtcgccgaaggggcagcctcacggtcgtggttgagcatggacgctcctgaactgggtccgggccttgtcgagaggctggagcagttggccacttgccccctctgcgggggaagttttgaagaccccgttctgctggcatgcgaacacagcttttgtagagcgtgcctcgccaggcgatgggggactcctccagccactggcaccgaggcctcgcccacagcatgcccgtgttgtgggttaccgtgccctaggcggtctcttcgcagcaacgtacgtcttgcggtcgaggtccgcatctcacgcgagctgcgcgaaaagctcgccgaacctggagcacgtgctggtagacgtcgaggaggacgtatacccacaatgggctgcctagatttaccaggggaggatatgaggaagacatggaggcgatttgaggtacccaccagcaaatctagcaattctgaagatgatctgcccgaggactaccccgtggtgaagaagatgctgcacaggctgaccgctgacctgaccttagacccaggcacagcccatagaaggctcctgatctctgccgacagaaggtctgttcaactcgcaccacctggaacgcccgcaccacctgatggtccaaagcgcttcaatcagcttccggccgtactgggggcccagggttttggagcaggtcggcactgctgggaggtcgaaactgccgacgccgcctcctgtagggactctagcggagaggatgctgatgacgaggaatcgcattatgcggtgggagctgctggggagtctgtgcagcgcaagggatgcgcccccggtccactgggagaaagaatttttcccctgttctgcacctgtgatccccgggcacccctgcggattgtgccggccgagtcatag

SEQ ID NO: 203904 - DNA, 1263 bp, synthetic construct
  misc_feature 1..1263: note = Description of Artificial Sequence: Synthetic coding sequence
  source 1..1263: mol_type = other DNA
atgtggtggcgggacctgacccggctgcggctgtggctgaagcgggaggccatccccggggaaggcaggaaggcggcaaaagtgaacgccggagttggtgagaaaggaatctacactgcctcaagtagagggggacccccttcagcgagatcaaaagccgtgaccgtagttgccgaaggcgccgcaagtcggagctggctatctatggatgctcccgagctgggaccagggctggtggagcgtttagagcagctcgccacctgccccctatgtggcggaagtttcgaggatccagtgcttctggcctgcgaacactccttctgccgtgcctgcctggctcggaggtggggaacccctcctgcaacaggcacagaggcttcccccacagcatgcccttgttgtggtctcccctgcccgaggcgaagtctccgctcaaacgtgagactcgccgtggaagtgaggatttcgcgcgagctgagagagaaactggccgagccaggggcccgggccggtcggcggaggggcggccggatccccacaatgggttgcctcgacttaccaggggaggatatgcggaagacctggcggagattcgaagtgcctacttcgaaatccagcaactccgaggacgatttgcccgaggactacccagtggtgaagaagatgctccaccgcttgaccgccgatctcaccctcgacccggggacagcacatcggcgcctcctaattagcgccgacaggaggagcgtgcaacttgccccaccaggtacaccggctccaccagatggcccaaaacggttcgatcagcttcccgcggtgctgggggctcagggtttcggagccggaagacactgttgggaagtggagacagccgacgctgcctcctgtcgagacagcagcggcgaggatgcagatgacgaagaatcccactacgctgtgggggctgcaggcgaatctgtgcaacggaaaggctgcgtgaggctgtgtcccgcaggcgcagtgtgggccgtgggagggagaggaggacgcctgtgggcacttacagccccggaaccaacactgctgggtggtgtggagccccccccccgtcgcattagggtcgatctggattgggaaagaggcagggtggccttttatgacggacgatctctcgatttgctgtatgcctttcaggcgccagggcccttgggtgagcggatcttccccctgttctgtacctgtgaccccagagcccccctacgcatcgttcctgccgaatcctag

SEQ ID NO: 203905 - DNA, 1263 bp, synthetic construct
  misc_feature 1..1263: note = Description of Artificial Sequence: Synthetic coding sequence
  source 1..1263: mol_type = other DNA
atgtggtggcgggacctgacccggctgcggctgtggctgaagcgggaggccatccctggagagggaaggaaagcagctaaggtgaatgctggagtgggagagaaggggatatacaccgcctcatcccgtggcgggccccccagcgcccgatctaaagccgtgacagtcgtggctgaaggggcggcctcaaggagttggctgtctatggacgctcctgagctcgggcctggactggtcgaacgtctggagcagttagctacttgccctctgtgcggtggctcgtttgaagacccagtactccttgcctgtgaacacagcttctgcagagcctgtctggcacggcggtggggaacaccgcctgcaaccggaaccgaggcctcaccgacagcatgtccctgctgtggattgccctgccccaggagatcactccgctccaatgtgcgactggccgtcgaggttcgaataagtcgggaattacgcgaaaaattagcagagcctggcgcccgcgcaggacggcggagaggagggagaatccctactatgggttgcctggacctaccaggagaggacatgcgcaagacctggcgccgattcgaagttccgacctccaaatcctctaatagcgaggacgatctcccggaagactatccagtggtaaaaaagatgctgcatcgccttaccgccgatctaacactcgatccgggtaccgctcatcgcaggttgctcatatctgccgacagacgcagcgtgcagctggccccacccggcacccctgcccctccggatggccccaagaggttcgatcagctgcccgcagttttgggagcgcagggatttggcgccggcaggcattgttgggaggtggagaccgcagatgccgcgtcctgtcgagattcatccggagaagacgctgatgatgaagagagccactacgctgttggtgccgccggggagtcggtgcagcgcaaaggatgtgtccgcctttgtcctgcaggggccgtgtgggcggtggaaggtaggggtggaaggctgtgggctttgaccgccccagagcccaccttactgggtggagttgagccgcccccacggcgtattcgagtggatctggattgggaacgagggcgggtggctttttatgatggccggtctctcgatttattatacgccttccaggcgccaggtccccttggtgagagaatttttccactgttttgcacatgtgatcctcgcgctccattacggatagtgccagcagaatcttag

SEQ ID NO: 203906 - DNA, 1263 bp, synthetic construct
  misc_feature 1..1263: note = Description of Artificial Sequence: Synthetic coding sequence
  source 1..1263: mol_type = other DNA
atgtggtggcgggacctgacccggctgcggctgtggctgaagcgggaagcaataccgggcgagggtaggaaagccgccaaggtaaacgcaggcgtcggtgagaagggcatttatactgcctccagtagaggaggacctccatcagcgaggtctaaggccgtgacagtggttgctgagggcgccgcatcccgaagctggctgtccatggacgccccagagttggggcccggcctagtcgaacggctggagcagctagcgacctgccccttgtgtggaggatccttcgaggaccccgtgctgctggcctgtgaacactcattctgccgcgcttgtcttgcaagacggtggggaactcctccagccacaggtactgaggccagtcccactgcctgcccctgttgcggtctgccttgcccaaggcgtagcctgcgaagcaatgtacgtctcgctgttgaggtccgtatttcaagagagctccgcgagaaactggccgagccaggagctagagctggtcgccgtaggggaggccggatcccaaccatggggtgcctcgacctccccggagaggacatgcggaagacctggcggcgttttgaagttccaaccagtaaaagctctaacagtgaggacgacctgccagaagattaccctgtggtgaagaagatgcttcacaggctgacggccgacttgaccctcgatcccggtaccgcccaccgcagactgttgattagcgccgacaggcgcagcgtccaactagcaccaccaggcacccctgctcctccagacggcccaaaacgctttgaccagctccctgctgttcttggagctcagggctttggagccgggcggcactgctgggaggtggaaactgccgacgccgcgtcgtgccgggactcgagtggtgaggacgctgacgacgaggaatcacactatgccgtcggcgcagctggggaaagtgttcagagaaagggatgtgttaggctgtgcccggctggggcagtatgggccgtagaaggccggggtgggcgattgtgggcacttaccgcacccgagccaactctcttggggggggttgaaccccccccacgccggattagggttgacctagattgggagcgcggacgtgtcgctttttacgacggccgctcattggacctactctacgccttccaagctcccggcccactcggcgagagaattttcccactgttttgtacctgcgacccccgcgccccccttaggattgtccccgcagaatcttag

SEQ ID NO: 203907 - DNA, 1065 bp, synthetic construct
  misc_feature 1..1065: note = Description of Artificial Sequence: Synthetic coding sequence
  source 1..1065: mol_type = other DNA
atgtggtggcgggacctgacccggctgcggctgtggctgaagcgggaagctatacctggggaaggacgcaaggctgctaaagtcaacgcaggcgtgggagaaaaaggtatctatactgcctcgagcaggggcgggccaccttctgcccgatccaaagcggttacagttgtggccgaaggcgctgccagtaggtcgtggctgagtatggatgctcctgagttggggcctggcctcgtagaacgcctggagcaactcgctacctgcccactctgtgggggatcttttgaggacccagtgcttcttgcctgcgaacatagtttctgccgagcttgcctagccagacggtggggaacacctccggctaccgggaccgaggcatcccctacagcctgtccatgttgcggactcccctgcccacgccggtccctgcgatccaacgtgaggctcgctgttgaagtccgcatatctagggagctcagggagaaattagccgagcccggtgctcgggccgggcggagaagagggggccgaatccctacgatgggctgtttagatctgcctggggaagatatgcgtaaaacctggcgcagattcgaggtgcctacttctaagtcttccaatagcgaagacgatcttcctgaggattacccggtggtgaagaaaatgcttcacagacttaccgcggacctcactcttgacccaggaaccgctcatcggcgcctactgatatcagctgatcgccggagcgtccagctcgctccccccggaacccccgcacctcctgatggtcctaagcgctttgatcagctgcctgcagtgctgggagctcaggggtttggggccggacggcactgctgggaggttgaaactgccgatgccgcctcttgtagagactcctcgggagaggacgcggatgatgaggaatctcattatgctgtgggcgcagccggtgaatcagtgcagcggaaaggttgcgcacccgggccacttggagaaaggattttcccactgttctgtacctgtgacccccgcgcgcctctgagaatcgtcccagcggagtcatag

SEQ ID NO: 203908 - DNA, 1065 bp, synthetic construct
  misc_feature 1..1065: note = Description of Artificial Sequence: Synthetic coding sequence
  source 1..1065: mol_type = other DNA
atgtggtggcgggacctgacccggctgcggctgtggctgaagcgggaagcgatccccggggagggaaggaaagccgctaaagtaaacgccggagtgggcgagaaaggcatctacacagcaagttccaggggcggcccaccatctgcccgcagcaaagcagtgacagtcgtagcagagggggcagcttctagaagttggctgtctatggacgccccagagttgggaccagggttggtagaacgactcgagcagttagccacctgtcccctgtgcggaggctcatttgaagaccctgtgctcttggcctgcgagcactccttctgccgggcctgcctggcacggcgctgggggacccctccagctaccggcaccgaggcatcgcccaccgcctgtccatgctgcggattgccatgtccccgaagaagtttacgctccaacgtgcgactggccgtcgaagttcggatatcccgcgagctaagggagaaattggccgagcccggcgctagggccggacgaaggcgcggggggaggatcccaactatggggtgtttggacttgccaggtgaggacatgcgtaaaacatggcggaggtttgaagttccaacctcgaaatcttctaactctgaggacgatctgcccgaggactaccctgttgtcaaaaaaatgcttcataggttgactgctgatttgaccctcgatcccggcactgcccacaggaggctgctgattagtgccgaccgacggagcgtccaactcgcccctcccgggaccccggctcctccagatggtcctaagcgatttgaccaacttcccgcagtactcggcgcacaagggttcggcgctggccgacactgttgggaagttgaaacggccgacgccgcctcttgtcgcgattcctcgggcgaggatgccgatgacgaggaatcacattatgctgtgggcgcagcaggtgagagtgtacagcggaaggggtgcgcaccaggccccctgggagaaaggatctttccacttttttgtacttgtgatccccgcgctcctctgaggattgtgccggcggagtcctag

SEQ ID NO: 203909 - DNA, 1065 bp, synthetic construct
  misc_feature 1..1065: note = Description of Artificial Sequence: Synthetic coding sequence
  source 1..1065: mol_type = other DNA
atgtggtggcgggacctgacccggctgcggctgtggctgaagcgggaagcgatcccaggcgaagggagaaaggctgctaaggtgaatgctggagtgggcgagaaggggatctataccgcttcctcccgggggggccctccatctgctcgctccaaggcagtgactgtggtcgctgaaggggcggcgtctcggagttggctgagtatggacgccccagaactggggccaggcctagtggagaggctggagcagctagctacatgccccctatgtggaggctccttcgaggaccccgtactactggcgtgtgagcactctttctgccgggcctgtctcgctagaagatggggaactcctcccgcaaccggaactgaagccagcccaacagcatgtccttgctgcggcctcccatgtccacgcagaagcctcagatcaaacgtgcgcctggctgttgaagttcggatctcaagggaactgcgggagaagttggccgagccaggtgccagagccgggagacgacgcggagggaggattccaacaatgggatgtctggacctgcccggggaggacatgcgaaagacttggaggagatttgaagtgccgactagcaagtcttccaattccgaggatgatttaccggaggattaccccgtcgttaagaaaatgctgcacaggttgactgccgacctgaccctcgacccagggacagctcatcgaagacttctgattagtgcagaccgaaggagtgtccagctcgcccccccaggtacaccagctcccccagacgggcctaagcgattcgaccaattaccagctgtgctgggcgctcaggggttcggtgccggccgacactgctgggaagtagagactgccgatgcggcgtcctgtcgcgactctagcggtgaggatgccgacgatgaggagagccattacgccgtaggcgccgccggtgagtcggtacagagaaagggctgtgcacctggtcccctgggcgaacggatcttcccattgttttgcacctgtgacccccgggcccctctccgcatagtaccagccgaatcttag

SEQ ID NO: 203910 - DNA, 1263 bp, synthetic construct
  misc_feature 1..1263: note = Description of Artificial Sequence: Synthetic coding sequence
  source 1..1263: mol_type = other DNA
atgtggtggcgggacctgacccggctgcggctgtggctgaagcgggaagctataccaggcgaagggcgaaaggctgcgaaggttaatgccggcgtgggtgaaaagggtatctacacagccagctctcgcggcggccctccgagcgcacgttccaaagctgtgacagtcgtggccgagggcgctgcctcacgaagttggttgtctatggacgctccagagctgggcccaggactcgttgagcgcttggagcaactggctacctgccccctgtgcgggggttcctttgaggatcccgtgctgctcgcctgcgagcacagtttctgccgggcttgtctcgccagacggtggggtactcctccagccacaggcacagaagcctcccctaccgcttgtccctgttgtggtctgccatgcccaaggaggagcttacgcagcaacgtgcggctggcagtcgaggtcagaatttctagagagctccgggaaaagttagctgagcccggtgcccgcgccggcaggcgcagagggggaagaattccaaccatgggctgcctggatttacccggggaggatatgcggaagacttggcgccggtttgaagttccgacttccaaatcctccaatagtgaagacgacttgcctgaagactaccccgtggtcaaaaaaatgctccaccgcctgactgctgaccttactctggacccagggacagcccacagaaggcttttgatcagcgccgaccgcagaagcgtacagctcgctccgcccggtacacccgcaccacctgatgggcctaaaaggttcaaccaactccccgccgtccttggggcccaaggtttcggagccgggcggcactgctgggaagtagaaaccgcggatgctgcttcctgcagagattcttccggagaggacgcagacgatgaagagtcccactatgccgttggagccgcgggcgaatctgtccaaaggaaagggtgtgtgcgtctgtgcccagctggcgctgtgtgggccgttgaaggtcgagggggtaggctgtgggccctgactgccccggaacctaccctgctgggcggtgttgagccacctccccgacgcatccgtgtggacctagattgggagcggggccgggttgctttctatgacggccggagtctggacttgctgtacgcattccaggctcctggccccttgggcgagagaatcttccctttgttttgtacatgcgacccccgcgcacccttgcggatagtaccagcagagtcttag

SEQ ID NO: 203911 - DNA, 1263 bp, synthetic construct
  misc_feature 1..1263: note = Description of Artificial Sequence: Synthetic coding sequence
  source 1..1263: mol_type = other DNA
atgtggtggcgggacctgacccggctgcggctgtggctgaagcgggaggcgatacctggagaaggccgcaaagcagcaaaagtgaatgctggcgtgggagagaagggcatctacacagcttcttcacgcggtggccccccaagcgccaggtccaaggcagtgacagttgttgctgagggcgctgccagccgaagttggctctccatggatgctcctgaactcggcccagggctggttgaaagactagaacagcttgccacctgtcctctgtgtggtggctccttcgaagaccccgtcctgttggcctgcgagcattcattttgtcgggcttgtcttgcacggcgctggggaacccctcccgccaccgggaccgaggcttcaccaacagcctgcccctgctgtggtctgccatgccccaggcggtctctcaggtcaaatgttaggctggccgtggaggtgcgtatcagccgggagctgagggaaaaattggctgagccaggagctcgagcaggaagacggagggggggtcgcattcccacgatggggtgcctcgatcttcccggtgaagatatgaggaagacttggcgccgatttgaggtcccgacctccaagtctagtaatagcgaggatgacctgcctgaggactatccagtggtgaaaaaaatgttacatcgcctaacagctgacttgacattagatcctggcacggcccataggaggctgctcatttccgccgaccgccgcagcgtgcagctggcccctcccgggactccggctccacctgacgggcctaaacgattcgatcagttgccagcggtcctgggggcacaggggttcggcgctggaaggcattgttgggaagtcgagacagctgatgcagcctcgtgcagagatagctctggcgaagatgctgacgatgaggaatcacactatgctgtaggtgccgccggagagtcagtacaacgtaaaggatgcgtgcggctttgcccggccggcgctgtgtgggctgtggaagggcgcggtggtcgattgtgggcattgactgcaccagagccaaccttactgggaggtgtggagccaccaccaagaaggattcgggtcgatctggactgggagagaggtcgggtggctttctacgacgggcggtcactggacttactgtacgcatttcaggcacccggaccactgggagagaggatcttcccactgttctgcacctgcgacccccgggcacccctgcggatcgttcctgcagaaagctag

SEQ ID NO: 203912 - DNA, 1065 bp, synthetic construct
  misc_feature 1..1065: note = Description of Artificial Sequence: Synthetic coding sequence
  source 1..1065: mol_type = other DNA
atgtggtggcgggacctgacccggctgcggctgtggctgaagcgggaggcgattcctggagaaggccggaaagccgccaaagtgaatgctggggtaggtgagaagggcatttatacagcaagctctcggggaggtccacccagcgcccgctctaaggccgttacggttgttgccgaaggagcagcttctcgctcatggctctcaatggatgcgcctgagctcggccccggtctagttgagaggctggagcagctggccacctgccccctgtgcggtggttcgttcgaggacccggtactgctcgcctgcgagcactctttctgccgggcctgcttggccaggcgctgggggacgccccctgcaacaggtactgaagcaagtcccacggcttgcccctgttgtgggcttccctgcccacgaaggtctctgcggtctaacgttcgcctggccgtggaggtcagaatcagccgggaattgagagaaaaactggccgagccgggcgccagggccgggcggagacggggcgggaggataccaacaatgggctgcctcgacctacctggggaagacatgcggaagacctggcgccggtttgaggtgcccaccagtaaatcatctaattcagaagacgacttgcctgaagactatcctgtcgtcaagaagatgttacaccggcttacagccgacctgacgcttgatccggggaccgctcacagacggcttctgatctcggcggacagaaggtcagtgcaactagctccaccagggaccccggccccaccagatggtccaaagcgatttgatcagctgccggctgtactgggagcccagggctttggggctggtagacattgttgggaagtggaaaccgctgatgccgccagctgcagggacagtagcggggaagacgccgatgacgaagagtcacattatgccgttggcgcagcaggagagtcggtacagcggaagggatgtgcgccaggccccctgggggaacggatcttccctctattctgtacatgcgacccaagggcccctttgcgaatcgtacccgcagagtcatag

SEQ ID NO: 203913 - DNA, 1263 bp, synthetic construct
  misc_feature 1..1263: note = Description of Artificial Sequence: Synthetic coding sequence
  source 1..1263: mol_type = other DNA
atgtggtggcgggacctgacccggctgcggctgtggctgaagcgggaggcgatccccggagagggacgtaaggcagccaaggtgaacgccggagtcggtgagaaaggcatctataccgcatcctcccggggtggccctcctagtgcacgcagtaaggcagttacagtggtggcagaaggtgccgcgtcccgctcttggctttcaatggatgcacccgagcttggccccggcctggtagagcgactggaacagctggccacgtgcccactgtgcggcggatccttcgaggatccagtcttactcgcgtgtgagcattctttctgtcgtgcctgcctcgctaggcgttggggcaccccaccagccacagggactgaggctagccctaccgcgtgcccatgctgcggcctgccctgccccaggaggtccttgcgatccaatgttaggttggccgtcgaagttcgaatcagtcgagagctgagagagaagctagctgaacccggcgctcgggcagggcgtaggagaggcggaagaattcctactatgggctgcttggacctcccaggcgaggatatgcggaaaacatggaggaggttcgaggtacctactagtaagagttcaaacagcgaggacgacctcccagaggactatcctgtagtcaagaaaatgctccaccggctgacggccgatctgactctggaccccggcacagcccaccgtcgtctcctcatcagtgcggatcggcgctctgtgcagctcgccccacctggcacccccgctcctcccgacggtcccaaaaggttcgaccagttgccggccgtactcggcgcccaggggttcggcgcgggcaggcactgctgggaggtggagaccgcggacgccgcaagctgccgcgactcttcgggggaagacgctgacgacgaggagtcacattacgccgtgggggccgccggagaaagcgtccagagaaagggctgcgtgaggctgtgtcctgctggagctgtctgggctgtagagggtcggggaggacgactctgggccctgaccgcgcctgaacccaccttgcttggtggcgtggaaccccctccccggaggattagagttgatctcgactgggaaagaggtcgggtggctttttatgatggtaggtctctggatttgctctatgcatttcaggcccccggtcctctgggagagcggatcttccctctcttttgtacttgcgatccaagggctccgctaaggatagtgccggctgaatcttag

SEQ ID NO: 203914 - DNA, 1065 bp, synthetic construct
  misc_feature 1..1065: note = Description of Artificial Sequence: Synthetic coding sequence
  source 1..1065: mol_type = other DNA
atgtggtggcgggacctgacccggctgcggctgtggctgaagcgggaggctattccaggggagggccgtaaagctgccaaagtgaacgctggagtgggagagaagggcatctacactgccagctccagaggagggcctccctccgcgagatcaaaggcggtgacagtggtagctgagggggcggccagtcgcagctggctgtctatggatgccccagagttaggccccggcttggtcgagaggctcgagcagctggcaacttgccccttgtgtgggggatcctttgaggaccctgttctattagcatgcgagcacagtttctgtcgggcctgtctagctcgccggtggggaactcccccagctacgggaacggaggccagtcccactgcatgcccatgctgtggcctcccttgcccgaggcgttctctgagatcaaacgtacgactggcagtagaagtgaggatcagtagagaattgagagagaaactagccgagcccggcgcaagagccggacggcgcaggggcggacgtatccccacaatgggttgtctggacttgccaggcgaggacatgcgtaaaacatggcgcagattcgaggttcctacttccaaatccagcaactccgaggacgacttgccagaagactaccctgtggtgaaaaagatgttacacaggcttaccgctgacctgacactggaccccggcacagctcaccggcgcctccttatatctgctgatcgtaggtccgttcaacttgcaccaccgggaaccccagccccacctgacggtcctaaaaggttcgaccagttgccagccgttctgggtgctcagggttttggtgctggccgccattgttgggaggtggagactgcagacgcggctagctgccgggattcttccggtgaggatgctgatgacgaggagagccattatgcggtgggagctgccggagagtccgtccaacggaagggctgcgccccaggtccactaggtgagagaatatttcctctgttttgtacttgtgatccgcgcgccccgctgcggatcgtccctgctgaatcctag

SEQ ID NO: 203915 - DNA, 756 bp, synthetic construct
  misc_feature 1..756: note = Description of Artificial Sequence: Synthetic coding sequence
  source 1..756: mol_type = other DNA
atgtggtggcgggacctgacccggctgcggctgtggctgaagcgggaggcaatacccggagaggggaggaaggccgcaaaagtgaatgctggcgtgggcgaaaaaggaatttataccgccagctcccggggcggacccccatccgcccggtccaaagccgtcactgttgtggcagagggggctgcgagcagatcctggctctccatggacgcccccgaactgggtcccgggcttgtggagcgtctggagcaactggcaacatgccctctgtgtggaggaagcttcgaagatcccgttcttttagcttgcgagcactcattttgtagagcttgtctcgctagacgatggggcacacctcctgcgaccggaaccgaggcctctcctacggcctgtccctgttgcggactcccctgtccacgccggagcctgcgatcgaacgtcagactggctgttgaagtcagaatatcgagagagctcctcttcggaggagggattccacatagctttctaggcacccactcacatgctcattgcagaagcatcaattccaacccccatttccgcccgaagatcatgagaccccacctggtgagcactttccccaggccatgttccaagcccaacccgttcttgccaagtggctctcagaatcttctgtcccccacggctaccactgtcctgcccgatttttctcacagtaaccactctaggcccgcaatgggaaaccgaccctcaccatcagtccttgttaaatag

SEQ ID NO: 203916 - DNA, 756 bp, synthetic construct
  misc_feature 1..756: note = Description of Artificial Sequence: Synthetic coding sequence
  source 1..756: mol_type = other DNA
atgtggtggcgggacctgacccggctgcggctgtggctgaagcgggaggccattcccggggaggggcgaaaggcggcaaaggtgaacgccggggtcggtgagaagggaatttatacagccagttcaaggggcgggcctccctccgccaggtccaaagctgtcacagtggtagctgaaggcgctgcaagccgctcctggcttagcatggacgctccggagttagggcctggtctggttgagcgactggagcagctagccacctgtcctctttgtggcggcagcttcgaggatcccgtgctcttagcctgcgagcattctttttgtcgagcttgtctcgcccgtagatggggcactcccccagcaaccgggaccgaggcatcgcctaccgcgtgtccctgctgcgggttaccatgcccacgaaggtccctgcggtcaaatgttcgcttggcggtggaagtcagaatttctcgcgaacttttatttggcggcggaattccccacagcttcctcggaacccactcccatgctcattgccgatctatcaattcaaatccccacttccggcctaagatcatgcgaccacacctggtgtctacctttcctaggccatgttctaagccaaaccccttcctgccctcaggtagccagaatctgctgagtccgacggctacaaccgttcttcccgactttagccactcgaaccactcacggcccgctatgggtaacagaccatccccaagtgtgctggtgaaatag

SEQ ID NO: 203917 - DNA, 756 bp, synthetic construct
  misc_feature 1..756: note = Description of Artificial Sequence: Synthetic coding sequence
  source 1..756: mol_type = other DNA
atgtggtggcgggacctgacccggctgcggctgtggctgaagcgggaggccatccccggggagggtcggaaagcagccaaggttaacgcgggggtcggtgaaaaaggtatttacactgctagtagtaggggtggtccaccgtctgcacggtccaaagccgtgacggtggtcgccgaaggggcggcctccagatcatggctgtccatggatgctccagagcttgggcccgggctggttgaaagactggagcagcttgccacttgtcccctgtgtggcggatctttcgaggaccccgttctgctcgcctgcgagcacagcttctgccgcgcctgtctggcccggaggtggggtacccctcccgctacaggaacagaagcctcacccactgcctgcccatgttgtggtctgccctgtccacgcaggtcgttgcgctcgaatgtgaggctggccgtcgaagtgcgtatcagccgcgaactgctctttggcgggggaatacctcactcgttcctggggacacacagccacgcccactgccgctccatcaatagcaatcctcattttagacccaaaattatgcgtccgcacctggtcagcaccttccctaggccctgttctaaacctaatcctttcctgccaagcggcagtcagaaccttctttcgccaaccgcaacgactgtgctgcctgactttagccactccaatcacagtcggccagcaatggggaaccgccccagcccctcagtgctcgtgaaatag

SEQ ID NO: 203918 - DNA, 756 bp, synthetic construct
  misc_feature 1..756: note = Description of Artificial Sequence: Synthetic coding sequence
  source 1..756: mol_type = other DNA
atgtggtggcgggacctgacccggctgcggctgtggctgaagcgggaggctattcctggggaagggagaaaagccgccaaggttaacgccggcgtgggcgagaaagggatctataccgccagcagccgaggaggtccaccaagtgctaggtctaaggcggtcactgtggtggctgagggggcagcgtccagaagttggttgagcatggacgcacccgagttggggccaggcctggttgagagactcgagcagctagcgacgtgtccgctgtgcggaggaagcttcgaggaccccgtgctgctggcctgtgagcatagcttctgtcgcgcctgccttgcccgtaggtgggggactcccccagcgactgggactgaagccagtccaaccgcgtgcccctgttgcggcctgccctgcccccggaggtctctacggagcaatgtgagactagctgtcgaagttcgcatctcccgcgaactgctgttcggaggcggcatacctcattcgttcttggggactcacagtcatgctcattgtaggtcaataaattccaacccccactttaggccaaaaatcatgcggccccacttggtgtccacgtttcctcgtccgtgtagcaaaccaaaccctttcctacccagcggttctcagaatctgctgtcgccgaccgctacaactgtgctcccggacttttctcactctaatcactcccggcctgcgatgggcaatcggccctcacccagcgtcttggtaaagtag

SEQ ID NO: 203919 - DNA, 756 bp, synthetic construct
  misc_feature 1..756: note = Description of Artificial Sequence: Synthetic coding sequence
  source 1..756: mol_type = other DNA
atgtggtggcgggacctgacccggctgcggctgtggctgaagcgggaggcgataccaggagaaggacgaaaggctgctaaagtgaacgcaggggtcggggaaaaggggatctatacggcctcaagtcgcggcggtcctccaagtgcgcgctccaaggccgttacagtggtagctgagggagctgcttctcgatcctggctttctatggatgccccagaactgggtcccggattagtagaaagactggaacaattggcgacttgtccactctgtgggggctccttcgaagatcctgtgctgctggcatgcgagcacagtttttgtcgagcctgcctggcccggaggtggggaacgccgcctgctacaggaacggaggcctcacctaccgcctgcccttgctgcggattaccctgtcctcgacgatcgctgcggtccaatgtacgcctggcagtggaggtccggataagccgggaactcctttttggtgggggcatcccacattccttcctcggcacccactcccacgcacattgcaggtcaattaattccaacccacactttcggcctaagatcatgcggccacaccttgtgtccacatttccacgtccatgttctaaaccgaatccatttctgccctccggctctcaaaatcttctgtctcccactgcgactacagtgctccccgacttttctcacagcaaccattcccggcccgccatgggtaataggcccagtccgtccgtactcgtgaagtag

SEQ ID NO: 203920 - DNA, 756 bp, synthetic construct
  misc_feature 1..756: note = Description of Artificial Sequence: Synthetic coding sequence
  source 1..756: mol_type = other DNA
atgtggtggcgggacctgacccggctgcggctgtggctgaagcgggaggccatacccggggaaggcaggaaagccgcaaaagtgaatgctggcgtgggagaaaaaggaatctacaccgcctcctctcggggcggaccgccctccgctcgaagtaaggctgtcacagtggttgctgaaggcgctgcgtcacgctcatggctttccatggacgcaccagaactgggccccggtttggtggagcgcttggaacaactggccacctgtcctctctgcggagggagcttcgaagatcctgttctgctagcctgcgagcacagtttctgccgcgcctgcctagcccgcaggtggggcactcccccggccaccggaactgaagcttctcccaccgcttgtccttgttgcggactgccctgcccacgtaggtcactgaggtccaatgtgcggctcgcagtggaggttaggatcagcagagaactactgtttgggggagggatcccacatagtttcttaggcacacatagccacgctcattgtagaagcattaattccaatccacattttagacccaaaataatgcggcctcacctcgtgtccacgtttcctaggccgtgctcaaaacccaatcctttccttccctccggctctcagaacctgctgagccctactgcagccacagtcctacccgatttttctcatagtaatcactcacggcccgcaatgggcaatcgacccagcccctcagtactcgtgaaatag

SEQ ID NO: 203921 - DNA, 756 bp, synthetic construct
  misc_feature 1..756: note = Description of Artificial Sequence: Synthetic coding sequence
  source 1..756: mol_type = other DNA
atgtggtggcgggacctgacccggctgcggctgtggctgaagcgggaggccatcccaggggaggggcgcaaagcagctaaggtaaatgctggcgtgggcgagaagggaatttatactgcatccagccgcggtggtcctcccagcgccaggtctaaggccgtcacggtggtggcggagggcgcagcaagccgcagctggctgagcatggatgcgccggagctgggccccggcctggtcgagcgcctggagcagctggcaacatgcccactgtgtgggggatcgttcgaagatcccgtcctgctcgcctgtgaacacagcttttgccgggcctgtctcgcccgccgttggggtacaccccccgcaacgggcactgaggcaagccccaccgcatgcccttgttgcggtctaccgtgtcccaggcgatccctgcgatccaacgtcaggttggccgtggaggtgcgaatttcgcgcgaacttttatttggtcggggcatacctcactcgttcctgggcacacactcacatgcacattgccgctccatcaacagtaacccccactttcgcccaaaaattatgaggccacatctggtttcaacgttccctcatccctgttcaaaaccaaatccctttctgccctccggcagccagaacctcctgagtcccaccgccaccactgtacttcctgatttctcacacagcaaccatagccgccccgctatgggcaaccgcccaagcccttcagtgttggtaaagtag

SEQ ID NO: 203922 - DNA, 573 bp, synthetic construct
  misc_feature 1..573: note = Description of Artificial Sequence: Synthetic coding sequence
  source 1..573: mol_type = other DNA
atgagcacccggaagcggcggggcggcgccatcaacagccggcaggcccagaagcgcacccgtgaggccaccagcacaccggaaattagcttggaagcagagcccattgagctggtcgagaccgccggagatgaaatcgttgatctgacctgcgaatccctagaaccagtggtggttgatctcacacataacgacagcgtggtaatagtggatgaacgccgccggccccgaagaaatgcgcgcagactgccccaagatcacgccgattcgtgcgtggtgtcatctgatgacgaagaactgagtagggatcgcgacgtgtacgtgacaacccatacaccaagaaacgcgcgcgatgagggggccacgggtttgcgccctagcggcactgtgagctgccctatttgcatggatggctattcagaaatagtccagaatgggcggctgattgtgtctactgagtgcgggcatgtattttgctctcagtgtttgcgcgacagcctgaagaacgctaacacctgcccgacatgtaggaagaaaatcaaccataagcggtaccatcctatttacatttag

SEQ ID NO: 203923 - DNA, 18 bp, synthetic construct
  misc_feature 1..18: note = Description of Artificial Sequence: Synthetic coding sequence
  source 1..18: mol_type = other DNA
atgagcacccggaagtag

SEQ ID NO: 203924 - DNA, 573 bp, synthetic construct
  misc_feature 1..573: note = Description of Artificial Sequence: Synthetic coding sequence
  source 1..573: mol_type = other DNA
atgagcacccggaagcggcggggcggcgccatcaacagccggcaggctcagaagagaactcgggaggccacctcaacgccggaaatcagtctggaggccgaacctatcgagctggtggaaacagcgggcgatgagatcgtggatctaacatgtgagtcattagagcccgtggttgttgacctgacacataacgactctgtagttatcgtggacgagcggcgccgccctcgtcggaacgcccgtcgactgccacaagaccatgcggacagctgcgtagtgtcatcagacgacgaggagctgtctagggaccgagatgtatacgtgaccacacacacaccccggaatgccagagatgaaggggctacaggcctgaggccttctggtaccgtcagctgccctatttgcatggacggctactctgaaatcgtgcagaacggtagactgattgtgagcaccgagtgcggacatgtgttctgtagccagtgtttaagggactcactcaaaaacgcaaatacatgtcccacatgtagaaagaagattaaccacaagcgataccacccaatctatatctag

SEQ ID NO: 203925 - DNA, 573 bp, synthetic construct
  misc_feature 1..573: note = Description of Artificial Sequence: Synthetic coding sequence
  source 1..573: mol_type = other DNA
atgagcacccggaagcggcggggcggcgccatcaacagccggcaggctcaaaagcgtacacgtgaggccacctctacacctgaaatttccctggaagccgagcccatcgagttggtggaaaccgctggagacgagatagttgatctaacatgtgaaagtttggagccagtagtagtcgacctgacccacaacgactccgtggtgattgtcgacgaaagacgcagaccaagaaggaatgcacgcaggttgcctcaggatcacgctgacagttgtgtcgtctctagtgacgacgaggaactgagccgggacagagatgtctacgtgacaacccatacgccccgaaacgcacgggatgagggtgctacgggcttgcgcccgtctggaacagttagttgcccgatctgcatggacggatactctgaaattgttcaaaacggcaggttgatcgtgtccaccgaatgcggccacgtgttctgctcccagtgtctgcgagattcactgaaaaatgccaatacctgtccaacttgcaggaaaaagattaaccataaacgctatcacccaatctacatctag

SEQ ID NO: 203926 - DNA, 165 bp, synthetic construct
  misc_feature 1..165: note = Description of Artificial Sequence: Synthetic coding sequence
  source 1..165: mol_type = other DNA
atgagcacccggaagcggcggggcggcgccatcaacagccggcaggcacagaaacggactcgtgaagcaacctcaacaccagaaattagcctggaggctgagccaatcgagctggtcgagactgctggagatgaaatagtggacctcacatgcgaatccctctag

SEQ ID NO: 203927 - DNA, 345 bp, synthetic construct
  misc_feature 1..345: note = Description of Artificial Sequence: Synthetic coding sequence
  source 1..345: mol_type = other DNA
atgagcacccggaagcggcggggcggcgccatcaacagccggcaggcccagaaacgcacaagggaagctacatctacccctgaaatctccctggaggcagagcccattgaactagtggagaccgcaggggacgagatcgttgacctcacctgcgaaagcctggagcctgttgtggtggaccttactcacaatgactccgtcgttgtgagcgtcggggttccccaagtgctgtctgtggtgccctccgcctggactgatacccagcgctcctgtagaatggacgtctcatcattcccacaaaacgcggccatgagtagcgtcgccagtgcaagtgtgattccatag

SEQ ID NO: 203928 - DNA, 573 bp, synthetic construct
  misc_feature 1..573: note = Description of Artificial Sequence: Synthetic coding sequence
  source 1..573: mol_type = other DNA
atgagcacccggaagcggcggggcggcgccatcaacagccggcaggcccagaagaggaccagagaggcgacttcaacgcctgaaatttctttggaagccgagccaattgagctcgtcgaaacagcaggagatgaaatagtggacctgacatgcgagagtctggaaccggttgtggtggacctgacacataacgattctgtggtggttagtgacgagaggagacggccccggaggaacgcgcgccgtctcccacaggatcatgccgatagttgcgtggtctcttcagacgatgaagaattgagcagggatagagacgtgtatgtgaccacacacactccaaggaacgcgagagacgaaggcgcgacaggcttgcgtccatctggaactgtgagctgcccaatttgtatggatggttattctgaaatcgtccagaatggaaggttaatcgtgtctacagagtgcggacatgtgttctgctctcagtgtctgcgggatagcttaaagaacgctaacacatgccccacatgccgtaagaaaattaatcacaaacgataccatcctatctatatctag

SEQ ID NO: 203929 - DNA, 342 bp, synthetic construct
  misc_feature 1..342: note = Description of Artificial Sequence: Synthetic coding sequence
  source 1..342: mol_type = other DNA
atgagcacccggaagcggcggggcggcgccatcaacagccggcaggcacagaagcggactagagaagctaccagcaccccggagatcagcttggaggcagaaccaatagagctggtggaaacagcgggcgatgagattgtggatttgacatgtgagtctctggagcctgtagtagtggacctaactcataatgacagcgttgtgattgtcgatggtcctcaggttctgtccgtggtcccctccgcgtggaccgatactcaacggagctgcaggatggatgtgagcagtttcccccagaacgctgcaatgagttcagttgcctccgctagtgtaattccgtag

SEQ ID NO: 203930 - DNA, 2352 bp, synthetic construct
  misc_feature 1..2352: note = Description of Artificial Sequence: Synthetic coding sequence
  source 1..2352: mol_type = other DNA
atgagcggcggccaccagctgcagctggccgccctgtggccctggctgctgatggcgaccctgcaagccgggttcggccgcactgggttggtattggctgctgctgtggagtccgagaggtctgctgaacagaaggctatcatcagggtgattcctctaaaaatggatccaactggcaagcttaatcttaccctcgaaggagtctttgctggggttgctgagataactccagcggagggcaaactgatgcagtcacacccactctacttatgcaatgcttccgacgacgacaatctcgaacccggcttcattagcatcgtgaagttggaaagtccccggagagctccgcgcccttgcctgtcactcgccagtaaggctcgcatggctggggagcgaggagcctccgcggtgttgtttgacatcaccgaggaccgggcggcggctgaacaactgcagcaacccctggggctgacttggccggtggttttaatttgggggaatgatgccgaaaaactcatggaattcgtctacaagaatcagaaagcccatgtgagaatcgaacttaaggaaccacctgcatggcccgactacgacgtgtggatcctgatgaccgtcgtgggaactatctttgtgataattctggcctccgtgttaagaatacgctgcaggcctcgtcactccaggccagacccactccaacagaggacagcatgggctatttcccaactagcaacacgaagataccaggctagctgcagacaagctagaggagaatggcccgactcagggagttcttgttcctctgccccggtgtgtgcaatatgcctcgaagagttttcagaaggacaggaactgcgggtgatctcttgccttcacgagtttcaccgcaactgcgtagacccgtggctacatcagcacaggacctgtcctctgtgcatgtttaacattacggagggcgactcattcagccagagtctgggtccttctcgatcttaccaggagcccggaagaagattgcacctgattcgacagcaccctggccacgcccactatcatttgcccgcagcctaccttttgggtccctcacggtccgctgttgcccgccctcctagacctgggccgtttctcccttctcaggagcccggcatgggccccaggcaccatcggtttccccgggctgctcatccacgagcaccaggcgaacagcagaggctagcaggggcccaacatccctatgcccagggatggggccttagccatctgcagagtacctcacagcatccggcagcatgtcccgttcctcttcgaagggcaaggcctcctgatagctcaggttcaggggaatcctattgtacagagcgctccgggtacctggcagacggccccgcgtcagatagctcctccggaccatgccacggctccagctctgacagcgtggtgaactgtacagatatttctctgcaaggcgtgcatggttcttcaagtacattctgcagttctttgtcatctgactttgaccctttagtgtattgcagccctaaaggcgatccgcagagagtagatatgcagcctagcgttactagtagacctaggtcccttgacagcgtggtccctactggggaaactcaggtgagttcccacgtacactaccaccgccaccggcaccaccactacaaaaaaagattccagtggcacggacgcaagcctggccctgagacaggcgttccgcagagtaggccaccaatcccgcggacacaaccacagcctgaaccccctagcccagaccagcaggttacgcggtctaactctgccgcgcccagcggtcgcctctccaatccccagtgtccgcgcgccttacctgaacctgcaccggggccagtcgatgctagcagtatatgtccctccacctccagcctcttcaatctgcaaaagtccagtctgtctgccaggcacccccagaggaagcggaggggagggccttcagaacccaccccaggctcaagacctcaggacgctacagtccacccagcctgccagattttcccacattacacaccatccgtagcctatccctggtctcctgaggcccaccctctgatttgcgggcctcccggattggataagcggctgctgccggaaactcctggtccatgttatagcaatagccagcctgtgtggctttgtctgacacccagacagcccctggagccccatccgccgggtgaaggcccctcggaatggagttcggacaccgcagagggtcggccctgcccttatcctcactgccaggtcttaagcgcccaaccaggatctgaagaggagctcgaggaactctgcgaacaagccgtgtag

SEQ ID NO: 203931 - DNA, 2229 bp, synthetic construct
  misc_feature 1..2229: note = Description of Artificial Sequence: Synthetic coding sequence
  source 1..2229: mol_type = other DNA
atgagcggcggccaccagctgcagctggccgccctgtggccctggctgctgatggcgaccctgcaggccggattcggacgtaccggtttagtgttggcagcggccgtggagagtgagagaagcgccgagcaaaaggcaatcatcagggtcattcccttgaaaatggatcctaccggtaagctgaacctgactctggaaggtgtttttgctggggtcgcagagatcacgcccgctgaaggaaaactaatgcaggcacggatggccggcgaacgaggcgctagcgctgttctgtttgatatcactgaggatcgagccgcagctgagcagttgcagcaacctctgggcctgacatggcccgttgtcctaatctggggcaatgacgctgagaagctgatggagttcgtttacaaaaaccagaaggcccatgtgaggattgagctgaaagagccccccgcgtggcccgactacgacgtatggatcttaatgaccgtcgttggaacaatctttgtgatcatcttggcctctgtcctcagaattcgctgtagaccgcggcacagccggccggaccccctccaacagagaacagcgtgggccattagtcagctcgcgacaaggagatatcaagctagttgccggcaagccaggggcgaatggcctgattctggcagcagttgctcctccgctcctgtttgtgcgatctgccttgaggagttcagtgaggggcaagaactccgggtgattagttgcttgcacgagtttcatcgcaattgtgtagacccctggctgcatcaacaccggacatgccctttatgtatgtttaacattaccgaaggggacagcttcagccagtctctggggcccagtcggagttaccaagagccaggaaggcggctccatttgatccggcagcaccctggccacgctcattatcatcttccggccgcttatctgctgggtcccagtcgctccgccgtcgccagacctccacgacctgggccttttctgccttcccaggaacccgggatggggccccgtcaccacagattccctagagccgctcatccacgagccccaggagagcagcaacggcttgcaggggcacagcacccctacgctcaggggtggggtttgtcacacctgcagagcaccagccaacacccggccgcttgtccagtgcctctgcgacgcgctcggcctcccgacagctcgggctccggcgaatcatactgtaccgagcgatccgggtacctcgctgacggaccggcttcggatagtagctccggcccttgtcacggatcaagcagtgattccgtagttaactgcaccgacattagcctccaaggggtccatggtagcagctcaactttctgcagttcactttcctccgatttcgaccccctagtgtactgctcgccaaagggggacccccaaagggtagacatgcagccatctgttacatccaggccgcgctctcttgactccgtggtcccaaccggcgagactcaggtaagcagccacgtccactatcatcgacacagacatcaccattacaaaaaacgatttcagtggcatgggcgaaagccagggcccgaaaccggtgtccctcaaagccgtccgcccattcctcgcacacagccccaaccggagcccccatctcccgaccagcaagtgacccgttcaaacagtgctgctccatcaggaagactgtcaaacccccaatgtccgcgggccctgcccgagccagctcccgggcctgtggacgctagtagcatatgcccctccacatcttccctattcaacctgcagaaaagcagcttatcggctagacaccctcagcggaagcgccgcggtggtccgtccgaaccaacacctggctcccgcccacaagacgcaacggtccatcccgcctgccagattttcccacactataccccttctgttgcatacccctggagccccgaggcccaccctctgatctgtggtcctcccggactcgacaagcggctcctgcctgagacacccggcccatgctattcaaatagccagccggtctggctctgcctgacccccagacagcctcttgaaccacaccctcctggggaaggcccgtctgagtggtccagcgatacagctgagggccgaccctgtccgtacccgcattgccaagtgttgtccgcacaaccaggtagcgaggaagaactggaggagttgtgtgagcaagctgtttag

SEQ ID NO: 203932 - DNA, 543 bp, synthetic construct
  misc_feature 1..543: note = Description of Artificial Sequence: Synthetic coding sequence
  source 1..543: mol_type = other DNA
atggccgccgccgaggaggaggacggcggccccgagggccccaaccgggaaagagggggggccggcgcaacttttgaatgtaacatctgtctggagactgctcgagaagccgtagtttccgtctgcggtcatctgtactgttggccttgcttgcaccagtggctggagactaggcctgaacgtcaagaatgtcctgtctgcaaagctgggatatcgcgagaaaaggtggtaccactttatgggagaggctctcagaagccacaggatccccgtctgaaaacaccccccaggccacaaggacagaggcctgcccctgagtctaggggtggctttcagccattcggagatactggcggctttcacttctcttttggtgtgggagccttcccgtttggattctttacgaccgtgtttaatgctcatgagccattcagacggggaaccggcgtcgatctggggcaagggcatcctgcttcaagctggcaggacagcctgttcctcttcctcgccatttttttctttttttggctcctgtctatttag

SEQ ID NO: 203933 - DNA, 543 bp, synthetic construct
  misc_feature 1..543: note = Description of Artificial Sequence: Synthetic coding sequence
  source 1..543: mol_type = other DNA
atggccgccgccgaggaggaggacggcggccccgagggccccaaccgcgagcggggaggagccggcgctacatttgagtgcaacatctgtttagaaacggccagagaggccgtggtctctgtctgtggccatctgtactgctggccatgcctccatcagtggctggagacccggcccgaacgccaagaatgcccagtgtgcaaggctggaatctcacgggagaaagttgtacctctgtatgggcgagggtcccagaaaccccaggacccccgtcttaagacccctccgagacctcagggccaacggcccgctcctgagagccgcgggggatttcaacccttcggtgacacagggggatttcacttttccttcggagttggtgccttcccatttggattttttactacagtgtttaacgcccacgaaccatttcgtcgcggtacgggagtggatctcggtcagggtcatccagccagttcgtggcaggattctttgttcctctttttagcgattttcttctttttctggctgttatccatttag

SEQ ID NO: 203934 - DNA, 549 bp, synthetic construct
  misc_feature 1..549: note = Description of Artificial Sequence: Synthetic coding sequence
  source 1..549: mol_type = other DNA
atggccgccgccgaggaggaggacggcggccccgagggccccaacagagaacgcgggggagcgggcgccacatttgagtgtaacatctgcctcgagactgctcgtgaggccgtcgtgagcgtgtgcggacacctctactgttggccctgcctgcaccagtggctcgaaaccaggcctgaacgacaggagtgtcctgtgtgtaaggcaggcatctctagagaaaaggtggtcccgttgtatggaagaggtagccagaaaccacaggatcctcgtttgaaaactcccccgagaccacaaggccagaggcctgctccagaatctcgcggtgggttccagccctttggcgacacggggggattccatttctcatttggcgtgggagcattccccttcggtttttttacaactgtgttcaacgcccatgaaccattcagaagaggcactggtccttttagcacctctcccgccttttttcattatcttattggaaacacatccagggaattcaggggacggatctacaatttttggctgccaaggaatctgtag

SEQ ID NO: 203935 - DNA, 543 bp, synthetic construct
  misc_feature 1..543: note = Description of Artificial Sequence: Synthetic coding sequence
  source 1..543: mol_type = other DNA
atggccgccgccgaggaggaggacggcggccccgagggccccaaccgcgagcgcgggggggcaggggccactttcgagtgcaatatctgtctagagaccgcacgcgaggctgttgtgtcggtgtgcgggcacctgtattgttggccttgcctgcatcaatggctggaaacccgccccgagcgtcaagagtgccccgtttgcaaggctggaattagcagagaaaaggttgtacccttgtacgggcgggggtcccagaagccacaggacccaaggctcaagactccgcctaggcctcaaggacagcgtcccgctccggaaagtagaggaggcttccaacctttcggagataccggcggcttccacttctctttcggtgtgggggcctttccttttggtttttttaccaccgttttcaatgcgcatgaacctttcaggagagggaccggagtggacttaggccagggtcaccccgcatccagctggcaagatagtctctttcttttcttggccatctttttctttttttggctcctgagtatatag

SEQ ID NO: 203936 - DNA, 543 bp, synthetic construct
  misc_feature 1..543: note = Description of Artificial Sequence: Synthetic coding sequence
  source 1..543: mol_type = other DNA
atggccgccgccgaggaggaggacggcggccccgagggccccaaccgcgagagaggcggggctggcgccactttcgagtgtaatatatgtttagaaacagctcgcgaggcggtagtgtcagtgtgcgggcatctgtactgttggccttgtctacaccagtggctcgaaacccggcccgagcgtcaggagtgccctgtgtgtaaggccggcatctccagggaaaaagttgttccgctgtatggacgtggaagccagaagccgcaggatccccggctgaaaactccccctcgccctcaggggcagcgacccgccccggagagccggggagggttccagcctttcggggatacaggggggttccatttcagctttggggtcggagcattcccatttggattctttacaactgtgtttaatgcccatgaaccctttaggagaggcaccggcgtagatttaggccagggacacccagcttcaagctggcaggactcactcttcctgtttttggctattttttttttcttctggttactgagcatatag

SEQ ID NO: 203937 - DNA, 543 bp, synthetic construct
  misc_feature 1..543: note = Description of Artificial Sequence: Synthetic coding sequence
  source 1..543: mol_type = other DNA
atggccgccgccgaggaggaggacggcggccccgagggccccaaccgagagaggggaggagctggggccacattcgagtgtaacatctgcctcgaaaccgccagagaggcagtcgtcagtgtctgcgggcatctgtactgttggccttgcttgcatcaatggctggaaacgaggccggagagacaagagtgtccagtttgtaaggctgggatctcacgcgagaaggtggtcccgctgtacgggaggggcagccaaaaaccacaggacccaaggttgaaaacgcccccccgccctcaaggccaaagaccagccccggaaagccgcggtggtttccagcccttcggggataccgggggattccacttttcgtttggggttggtgcattcccgtttggcttcttcactactgtttttaacgctcatgagccctttaggcggggtaccggcgttgatttagggcaaggacatcctgccagctcgtggcaggactctctattcctgtttctggccattttctttttcttctggctgctctccatctag

SEQ ID NO: 203938 - DNA, 543 bp, synthetic construct
  misc_feature 1..543: note = Description of Artificial Sequence: Synthetic coding sequence
  source 1..543: mol_type = other DNA
atggccgccgccgaggaggaggacggcggccccgagggccccaaccgggaacgcgggggcgctggggccactttcgaatgtaacatatgcctggagaccgctcgggaggccgtggtgtcagtatgtggccacctgtattgctggccatgcctccaccagtggctggaaactcggcccgaaagacaggagtgccctgtgtgcaaggcgggaatcagccgagagaaggtggttcctttgtacggacgcggtagccagaaaccccaggacccaaggctgaaaactccaccccgcccacagggccagaggccagctcctgaatcccggggagggttccagccatttggcgataccggtggctttcatttttcattcggagtcggcgccttccctttcggcttttttacaaccgtgttcaatgcccacgagcctttccgtagaggaactggagttgatctgggccagggtcatccggccagttcttggcaggactcactcttcttgttcttggctatcttttttttcttctggctgctgagcatatag

SEQ ID NO: 203939 - DNA, 543 bp, synthetic construct
  misc_feature 1..543: note = Description of Artificial Sequence: Synthetic coding sequence
  source 1..543: mol_type = other DNA
atggccgccgccgaggaggaggacggcggccccgagggccccaacagagaacgtggcggagccggtgctacctttgaatgcaacatctgcctcgagaccgcccgagaagcagtggtcagcgtttgtggccacctatattgctggccatgccttcaccaatggctggagacccgccctgaacgccaggagtgtccggtgtgcaaggccggaatctctcgtgaaaaggttgtgcccctctatggtcgaggtagtcagaaaccacaagatccacgtttgaagaccccccctcgaccacaggggcagcggccggcgcctgagagccgtggcgggttccaaccatttggcgacacggggggctttcatttttccttcggcgtaggcgccttccccttcgggttctttactacagtgtttaacgcacacgaacctttccgccggggtacaggggtggatcttgggcagggtcacccggcaagtagctggcaagatagcctcttcctgttcctcgctatattcttctttttttggctcctgagcatctag

SEQ ID NO: 203940 - DNA, 549 bp, synthetic construct
  misc_feature 1..549: note = Description of Artificial Sequence: Synthetic coding sequence
  source 1..549: mol_type = other DNA
atggccgccgccgaggaggaggacggcggccccgagggccccaaccgggagcgggggggcgcgggagctacttttgagtgtaacatttgtttagagactgcaagggaggccgtcgtgtcggtttgtggccacctttattgctggccatgtctgcatcagtggcttgagacacgacccgaacggcaagagtgtcccgtgtgtaaagccggtatttcccgggaaaaagtcgtgcctctctatggacggggctctcagaaaccccaagatccccgccttaagacccctcccaggccacagggacagcgtcccgcccccgagtctagagggggctttcagcctttcggagacacaggaggttttcatttctcatttggcgtgggggccttcccattcggattttttacaactgtctttaatgcccatgagcctttccgtcggggaacgggccccttctccacatctccagcatttttccactacctcataggaaacacttcacgcgagttccgcgggcgaatatataacttttggctgccgagaaacctgtag

SEQ ID NO: 203941 - DNA, 549 bp, synthetic construct
  misc_feature 1..549: note = Description of Artificial Sequence: Synthetic coding sequence
  source 1..549: mol_type = other DNA
atggccgccgccgaggaggaggacggcggccccgagggccccaaccgggagcgtggcggcgccggcgccacatttgaatgtaatatttgtctggagaccgccagagaggccgtggtctccgtatgcgggcacctgtactgttggccctgtctccaccagtggctcgagacccggccggagcgccaagagtgccctgtgtgcaaggcaggaattagccgggagaaagtcgtccctttatacggccggggaagccagaagccccaggatccaagactcaaaaccccccccagaccacaggggcagcggccggcaccagagagtcgcggagggtttcagcccttcggcgataccgggggctttcacttcagcttcggggtcggagcttttccattcggcttctttactactgtcttcaacgcgcatgaaccttttcggcgcggaactggccccttcagcactagtccagcttttttccattacttgattggcaatacatcacgcgagttccgcgggcgtatctataacttttggctgccacgtaatctctag

SEQ ID NO: 203942 - DNA, 549 bp, synthetic construct
  misc_feature 1..549: note = Description of Artificial Sequence: Synthetic coding sequence
  source 1..549: mol_type = other DNA
atggccgccgccgaggaggaggacggcggccccgagggccccaaccgcgagcgggggggtgccggagccacattcgagtgtaacatttgcctcgagacagcgcgcgaggctgtcgtgtcagtttgtgggcacctgtattgctggccctgtttgcaccagtggctggaaactcgccccgagagacaggagtgcccagtgtgtaaagctgggatttctagagagaaagttgtgcccttatacggcagaggatcacagaaaccacaagaccctcgacttaagacacctcctcgacctcaaggccagcgccccgcccctgagtcaagaggaggcttccagccatttggagacacaggcggattccacttttcatttggtgtcggcgcgttccctttcggcttttttacaaccgtgtttaacgcacacgagcccttcagacgcggtactgggcctttcagtacatccccggcctttttccattacctaatcggcaacacaagtcgggagtttaggggtcgcatctataacttttggttgccacgcaatttgtag

SEQ ID NO: 203943 - DNA, 549 bp, synthetic construct
  misc_feature 1..549: note = Description of Artificial Sequence: Synthetic coding sequence
  source 1..549: mol_type = other DNA
atggccgccgccgaggaggaggacggcggccccgagggccccaacagggaaaggggtggcgcgggcgccacttttgaatgtaatatatgcctggagactgctcgcgaagccgtagtctcagtgtgcggacatctttactgctggccttgcttgcaccagtggctcgagacgcggccggaaagacaggaatgccccgtctgcaaggccgggatttcaagggaaaaggtcgtcccgttgtatggtcgagggtcacagaaaccccaggatccccggctgaaaacccctcctcgtccccagggacaaagacctgcaccagagtcaagaggaggattccagccatttggcgatactgggggatttcacttctcatttggcgtgggggcttttccctttggcttttttaccacagtgttcaacgcgcacgagcctttccgacggggcactggcccattcagcactagtcccgcgttttttcactacctcatcggcaatacttctcgggagttcaggggccgtatctacaacttttggctgcctcgcaacctatag

SEQ ID NO: 203944 - DNA, 549 bp, synthetic construct
  misc_feature 1..549: note = Description of Artificial Sequence: Synthetic coding sequence
  source 1..549: mol_type = other DNA
atggccgccgccgaggaggaggacggcggccccgagggccccaacagggagcggggcggagccggagctacatttgaatgcaacatctgccttgagaccgccagggaagctgtggtgtctgtgtgcgggcacttgtactgctggccctgcttgcaccagtggttggagactcgccccgaaaggcaggagtgcccagtctgcaaggccggtatttccagggagaaggtggtgccactgtacggacggggaagccagaagccccaagatcctcgacttaagacacctccaagaccccaaggccagaggcccgctccagagagccgcggtggatttcaaccatttggcgatactggggggtttcactttagttttggcgtcggggcctttccatttggattctttaccacagtgttcaacgcccacgagccatttagacgaggaactggaccatttagtacatcaccagccttcttccactacctgattggcaacacatcccgggaatttcgtgggcgcatctataacttttggttgccaaggaacctctag

SEQ ID NO: 203945 - DNA, 549 bp, synthetic construct
  misc_feature 1..549: note = Description of Artificial Sequence: Synthetic coding sequence
  source 1..549: mol_type = other DNA
atggccgccgccgaggaggaggacggcggccccgagggccccaacagggagagaggcggggcaggggccacttttgagtgcaacatttgccttgagaccgcccgggaggcagttgtgagcgtgtgtggacacctgtactgctggccctgcctccaccagtggctggaaactcggcctgaaaggcaggagtgtccagtctgcaaggcaggcatttcccgggagaaagtggtccccctgtatggcagaggatcccagaagccacaggatccccgactcaagactcctcccagaccccagggacagaggccagcccccgagtcacgcggaggttttcagccgtttggcgacacaggaggcttccactttagctttggtgtgggggcctttcccttcggtttctttactacagtgtttaatgcccacgagccattccgccgtggcactggaccattcagcacaagcccggcgttttttcactatctcatcgggaacaccagtagggagttccgcggcaggatatataatttctggctacctcggaatctgtag

SEQ ID NO: 203946 - DNA, 342 bp, synthetic construct
  misc_feature 1..342: note = Description of Artificial Sequence: Synthetic coding sequence
  source 1..342: mol_type = other DNA
atggccgacgtggaggacggcgaggagacctgcgccctggccagccatagcggcagctcgggctctaagagcggtggagataagatgttctctctgaagaagtggaatgcagtggccatgtggagttgggatgttgagtgcgatacctgtgctatctgtagagtacaggtgatggacgcttgcctcagatgccaggccgagaacaaacaggaagattgtgtggtcgtgtggggggaatgcaaccactcatttcacaattgctgcatgagcctgtgggtgaagcagaacaaccggtgtcccttatgtcagcaagattgggtggtacagcggattgggaagtag

SEQ ID NO: 203947 - DNA, 273 bp, synthetic construct
  misc_feature 1..273: note = Description of Artificial Sequence: Synthetic coding sequence
  source 1..273: mol_type = other DNA
atggccgacgtggaggacggcgaggagacctgcgccctggccagccattctggctccagtggcagcaagtctggcggggacaaaatgttttcactgaagaaatggaacgctgtggcaatgtggtcttgggacgtcgaatgtgacacctgtgctatttgtagagttcaaatgcctgtcctcgacgtgaagttgaaaacaaacaagaggaccgtgctgtggtccggggagaacgtcattattccttcgaccactgccgcgtgtccttgtgggtag

SEQ ID NO: 203948 - DNA, 294 bp, synthetic construct
  misc_feature 1..294: note = Description of Artificial Sequence: Synthetic coding sequence
  source 1..294: mol_type = other DNA
atggccgacgtggaggacggcgaggagacctgcgccctggccagccattctggcagcagcgggtctaaatctggaggagacaagatgttctcccttaaaaagtggaacgccgtagccatgtggagctgggacgtggaatgtgatacatgtgcaatttgcagagtgcaggtgatggtggtttggggcgagtgcaaccactcctttcacaactgttgcatgagtctgtgggttaaacagaacaaccgctgcccactgtgtcagcaggattgggtggtccaacggattggcaagtag

SEQ ID NO: 203949 - DNA, 1875 bp, synthetic construct
  misc_feature 1..1875: note = Description of Artificial Sequence: Synthetic coding sequence
  source 1..1875: mol_type = other DNA
atggagaacagcgacagcaacgacaagggcagcggcgaccagagcgccgcccaaagacgttcccagatggaccgcctcgaccgggaggaagcgttctaccagttcgtgaataacctcagcgaagaagattaccggctcatgagggacaacaatctgctggggacgccgggagaatctaccgaggaggagctcctcaggcgtctgcagcagattaaggaaggcccaccaccacaaaacagtgacgagaataggggaggcgacagttcggatgatgtgtctaacggcgacagtataattgattggctaaattctgtgaggcagaccggaaacactacccggtctggacagagggggaaccagtcgtggcgtgccgtctcaagaaccaatccaaacagcggagactttaggtttagcctggagataaatgtgaacaggaataatggctcccaaaacagcgagaacgaaaacgagccctcagcccgcaggtccagcggcgagaacgtcgaaaacaatagccagcgccaggtggaaaaccctcgctctgagtctacctctgcccgtccctctcgctctgaaaggaactctactgaggccctaacagaggtgcccccaacgcgaggtcagcgacgagctcgcagccggtcccccgatcacaggagaactagggcccgcgccgagagatccagaagtcctttgcatccaatgtccgagatccccagaagaagccatcacagcatcagttcccagaccttcgagcatccccttgttaatgaaactgagggttctagtcgaactcggcaccacgtgaccctacgccagcaaattagcgggccggagttgctcagtcggggactatttgccgcaagtggcacaaggaatgcatcccagggagctggtagctccgacacagccgctagcggggagtctacaggaagtgggcagcggccaccaaccattgtccttgacttgcaggtgcgacgagttcggcccggcgagtatcggcaacgggatagcatagcgagcaggaccaggtcaaggtcacagacgccaaataatactgtgacttacgagagcgagcggggtggattcaggcgcaccttttccagaagtgaaagggctggtgtgcgaacctatgtgagtactatcaggatccctatccgtcggatcctgaatacagggcttagcgagactacatccgtagctatccagaccatgcttcgccaaatcatgaccggatttggtgagttgagctattttatgtatagtgatagcgattctgagccaactggaagtgtatcaaatcggaacatggagcgcgctgagagtcgctccggcaggggcggcagcggagggggaagctcctctgggtccagttcctcatccagttccagttcttcatccagtagttcttcaagctcatcctcatctccgagctcctcatccggtggggaatcctccgagactagctctgatttattcgagggcagcaatgaaggatcaagttcttctggcagttccggggccagaagggaagggcgtcacagggcgccagtgacttttgacgagagcggtagcctccccttcctgtctctggcccagttcttcttactgaatgaggacgatgatgatcagcctagaggcctcacaaaggagcaaattgataacttggcgatgagatcctttggcgagaatgatgccttgaagacctgctccgtttgcattactgagtatacagaaggcaataaacttcggaaactaccatgctctcatgaataccatgtccactgtattgacaggtggctgtctgaaaattctacctgtcccatctgccgcagagccgtgctagcaagtggtaacagggagagcgtcgtatag

SEQ ID NO: 203950 - DNA, 1875 bp, synthetic construct
  misc_feature 1..1875: note = Description of Artificial Sequence: Synthetic coding sequence
  source 1..1875: mol_type = other DNA
atggagaacagcgacagcaacgacaagggcagcggcgaccagagcgctgctcaaagaaggagtcagatggaccggctggaccgcgaggaagctttttaccagttcgtcaacaacctgtcagaagaggattaccggctaatgcgagacaataatctccttgggacgccaggcgagagtactgaggaagagctgctgaggcggctgcaacaaattaaagagggaccacctccccagaattctgatgagaacagggggggtgattcatcggacgatgtttctaatggagattcaatcatcgactggcttaacagcgtccggcagacaggaaacaccacccgcagcggacagagaggtaatcagtcttggcgcgccgtgagtagaacaaaccctaatagcggagacttccgcttttctctcgaaatcaacgtgaaccgcaacaacggatctcaaaattcagaaaatgaaaatgaacccagtgcccgtagatcaagcggggagaatgtggagaataatagtcaaaggcaggtggagaacccccgtagcgagagcacttccgcccgcccatctcgatccgagcgaaattcaactgaagccctgacagaggtgccgcccactcggggccaaaggcgcgctcggagtcgttcccccgaccaccggcgaacgcgcgcccgcgctgaacgatctagaagccctctgcatcctatgtctgagatcccgcggcgtagtcatcactccataagtagccaaacttttgagcaccccctcgtgaacgagacagagggcagcagtcgaacccgtcaccacgttaccctccgtcaacagatctctgggcccgaactgttgagcaggggactcttcgctgcatctgggacccgaaacgctagccagggggccggttccagcgataccgctgcatccggcgagtccaccggcagtggccagcgaccccccacaatcgtgctcgatctccaggtaagacgggtaagacccggtgagtatcgtcaaagagattctatcgcttctcggacccgaagtcgaagccagactcctaacaacacagtgacatacgagtccgaacgcggaggatttcggcgaaccttctcaaggagtgaacgggccggcgtcagaacatatgtcagtacaatcagaatccccatccggagaattctgaacaccggactgagtgagacaacatcagtggccattcagacgatgcttcgacagattatgactggatttggtgagctgagctattttatgtactccgattccgatagtgaacctacggggagtgtttctaatagaaacatggagcgagccgaaagccgaagcgggagagggggatccggcggaggatctagtagtggcagttcctcttcgtccagctcttccagctcaagctcatcttcatcaagttcttcatcctccccaagttccagtagtggaggagagagtagcgaaacatcatccgacctatttgagggcagtaacgagggatcttccagttctggttcaagcggggcgagaagggaggggcgtcatagagcaccagtcacattcgacgagtctggctccctgccattcctctcactggcccagtttttcctgttgaacgaggacgacgacgaccagccccggggcctcactaaagagcaaattgataacctcgctatgcgatcatttggggagaatgatgctttgaagacttgttctgtgtgtatcacagagtatacagagggcaataaactcagaaagctcccatgcagtcatgagtatcacgtgcattgtattgacagatggctctctgagaacagcacttgccccatatgccgcagggctgttttagcctctgggaaccgtgagtcagtggtgtag

SEQ ID NO: 203951 - DNA, 954 bp, synthetic construct
  misc_feature 1..954: note = Description of Artificial Sequence: Synthetic coding sequence
  source 1..954: mol_type = other DNA
tgactgcccgcccccgccgccgccctgcccggcgccccccccccccctcccggcgtgcgcggataccccgcgcgagcccgcggcttgcagggggcatctggcggtgctagattcccgtcttccttgtcactcccagtcccaggtaaaggaggctgggtggtgtcccgtgccaagtttcccgcactggactcatgtgagatcacaaccgctcacccccgtttgtgttttgcagtaagtcctcccttttcctgctcacttcctctgccctcgctctttcctcatagtccactcctaggaagacccaagcgacaggctaaacccgctgcggatgaaggtttctgggattgttcggtttgcactttccgcaacagcgccgaggcattcaaatgttcaatttgcgatgtccgcaaaggtacaagcacaaggaagcctcgcatcaactcccaactcgtcgcccagcaggtggcccagcagtacgccacaccgcccccacccaagaaagaaaaaaaggagaaagtggagaagcaggataaagagaaacctgaaaaggacaaagagatttcaccttcagtgacaaaaaagaacacaaataagaaaaccaaacctaagtctgatatcttgaaggatcccccaagcgaagcaaactctatccagtctgcaaatgcgacgaccaagacctctgagacaaatcacacctcacgacccagactgaagaatgtggataggtccaccgctcagcagctggcggtgactgtagggaatgtgaccgtaatcataactgactttaaagagaagacccggtccagtagtacctctagttccaccgttactagttctgcaggctcggagcagcagaatcagagctcctcagggtcggagtcaacggacaaaggatcatctaggagctcaacgcccaagggcgacatgtccgctgttaacgatgagagtttttag

SEQ ID NO: 203952 - DNA, 456 bp, synthetic construct
  misc_feature 1..456: note = Description of Artificial Sequence: Synthetic coding sequence
  source 1..456: mol_type = other DNA
atggacagcgccgcctgcgccgccgccgccacccccgtgcccgcccttgcgcttgcgctcgcacccgatctcgctcaggcccctctggctctgcccgggctcttgtccccttcttgtctccttagttcaggacaggaagtgaatggcagtgagcgcggaacgtgcctgtggagaccatggctgtcgtcaacgaacgattcccctcgccagatgcgaaagcttgtggacctggccgccggcggcgcgaccgcagcagaagtgacgaaggcggaatcaaaattccatcatcccgttagactgttttggccaaagtctcggtctttcgattacctttacagcgctggcgagattctcttgcagaactttcctgtccaggcaacaataaacctctacgaagactccgatagcgaagaggaggaggaggatgaagaacaggaagacgaggaggaaaagtag

SEQ ID NO: 203953 - DNA, 315 bp, synthetic construct
  misc_feature 1..315: note = Description of Artificial Sequence: Synthetic coding sequence
  source 1..315: mol_type = other DNA
atggacagcgccgcctgcgccgccgccgccacccccgtgcccgccttggccctggcgctagcccctgatctggctcaagctcccctggcactgcccggcctgctgtccccgagttgcctgctgagctcaggccaggaggtgaatgggagtgagcgactattctggccaaagagcagatccttcgactacctgtactctgctggggaaattctcctacagaactttcccgtccaggctacaattaacctttatgaggacagcgactcggaagaagaagaagaggatgaggagcaggaggacgaagaggagaagtag

SEQ ID NO: 203954 - DNA, 213 bp, synthetic construct
  misc_feature 1..213: note = Description of Artificial Sequence: Synthetic coding sequence
  source 1..213: mol_type = other DNA
atgcccgacggccccggcatgaccgccgccagcggcaagctgtaccagttccggcatcccgtccgactcttttggcccaagagtaaatgctatgactatttgtatcaggaggctgaggcacttctaaagaattttcccatccaggcaaccatcagcttctacgaagattcagactccgaggatgaaatcgaggatcttacctgtgaaaattag

SEQ ID NO: 203955 - DNA, 387 bp, synthetic construct
  misc_feature 1..387: note = Description of Artificial Sequence: Synthetic coding sequence
  source 1..387: mol_type = other DNA
atggagaacgccggcggcgccgagggcaccgagagcggcgccgccgcctgcgcagctaccgatgggcctactcggagagccggcgcagattcagggtacgccggcttttggcgaccctgggtcgacgctggtggcaagaaagaggaggagactcctaaccacgcagctgaagcaatgcctgatggacctgggatgactgcagcatccgggaaactctatcagttccgccatccagtgcgtcttttttggcccaaaagtaaatgctatgattatctttatcaggaagccgaggccctcctcaagaattttccaatccaagcaacgataagcttttacgaggattccgactcagaagatgagatcgaggaccttacctgcgaaaattag

SEQ ID NO: 203956 - DNA, 444 bp, synthetic construct
  misc_feature 1..444: note = Description of Artificial Sequence: Synthetic coding sequence
  source 1..444: mol_type = other DNA
atggccgccgccgccgacagcttcagcggcggccccgccggcgtgaggctacctcgctctccgccactgaaagttcttgccgaacagctcaggagggacgcagagggcggcccaggagcttggcggctatctcgcgcagccgccgggcgaggccccctggacctggccgctgtgtggatgcaagggagagtggtcatggccgacaggggagaggcgcgtctccgagatccaagcggcgacttttcagtgagaggccttgaaagagttccccgcggcaggccatgtcttgtcccggggaagtacgtgatggtgatgggtgttgtacaggcctgttctccagagccttgcttgcaagccgtcaagatgaccgacctcagcgacaatcccatccacgaatccatgtgggaattggaggtggaggatttgcacaggaacatcccatag

SEQ ID NO: 203957 - DNA, 255 bp, synthetic construct
  misc_feature 1..255: note = Description of Artificial Sequence: Synthetic coding sequence
  source 1..255: mol_type = other DNA
atgaagcagacccaggtgggcagcctgttcagcctgggcatccggaatcccgaacctggacccgttagcggcacagccgtgcctcggcagctcgcatggaaatctggaaaatacgtcatggtgatgggggtggtacaggcttgttcccctgagccctgccttcaggcagttaagatgactgacttgagcgataatccgatccatgaatccatgtgggagctggaagtggaggatcttcatagaaatatcccttag

SEQ ID NO: 203958 - DNA, 1431 bp, synthetic construct
  misc_feature 1..1431: note = Description of Artificial Sequence: Synthetic coding sequence
  source 1..1431: mol_type = other DNA
atggccaacagcgccaaggccgaggagtacgagaagatgagcctggagcaggccaaggcctctgtcaactctgaaactgagtcctccttcaacattaacgaaaacacgactgcttctggcaccgggctgtccgagaagacgtctgtgtgccggcaggtggatattgccaggaaaagaaaggagtttgaggacgatctagtcaaggaatcctcctcttgcggcaaagacaccccctctaagaaaagaaagctggacccggaaatcgtgcccgaggagaaagactgtggcgacgcagagggaaattctaagaagcgaaagagagagactgaggacgttcccaaggataagagtagcaccggcgatggaacccaaaacaaacgtaaaatagccctcgaggatgtgccggaaaagcagaaaaatctagaagagggccacagcagtacagtggcggctcattacaacgaacttcaagaggttggactggaaaagaggtctcagtctaggatcttctacctcaggaacttcaataattggatgaaatccgtcctcatcggcgagtttctggaaaaggtgaggcagaaaaaaaagcgagacatcacagttttggacctgggttgtggtaaaggaggagacttgctgaaatggaagaagggacgaatcaacaagttggtttgtacggatattgccgatgtgtcagtgaaacaatgccagcagcgttacgaagatatgaaaaaccgaagagactctgagtatatcttcagtgctgagtttatcaccgccgacagttccaaagagttactcatcgacaaatttcgcgatccccagatgtgctttgacatctgctcatgccagttcgtttgtcactacagctttgaaagttatgagcaggctgacatgatgctccgcaatgcttgtgaacgcctctctcccgggggctactttatagggaccacccccaactcatttgaactcattaggagacttgaggcatccgagaccgagtcattcggaaacgaaatctacaccgtgaagttccagaaaaaaggtgactacccactgtttggttgtaaatacgacttcaacttagagggagtggtggacgtccctgaattcctcgtatactttccactcctgaacgagatggctaagaaatacaacatgaagctcgtctataagaaaacattcctggagttctatgaggagaagataaagaataacgagaacaaaatgctgctgaaacggatgcaagcgttggagccatatcctgctaacgaatcatccaagctcgtctctgagaaggtggatgattacgaacacgccgctaagtacatgaagaactcccaagtccgcttgcctcttggtacattgagcaagagtgagtgggaggctacgagtatctacctggtgttcgccttcgaaaagcagcagtag

SEQ ID NO: 203959 - DNA, 1431 bp, synthetic construct
  misc_feature 1..1431: note = Description of Artificial Sequence: Synthetic coding sequence
  source 1..1431: mol_type = other DNA
atggccaacagcgccaaggccgaggagtacgagaagatgagcctggagcaggccaaggcgtctgtaaactcagagacagagagtagctttaatattaacgaaaataccacagcctctggaacaggcctatccgagaaaacctctgtctgtcgccaggtcgatatcgctcggaagaggaaggaattcgaggatgatctggtcaaagagagtagtagttgcggcaaggatacaccgagtaaaaagagaaaactcgacccagaaatcgtaccagaagagaaagattgtggcgacgctgagggtaacagcaaaaagagaaagcgggaaacagaagacgtccctaaggataagagcagcacaggcgatgggacccaaaacaagaggaagatcgcattggaggacgtgcccgagaaacagaagaacctagaagaaggacattcatcaaccgtggccgctcactacaacgaactgcaggaggtgggactcgaaaaaaggtcccagagtcgcatcttttatcttcgcaacttcaacaactggatgaagagcgtgctaattggggagtttctggagaaagtgaggcaaaaaaagaaacgtgacataacagtgctcgacctgggatgtgggaagggtggagatctgctgaagtggaaaaagggtcgaatcaataaactggtctgtacggatatcgccgacgtatcagtgaaacagtgtcagcagcgatatgaagacatgaaaaatcgtcgtgattctgagtacattttttcagccgagtttatcacagctgacagctccaaggagttgctgatcgacaaattccgagatccccaaatgtgctttgacatttgctcttgccagttcgtatgtcactatagctttgaatcctacgagcaggcagatatgatgctgcggaatgcttgcgagagactgagccctggggggtactttatcgggaccactccaaattcttttgagctcatcagaaggctcgaggcatctgaaactgaaagttttggcaacgaaatctataccgtgaaattccagaaaaagggcgattaccccctgttcggatgcaaatatgattttaatctggagggtgttgtggacgtacccgagtttctggtgtatttcccccttcttaatgaaatggctaagaaatacaacatgaagctggtgtacaagaagacattcctggagttctacgaagagaaaatcaaaaacaatgagaacaaaatgttgctgaagcggatgcaggcattggagccttatccagctaacgaaagtagcaagttggtgtcagaaaaagtagacgattacgagcatgctgcaaagtacatgaagaactctcaggttaggctgccgctgggaactctgagtaagtccgaatgggaagcaacctcaatatacctggtgtttgctttcgagaaacagcagtag

SEQ ID NO: 203960 - DNA, 705 bp, synthetic construct
  misc_feature 1..705: note = Description of Artificial Sequence: Synthetic coding sequence
  source 1..705: mol_type = other DNA
atgaagaaccggcgggacagcgagtacatcttcagcgccgagttcatcactgcagattcgtccaaagagcttcttatcgacaagttcagggacccacaaatgtgttttgatatttgttcctgccagttcgtttgtcattactcatttgagtcttatgaacaagcagatatgatgctgcgcaacgcctgtgagagacttagtccaggggggtattttattggcactacccccaattcattcgaacttattagacggctggaggccagcgagacggaaagtttcgggaatgagatttacacggtgaaatttcagaaaaagggcgattaccccctttttggctgtaagtatgattttaacttggaaggagtggttgatgtacctgagtttttggtatatttccctcttctcaatgagatggccaaaaaatacaatatgaaactggtatataaaaaaacatttcttgaattttatgaagagaaaatcaaaaacaatgaaaacaagatgctgttgaagcgcatgcaggccctggagccctatcctgcaaatgaatcctcgaagctggtcagtgagaaagttgacgattatgagcatgccgccaagtacatgaagaattcgcaggtaaggctgccgctggggaccttaagcaagagcgagtgggaagcaacttcaatctacctggtctttgctttcgagaagcagcaatag

SEQ ID NO: 203961 - DNA, 1431 bp, synthetic construct
  misc_feature 1..1431: note = Description of Artificial Sequence: Synthetic coding sequence
  source 1..1431: mol_type = other DNA
atggccaacagcgccaaggccgaggagtacgagaagatgagcctggagcaggccaaagcaagcgttaactcggaaaccgaatcctcctttaacatcaatgagaatactacagctagcggcacgggactatctgaaaaaacgtcagtgtgcaggcaagtagatattgcgcgcaaaagaaaggagttcgaagatgacctggtaaaagaatctagctcatgtggcaaggatactcctagcaagaaacgtaagctggatcccgaaatcgtccctgaagaaaaagattgtggagacgccgaaggtaattccaagaaacgcaaaagagaaacagaagacgtgcccaaggataaatcctccactggcgacggcacccagaataagagaaagatagcactcgaagacgtccccgagaaacagaagaatctggaggagggacactcaagcaccgttgcagctcattacaatgagttacaggaggtgggcctcgaaaaaagaagccaatccaggattttctacttaagaaattttaataactggatgaagtcggtcctgattggtgagttccttgagaaggtccgccagaagaaaaagagggacattaccgtgttggatcttggatgcggaaagggtggagatctgctgaaatggaaaaagggcaggattaataaactggtgtgcaccgacattgccgacgtctccgtgaaacagtgccaacaaaggtatgaggacatgaagaatcggcgggattccgagtatattttttctgccgagtttatcacagccgacagctccaaagagctcctcattgacaagttccgagatccacagatgtgcttcgatatctgctcttgtcaatttgtatgccactatagtttcgagtcgtacgaacaggcagatatgatgttacgcaatgcatgtgaaagactgtcaccgggcgggtatttcattgggactacgcctaactcttttgagctcattagacgcctggaagcttcagagaccgaatcctttggtaatgagatctacaccgttaagtttcagaaaaaaggtgattacccccttttcgggtgcaagtacgactttaatctggaaggagtagttgacgtacctgagttcctggtgtactttccactcttgaacgagatggccaagaaatataacatgaaactggtgtataaaaagacatttcttgaattttacgaagaaaagatcaaaaataatgagaacaaaatgctgctgaagcgaatgcaggctctggagccttaccctgccaacgagtcttcaaagcttgtctctgagaaggttgacgattatgagcacgcggcgaaatacatgaaaaactcccaggtgcgactgcctcttggcacactctccaagtccgaatgggaggccacttctatttatttggtctttgcctttgaaaagcagcagtag

SEQ ID NO: 203962 - DNA, 390 bp, synthetic construct
  misc_feature 1..390: note = Description of Artificial Sequence: Synthetic coding sequence
  source 1..390: mol_type = other DNA
atgaagagcgtgctgatcggcgagttcctggagaaggtgcggcagaaaaagaaacgggatatcacagtactggacctggggtgtggtaaaggcggggatctgctcaagtggaaaaagggccggattaataagctagtgtgcactgacatagccgacgtcagtgtgaagcagtgtcagcaaagatacgaggatatgaagaaccgtcgggattctgaatacatattctcagcagaattcattaccgccgactcaagcaaggagcttctaatcgataagttcagggacccgcagatgtgctttgatatttgttcttgccaatttgtctgtcactatagtttcgagagctacgaacaagcagacatgatgctccggaacgcatgcggcacatag

SEQ ID NO: 203963 - DNA, 468 bp, synthetic construct
  misc_feature 1..468: note = Description of Artificial Sequence: Synthetic coding sequence
  source 1..468: mol_type = other DNA
atggccccccggacctggtgccccgccggcatcttcggcctgttctgtccacttaccctggcatgttcctcactaacgattgccctgaccgattgccagcccattatactggtgagccccacactcagtctgtggatggtggtgcggagtgtctggatcatgcaggcctctctactgggggagccagaagaagtcgcactcggccccatgggtgtggtggctgcgaccttggaggttgtcggaacaagagctatgggcgtggccgggatcatgacagtggacttggaggggatggatatggacatggacgtgcccgaaaccatcatggcagaaacccgcgtcgtcatgactgctactcaagaggaaattaccgagactataatgacaacggagatgcgtcatgcgcacaatatcggggagacctggatttctgcactgagtgaaccagtctgtcataccctgtcttag

SEQ ID NO: 203964 - DNA, 474 bp, synthetic construct
  misc_feature 1..474: note = Description of Artificial Sequence: Synthetic coding sequence
  source 1..474: mol_type = other DNA
atgagcagcgaggagggcaagctgttcgtgggcggcctgaacttcaataccgacgagcaggcgctggaagaccatttttcaagcttcggccctatcagcgaagtggtggtggtcaaggaccgcgagactcaacgtagcagagggttcggttttattacgttcactaatcctgagcacgcatcggtcgccatgagggctatgaacggcgagtcgctggacggccgacagattcgtgtcgaccacgctgggaagtccgctagggggacccgagggggaggattcggagcacacggccgcggccgttcttacagcagaggtggcggcgatcaggggtatggttccggccggtattacgattcccgaccaggcgggtacggctacggctatggacgctctcgcgattacaatggcaggaatcagggaggctacgaccggtactctggcggtaactacagagacaactatgataattag

SEQ ID NO: 203965 - DNA, 474 bp, synthetic construct
  misc_feature 1..474: note = Description of Artificial Sequence: Synthetic coding sequence
  source 1..474: mol_type = other DNA
atgagcagcgaggagggcaagctgttcgtgggcggcctgaacttcaatactgatgaacaagctctggaggaccacttctcatcgttcgggccaattagcgaagtggtggtggtcaaagatagagagactcagcgtagcagaggtttcggtttcattaccttcaccaatccggaacacgcctccgtcgctatgagagcgatgaatggggagagcctagacggccggcagattagggtggaccatgccggcaaaagcgcacgcggcacacgggggggtgggttcggcgcccatggaaggggacgcagctacagtcgcggtgggggagaccagggatacggctccggcaggtactacgattctcgccctgggggttatgggtatggatacggtagatctagggattataacggacgaaatcaggggggttacgatcggtattcgggggggaactatcgcgataattatgacaactag

SEQ ID NO: 203966 - DNA, 510 bp, synthetic construct
  misc_feature 1..510: note = Description of Artificial Sequence: Synthetic coding sequence
  source 1..510: mol_type = other DNA
atggccccccggacctggtgccccgccggcatcttcggcctgttctgccctctgacacttgcctgtagctctctgaccattgcgctgaccgactgccagccaatcatcctggtctctccgaccctgagtttgtggatggtagtaagatccgtgtggatcatgcaggcaagcctgttgggtgagccggaggaggttgccctgggtccaatgggcgtcgtggcagcaaccctggaagtggtggggacgcgggcgatgggcgtggcaggcatcatgactgtggacttagagggcatggacatggatatggacgtgcctgaaacgatcatggccgaaactcgcgtcgtgatgactgccacgcaagaagagatcaccgagaccataatgaccaccgagatgagacatgcccacaatatcgacacccagggcattatctcggatccgggctcaagttttcagatggccgtgtttattaaggttttcggtgccgcacccaaacatttgattctgtag

SEQ ID NO: 203967 - DNA, 2559 bp, synthetic construct
  misc_feature 1..2559: note = Description of Artificial Sequence: Synthetic coding sequence
  source 1..2559: mol_type = other DNA
atggagtacgagcggcggggcggccggggcgaccggaccggccggtatggtgctaccgataggagtcaggacgacgggggcgagaacaggtctcgtgatcatgattacagggacatggattatagatcgtaccccagagagtatggaagccaggagggcaagcatgactacgatgacagcagcgaggagcagtcagcagaaattcggggacagctgcagagtcacggcgtgcaggcacgggaagtgagacttatgaggaacaaatcctcagggcaatcccgggggtttgccttcgtggagttctctcatctccaggacgccacaaggtggatggaagcaaaccagcatagcctgaacatcttgggccagaaggtttctatgcactattcagaccctaaaccaaagattaatgaggattggctgtgcaataagtgcggtgtacagaacttcaaacgacgcgagaaatgctttaaatgtggagtacctaagagcgaagctgaacagaaacttcccctcggtacacggttggatcagcaaacgctgccactgggcggacgagagctctcccaagggttgttacctttgccgcagccttatcaagctcaaggggtccttgcctcacaagcgctgtcccaaggctctgaaccatcctctgaaaacgccaacgatactataattctgcggaacctgaacccacatagtacaatggattcgattctgggcgccctggcaccctacgcagtcttgagctcctcaaatgtgagagtgatcaaagataagcagacccagctgaatcgggggttcgccttcattcagctttcaacaatcgaggctgcccagcttcttcaaattctgcaggccctgcacccgcccctcacgattgatggcaaaaccattaatgtggagttcgcaaagggctccaagagggacatggcaagcaacgaaggcagcaggatttcagccgcctccgtggcttccacagctatcgccgcagcacagtgggcaatcagtcaagcttcacagggaggagagggcacatgggcaacatccgaagaaccacccgttgactatagttactaccagcaggatgagggctatgggaacagccaaggtactgagagcagcctctacgcacacgggtacctgaaggggaccaaaggacccggaatcactggcaccaagggggacccaacaggcgccggcccagaagctagcctggaacccggggccgattccgtctctatgcaagccttttctcgcgcccagcccggcgccgcccctgggatttaccagcaatcagctgaggcatccagtagccagggcacagccgcaaactcccagagctatacgataatgagtccagccgtgctaaagtcggaactccagagccctacacacccttcatccgcactgccacctgcaacaagccccaccgcccaggagagttactctcagtaccctgtccctgacgtttcgacctatcagtatgacgagacttctggctactattatgatccacagacaggtctgtattacgaccctaattcccaatattactataatgcccagtcccaacagtatctgtactgggatggggagagacgcacatacgtcccggcactggagcagtctgcggacggccataaggaaactggcgctccttccaaggagggcaaggagaaaaaagagaagcataaaacaaagactgcgcagcaaattgcaaaggacatggagaggtgggccagatcattaaataagcaaaaggaaaattttaaaaactcatttcagcccatctcttctttgagagatgatgagagacgagaaagcgccaccgccgatgccggttacgcaatcttggaaaaaaagggcgcactggccgagagacagcatactagtatggacctgcccaaattggcaagcgatgatcgtccctcaccgccacggggtctcgtggccgcttactccggtgagtccgatagcgaggaggaacaagagcgcggagggcccgaacgcgaggaaaagctgactgattggcagaagttggcttgtctgttgtgccgacgtcagtttccctcgaaagaagctctgattcgacatcagcagctctctgggctccataaacaaaatctggagatccacaggcgtgcacatctgtccgagaatgagctggaggcccttgaaaagaatgatatggagcagatgaaatacagagacagggccgccgaaagaagggaaaagtacggcatcccagaaccccctgaacctaaacggagaaaatatgggggcatcagcacagcctctgtcgatttcgagcagccaactagggacggattgggatccgacaacatcggatcaagaatgctacaggccatgggctggaaagagggctctgggcttggtcgaaaaaagcagggaattgtcaccccgatagaagctcagacgcgggttcggggcagtgggctgggagctagagggtcttcgtatggtgtgactagtacagagtcctacaaggagactcttcataagacaatggtcacgcgtttcaacgaggctcagtag

SEQ ID NO: 203968 - DNA, 2562 bp, synthetic construct
  misc_feature 1..2562: note = Description of Artificial Sequence: Synthetic coding sequence
  source 1..2562: mol_type = other DNA
atggagtacgagcggcggggcggccggggcgaccggaccggccggtacggggccacagatcgctcgcaagacgacgggggggagaatagatctcgggatcacgattacagagatatggattacagaagttatccccgtgaatacggcagtcaggaagggaaacacgattatgatgattcatctgaggagcagtcagccgagattcgtggccagcttcagtcgcacggtgtccaggccagagaagtacggcttatgaggaacaagtccagtggacagagccgcggttttgcatttgtggagttttcgcacttacaggatgcaactcgctggatggaagccaaccagcactcactgaatatcctaggacagaaggtaagcatgcactacagcgacccgaagccaaagataaatgaagactggctctgtaacaagtgcggcgtgcagaacttcaaaaggagggagaaatgtttcaaatgcggtgtgcccaagtcggaggccgagcagaagctgccactgggaactaggttggatcaacagacacttccactgggcgggcgtgagctgtcacagggccttctgccccttcctcaaccataccaggcccagggcgttctcgctagtcaggctctcagtcagggctctgagccaagttctgagaacgccaatgacacaattattcttcgcaatctaaacccccatagtaccatggacagcatactaggggcactggcgccttacgctgttctgtcatcatctaacgtgagagtcattaaggacaaacagactcagctgaaccggggcttcgctttcatccagctgtccaccattgttgaagcggcacaactgctacagatacttcaggcacttcatcccccattaacgatcgacggcaaaactattaacgtagaattcgctaaaggctcaaaacgggatatggcctccaatgaaggatccaggatttccgctgcctctgtggcatctaccgctatcgcggcagcccagtgggccatcagtcaggcctcccaagggggcgaaggcacttgggcgacctctgaggagccccccgtcgattattcttattaccagcaagatgaaggatacggcaactctcagggtactgaaagtagcctgtacgctcacggttacttgaaagggacaaaagggccaggaatcactggaacaaaaggagatcccaccggcgcagggcctgaggcaagcctggagcctggcgccgatagtgtttccatgcaagcttttagtagagcccaaccgggagcggctcctgggatttatcagcaaagtgccgaagcctcttcctcacaaggcaccgccgctaactcacagagctatacgatcatgtcgccggccgtccttaagagtgaattgcaatccccaacacacccgtcctccgctcttccacctgcaacctcgcctaccgctcaggaatcttacagtcagtatcccgtgcccgacgtgagcacataccagtacgatgaaacatcagggtattattacgacccccagactgggctgtactacgatccaaatagccagtattactataatgcccagtcacagcagtatctgtattgggatggcgagcgcaggacttacgtgcccgctctggagcagtctgctgatggccataaagaaacaggcgcaccctctaaggaggggaaggagaaaaaggaaaagcacaaaaccaagactgctcaacagatcgctaaagacatggagcgctgggccaggagtctgaacaagcagaaggaaaacttcaaaaacagctttcagccaatcagtagcctccgggatgatgaaaggcgagagagcgcaacagccgacgccggatatgccatcctggaaaagaaaggtgccctcgccgaacgccagcatacctctatggatctcccaaaactcgctagtgatgaccgacccagcccaccaagaggactcgttgccgcttactctggggaaagtgattccgaagaagagcaggagaggggcgggcccgaacgggaagaaaagttaacagactggcaaaagcttgcttgtttactctgcagaagacagtttccttccaaagaggcactgattagacaccagcagctttccgggttgcacaaacaaaaccttgaaatacatagacgggcccatcttagtgagaacgagctcgaggccttagagaaaaatgatatggaacagatgaagtacagagaccgagccgccgaacgacgtgaaaaatatggaatccccgagcctccggagcccaagaggagaaagtacggcggaataagcaccgcaagtgtggactttgagcaacccacacgtgacggcctaggctccgataatatcggctcacggatgctccaggctatgggttggaaggaaggatccgggttgggccggaagaaacagggcatcgtaaccccgatagaggctcaaacccgggtgaggggctctggcctcggagcccgagggtcgtcttacggtgttacctccactgagtcctacaaggagactctgcataagacaatggtgacacggtttaacgaagcgcaatag

SEQ ID NO: 203969 - DNA, 2793 bp, synthetic construct
  misc_feature 1..2793: note = Description of Artificial Sequence: Synthetic coding sequence
  source 1..2793: mol_type = other DNA
atggagtacgagcggcggggcggccggggcgaccggaccggccggtacggagccacagataggtcccaagacgatggcggcgagaatcggtctagagaccatgactaccgagacatggattatcggtcctatccacgcgaatacggatctcaggagggaaaacatgactacgatgattcctccgaagagcagagtgctgaggattcatacgaggctagcccgggatctgagacacagaggaggcggaggcgccgacatcggcactcacccaccggaccacccggattccctcgcgatggcgactacagagatcaggattatcgtactgagcagggcgaggaggaggaagaggaggaagacgaggaggaagaagaaaaggcgtctaatatcgtcatgctgaggatgctcccacaggccgcaacggaggatgatatcagaggacagctgcagtcacacggcgtgcaggctcgcgaggtgaggctgatgcgaaataaatctagtggtcaatccagggggtttgcttttgtggaattcagtcacctccaggacgcaacaagatggatggaagccaaccaacactcccttaacatcttggggcaaaaggtgtccatgcattactctgaccccaaacctaagatcaacgaggattggttgtgtaataaatgcggagtgcagaacttcaaacgccgagagaagtgcttcaagtgtggcgtgcccaagtcggaggctgaacagaagctgcctctcggcactaggctcgatcagcagaccctacccctcggaggcagggagctctcgcaggggctcttgccactgcctcagccgtatcaagctcagggtgtgctcgcctcacaggctctaagccagggcagtgaaccttctagcgagaatgccaacgacactatcattctcaggaacttgaatccccattcaaccatggatagtatacttggagcactggctccctatgccgtcctttccagctctaacgtcagggtgatcaaggataagcagacccagctcaaccgaggcttcgctttcattcagctcagtacaattgtggaagctgcacaactgctccagattctgcaggccctccacccgccattgacgatcgatgggaaaacgataaacgtggagtttgccaaaggctcgaagcgcgacatggcgtccaatgagggcagccggatctccgctgcttccgttgcatccacagcaattgccgcggcccagtgggctatctctcaggcttcgcagggcggggaggggacgtgggctacatcagaagaacccccggtcgattatagctactatcaacaggatgaagggtacggaaattcgcagggaactgaatcttccttgtacgctcacgggtatctcaagggcacaaagggaccagggattacaggcacgaagggggatcccacaggggccggccccgaggccagcctggagcctggcgcggactccgtgagcatgcaggcattcagccgggctcagccaggcgccgcaccgggaatttaccaacagtccgctgaggccagtagctctcagggcacagccgccaactcccagtcctacacaataatgagtcccgctgtcctgaaatcggaacttcaatcccctactcacccgtccagcgcattgccacccgcgacatctcctaccgctcaggagagctactctcaatatcccgtgccggacgtctctacatatcagtacgatgaaacaagcgggtactactacgacccccaaaccggactgtactatgacccgaactctcaatactactataatgctcaaagccagcagtacctctactgggacggcgagcggagaacctacgtgccggccctggaacagtcggcggatggtcacaaggagacaggggccccttctaaagagggaaaggaaaagaaagaaaagcataagacgaagacagctcagcaaatagcaaaagacatggaacggtgggctcggagcctcaacaaacagaaggagaactttaagaatagcttccagcccatatcctccttgagggacgacgagagacgggaatccgctactgccgacgccggatatgccattctcgaaaagaagggtgcgctggctgaacgccagcacacatcaatggatttgcccaaattagcgtctgatgatcgacctagtccccctcgcggtctggttgctgcttattcaggtgagtctgactccgaagaagagcaggagcgcggcggcccagaaagagaggagaagctgacagactggcaaaaactggcctgtttactgtgtaggcgccaattcccttctaaggaggctctgatacgccatcagcagctttctggattgcacaagcaaaacctggagatacaccggcgggctcacctgtcagagaatgaactggaagcactggagaaaaacgacatggaacagatgaaataccgtgatagagcggcggagaggagagagaagtacggaatccctgaaccacccgaaccaaaacgcagaaaatacggaggaattagcactgctagcgtcgattttgagcagccaactcgggacggcctcggatcagacaatatcgggagccgcatgctgcaggcaatggggtggaaggagggttccggcctcggacgaaagaagcagggtattgtgacacccatcgaggctcaaacaagagtgagaggctctggtctgggcgccagaggaagctcctatggagtgacgtccaccgagtcctacaaagaaacattgcacaagacgatggtgacgagatttaacgaggcgcagtag

SEQ ID NO: 203970 - DNA, 2010 bp, synthetic construct
  misc_feature 1..2010: note = Description of Artificial Sequence: Synthetic coding sequence
  source 1..2010: mol_type = other DNA
atgaagatcttcgtgggcaacgtggacggcgccgacaccacccccgaggagctggccgcgctcttcgctccctacggcaccgtcatgagctgtgctgtcatgaagcagtttgccttcgtgcatatgagggagaacgccggcgctctgagagctatcgaggctctacatggccatgaactccggcccggcagggctttggtcgtcgaaatgagccgaccacgcccattgaacacatggaaaatttttgtcggaaacgtctccgcagcctgtacctcacaggagctccggtccctgtttgaaagacgcggccgggtcatcgagtgcgatgttgtgaaggattatgcttttgtgcacatggagaaagaggcagacgcaaaagctgcaattgcccagcttaatgggaaagaagtcaaaggcaagagaatcaatgtagagctgagtaccaaagggcagaaaaagggacctggtctggcagtgcagagtggggacaagacaaaaaaaccaggagcaggtgataccgcgttcccagggaccggaggtttttccgcaacattcgattaccagcaggcctttgggaattctacagggggctttgatgggcaggcaagacagcccactcctccgttctttgggcgcgacagatcccctctgagaagatctcccccacgcgcaagctatgtggccccgctcactgctcagccggctacctacagggctcagccttcagtgtcattgggcgctgcctacagggctcagccctctgcttctctgggtgtgggatacaggacgcagcccatgaccgcccaggcggcatcgtacagagctcagccaagtgtgtctctgggggcaccctacaggggccagctggctagcccaagctcacaaagcgcggctgctagttccctgggcccctacggtggcgcccagccaagcgcctccgctctctcttcttacggcggccaggctgcagccgctagctcattaaactcatacggcgcccagggcagctctttggcctcttacgggaaccagccctctagttacggggcccaggccgcttcaagctatggagtaagggccgctgccagctcatacaacacacagggggccgcaagctccctcggctcatacggcgcgcaggctgccagttacggagctcagtctgctgcctcatcactggcctacggggcccaagcagcatcttataatgctcagccatccgcctcctacaacgcccagtctgcaccttatgcagcacagcaggctgcttcatacagcagtcaacctgccgcatatgttgcacagcctgcaacggccgcagcatacgcgtcccagcccgccgcttatgccgcccaggccaccacaccaatggctgggagctacggcgcccaaccagtggtacaaactcaattaaattcctatggcgctcaggcttcaatgggattatctggaagttacggggcacaaagcgccgctgctgcaacaggtagttatggtgctgcagccgcttatggggcccagccctccgctactctggccgccccctaccgcacacaatctagcgccagcctcgccgccagctacgccgcccagcaacaccctcaggcagcggcctcttaccgcggacagcctggcaatgcctatgacggcgccggacagccttcagcagcttacctctcaatgagccagggggccgtagcgaacgctaactcgacccctcccccttacgaaagaacaaggctcagtcctccacgcgcttcatatgacgacccttacaaaaaagccgtcgccatgtcaaagaggtatggttcagaccgtaggctggcagaactaagtgactaccggcgtttatctgaatctcagctgtccttccgaaggtctccaacgaagagcagcctggattacaggaggttgcctgacgcccacagcgactatgcccgttattccgggtcatataatgattacctgagagctgctcagatgcacagcggctaccagcggcgcatgtag

SEQ ID NO: 203971 - DNA, 471 bp, synthetic construct
  misc_feature 1..471: note = Description of Artificial Sequence: Synthetic coding sequence
  source 1..471: mol_type = other DNA
atgaagatcttcgtgggcaacgtggacggcgccgacaccacccccgaggagttggccgccttgttcgccccctacgggacagtgatgtcctgtgctgtaatgaaacaattcgcctttgtccacatgagagagaatgctggggccctgagagccattgaggcacttcatggccacgagctccgacctggcagagcccttgttgttgaaatgtccaggccaagaccactgaatacatggaaaattttcgtgggcaacgtatccgccgcctgcacatcccaggagctgcgcagcctatttgagcgtagggggagagtgatcgagtgtgacgtcgtcaaggattacgcctttgtgcacatggaaaaggaagcagatgccaaagctgctatagcacagctgaacggaaaggaggtgaagggaaaaagaatcaacgtcgaattgagtacaaagggaatggtcccgacaggggtttag

SEQ ID NO: 203972 - DNA, 360 bp, synthetic construct
  misc_feature 1..360: note = Description of Artificial Sequence: Synthetic coding sequence
  source 1..360: mol_type = other DNA
atgaagatcttcgtgggcaacgtggacggcgccgacaccacccccgaagaactagctgcccttttcgccccgtacggcaccgttatgagttgcgcagtgatgaaacagttcgcctttgtgcacatgcgcgagaatgcgggtgctctccgagctatcgaagcgctgcacggtcatgaacttcggcccggcagagccctggtcgtggagatgtctcgccctcgacctctgaatacatggaagatattcgtcggcaatgtgagcgctgcctgcacgtcgcaggaactacggagcctcttcgagcgtcgcggtcgggtcatagagtgcgacgtcgttaagggaatggtcccgaccggggtgtag

SEQ ID NO: 203973 - DNA, 2934 bp, synthetic construct
  misc_feature 1..2934: note = Description of Artificial Sequence: Synthetic coding sequence
  source 1..2934: mol_type = other DNA
atgcggaccgccggccgggaccccgtgccccggcggagcccccggtggaggcgggctgttccactttgtgaaactagtgcaggaaggcgggtaacgcagctgcgaggagatgacttgcggagacctgctacgatgaagggtaaggaaaggagtccagtcaaggcaaagcgttcaagagggggcgaggactcaaccagccggggggaacgatctaagaagctcggggggtccggaggctccaatggaagcagctcaggcaagaccgacagtggtggtggctcccgtaggagcctccacctggacaaaagctcctctcgcgggggaagcagggaatacgataccggtggagggagcagctccagtaggctacatagctatagcagtccaagtactaagaatagctccggagggggggagtccaggtccagtagcaggggcggcgggggggaatcacgttcgtcaggcgctgcgagtagtgcaccagggggtggggacggcgcagaatacaaaacactgaagatttcagagctcggatcgcagctcagcgacgaggctgtcgaagatgggctttttcacgaattcaaacgttttggggacgtttcagtgaaaataagccacttgagcggaagtggaagcggggatgagcgagtggccttcgtcaattttcgacgacccgaggatgcccgtgccgcaaagcacgcccgggggaggctcgttctgtacgatcgccccctgaaaatcgaggccgtttatgtatcgagaaggaggtccaggtcccccctggataaggatacatacccccctagcgcttccgtagtaggggcctcggtgggtggtcatcgccatcccccgggtggagggggtggtcagaggtctctttcccctggcggggccgcactgggataccgagattacagactacagcagctggctttggggaggctccccccccctccccccccgcctctgcctagggaccttgaaagagaaagggactacccgttctatgagagggtgcgcccagcatattccttagaaccaagagtcggcgccggagcaggtgcagcacctttccgggaggtggacgaaatatctcctgaagatgatcagcgagctaataggacccttttcctgggaaacctcgatattacagttacagaaagcgatctaaggcgagcattcgaccgcttcggagtcatcacagaagttgatatcaaaaggccctcacgcgggcaaaccagcacttatggcttcctcaagttcgagaacctggacatgagtcatagggcgaagttggccatgagcggaaagatcatcattaggaaccctattaagattgggtacggtaaagctacaccgacaactcggctgtgggtgggcggtcttgggccttgggtacccctggcagcgctcgccagggaattcgatcgctttgggacaattcggaccatcgattataggaaaggagattcctgggcttatatacagtacgagtccctggatgccgcccatgccgcctggactcatatgaggggcttcccactaggcggtccagacagacggcttcgggttgatttcgcggacacagaacatcgctatcaacagcaatacctgcagccactccctttgacacactacgaattggtaacagatgcgtttggtcaccgtgcgcctgaccccctaaggggggcacgggaccgcaccccccccttactgtaccgagacagagatcgcgacctgtatcctgacagcgattgggtgcctccccccccccccgtcagggagagatcgacgcgcaccgccgctacatccgttccagcgtacgaaccactggattcactggaccgaaggcgggacgggtggtcactcgaccgggatagaggtgatcgggacctccctagcagcagagaccagcctagaaagaggagactgccggaagagagtggagggaggcacctggacagatcccctgagagtgacagaccacgaaagaggcactgcgccccgagccccgaccggtctccagagctgtccagcagtcgtgaccgatacaacagcgacaacgaccggtccagtcgactgctgctcgagaggccgtcaccgattcgcgatcgcagaggctcgctggaaaagtcacagggagacaagagggatcgcaagaatagcgcatcagcagaacgagaccggaaacatcggacgacagcccccacagaaggaaagtctccgttgaagaaggaagaccgatccgacggcagcgctcccagcacttccacggctagctcaaagctcaaatccccctcccaaaaacaagacggaggtaccgcaccagtggcctccgccagccccaaactctgcttggcatggcagggcatgcttctgctgaagaacagcaacttcccctccaatatgcacctacttcaaggcgacttacaagtcgcgtcgtcccttctggttgaaggatcgactggtggaaaggtcgctcaacttaaaataactcagcgactgcgcttggatcaacccaaactggacgaggtcacgagaaggatcaaggtggcagggcctaacggatacgccattcttctggctgtgcccgggagctctgacagccggtcctcttcttccagcgccgcctccgacaccgccaccagcactcagagacccctgcgaaacctggtctcctatcttaaacagaaacaggccgccggcgttatctccctccctgtcggtgggaataaagacaaagagaataccggcgttctgcacgcatttcccccatgtgagttttcgcagcagttcttagattctcctgctaaggctctcgcaaaatcggaagaggattaccttgtgatgattattgtaaggggctttggattccagatcggcgtccgatatgaaaataaaaaaagggaaaaccttgccctgacactgctgtag

SEQ ID NO: 203974 - DNA, 2673 bp, synthetic construct
  misc_feature 1..2673: note = Description of Artificial Sequence: Synthetic coding sequence
  source 1..2673: mol_type = other DNA
atgaagcggcagagcgagcgggacagcagccccagcggccggggctccagcagttccgccaagcgcccaagagagagggagcgggaggccgaggccgggggtcggagagcagcgcacaaggcttcgggaggtgctaagcatcccgtcccggcgagggcacgagacaagccaagggggagtggaagtgggggaggcggacaccgggatgggcgaggcacgggcgacgcaaaccaccgcgcctcttccggccggagctcaggctctggggcaggcggaggtggccggggaggcaaggcctcaggcgatcccggggcatccggcatgtcccctcgcgcttccccgcttcctcctcctccaccccctcccggggctgaaccagcgtgccctgggtctagcgcagctgcgcctgaatataagaccctcctgatctcttcgttgagccctgcattacctgccgaacaccttgaggaccgactcttccaccagttcaagagatttggggagatttcactccggctctcacatacccctgagctgggccgggtggcttacgtaaactttcgacatccacaggacgcacgtgaggcacgccaacatgccctggccagacagcttcttctgtacgatcgccctctgaaagtcgagcccgtgtacctaagagggggaggtggttcttccaggcgcagtagttcctctagtgccgccgcgagcacacctccccccggccccccagcacccgcggatccgctcggatacctgccattgcatgggggctaccagtataagcagaggtccctctcaccagtggctgcacctccattgagggagccacgtgcacgccatgccgccgccgctttcgctttggatgctgcagctgctgccgctgtcggactgagccgcgaacgcgccctcgactactacggcctgtatgacgatcgcggacggccctatggctacccagccgtgtgcgaggaggatctgatgcccgaggacgatcagcgtgctacacgcaacctgttcattggtaacctcgaccacagcgtttccgaagttgaattgaggagggcatttgaaaagtatggaatcattgaggaggtcgtgatcaaaaggccggcgcgcggacagggaggggcctatgcctttttaaagtttcagaacctggacatggcccatcgagcaaaagtcgcgatgtccggccgcgtgatcggacgaaatccaataaaaatcggttacgggaaggctaatcctaccacacgtctgtgggtcggcggtctggggcccaacactagtttggccgcacttgcccgcgagtttgaccgctttgggtctatacgtactattgatcatgtcaagggcgactcatttgcctacattcagtatgaatctctggatgctgcacaggccgcttgtgcaaaaatgcgcggatttcccctgggcggcccagacagacgactgcgggtagactttgccaaggcagaagagacacgctatccacagcagtaccagccgtccccgttgcctgtccattatgagctgctgactgacggctatactaggcataggaaccttgatgcggatctggttcgcgaccgcaccccacctcatctgctgtatagtgatagggatcgcaccttcctggagggggattggacatctcctagcaaatctagcgatcgaagaaatagtttagaggggtatagcaggtctgtgcggtcccgcagcggtgaacgatggggggccgatggagacagggggctacctaaaccctgggaagaaaggcgaaagaggcgtagtttgtcctctgatcggggaaggaccactcattccccttatgaggagcggtcgcgtaccaagggcagtggccagcagtcggagagaggctctgatcgaacaccggaacggtcacggaaggaaaaccatagctccgagggaactaaggaatcttcttccaactctctgtcaaattcaaggcatggagctgaagagcgaggccaccatcatcaccaccacgaggcggcagacagcagtcatggaaagaaggccagggactccgaaagaaatcaccggactaccgaggcagaacccaagccactagaagagcctaagcacgagaccaagaaacttaagaatctgtcagaatacgctcagacattgcagcttggttggaacggcctgttggtgttaaagaattcttgtttccccacttccatgcatattctcgagggtgaccagggggtgattagttccctgcttaaagatcatacatccggaagtaagctcacacagctgaagattgcccaaaggttaagattggaccagcccaagttggatgaggtaacgcgtcggatcaagcagggaagcccaaacggttatgccgtgcttctagcaacccaggccacgcccagtggcttaggaactgagggcatgcccacagttgaacccggactccagcgcaggctgttgcgcaacctggtatcatatctcaaacagaaacaagccgcaggcgttatcagcctgcccgtcggtgggagcaagggaagagacggcacaggtatgctgtatgccttccctccatgcgacttttctcaacagtacctgcagtcagcccttagaacattaggaaagcttgaggaagagcatatggtaatcgtgatcgtgcgcgacacagcctag

SEQ ID NO: 203975 - DNA, 765 bp, synthetic construct
  misc_feature 1..765: note = Description of Artificial Sequence: Synthetic coding sequence
  source 1..765: mol_type = other DNA
atggagaccgtggtgtgccccccctgggaggagcggcggaagcggcggagcctctctagcgatagaggacgcaccacccattccccctacgaagagcgcagtaggacgaagggctcaggccagcagagtgagcgcgggagcgatcggactccagaacggtctcggaaagagaatcattcctccgaaggaaccaaagagtcttcttcaaatagcttgtccaattcacgccacggcgcggaggaacgggggcaccaccatcaccatcacgaggcggctgacagttctcacggaaagaaagctcgcgattctgaacgaaaccacagaacaaccgaggccgagcctaagcctctggaagagcccaaacatgagacaaagaagcttaagaacctgtcagaatacgcacaaactctgcagctgggctggaacggactcttagttctcaagaattcctgctttccaacatcaatgcacatccttgagggtgaccagggcgtgatctctagcctgctaaaggatcacaccagcggctcaaaactgactcagctgaaaattgcgcaacgactgagactggatcaacccaagttggatgaggtaactcgccggatcaaacagggatccccgaacggatacgcagtgttgttagctacacaagcgactccttccggtctggggacagagggcatgcctactgtggaaccaggtctacaacggcgtctgctgcgaaacctggtatcctacctaaaacagaagcaagcagccggttag

SEQ ID NO: 203976 - DNA, 636 bp, synthetic construct
  misc_feature 1..636: note = Description of Artificial Sequence: Synthetic coding sequence
  source 1..636: mol_type = other DNA
atgaagcggcagagcgagcggaaccaccggaccaccgaggccgagccaaagcctctcgaggaaccaaagcacgagaccaaaaagctgaagaatctgtccgaatatgctcagacattacagttaggttggaatggcttgctagtactgaaaaatagctgtttcccaacgagtatgcacatactggaaggagatcagggagtcatatcctccttgctgaaggatcataccagcgggtctaagttaacgcagctgaaaatagctcagcgactgcgtcttgatcagcccaagcttgacgaagtgacgcggcggataaagcaaggcagtccaaacggttatgctgtactattagccacccaggccacacccagtgggctcgggaccgaaggcatgcctaccgttgagcctggcctccagaggagattgctgagaaatctggtctcatacctaaagcagaagcaagctgcgggcgtgattagcctacctgttgggggcagcaagggccgggacggaaccggcatgctttacgctttccctccctgcgatttcagtcagcagtatcttcaaagtgccctgcgcaccctcgggaagctggaagaggaacacatggttattgtgatcgttagagacaccgcgtag

SEQ ID NO: 203977 - DNA, 1692 bp, synthetic construct
  misc_feature 1..1692: note = Description of Artificial Sequence: Synthetic coding sequence
  source 1..1692: mol_type = other DNA
atgcccgaggacgaccagcgggccacccggaacctgttcatcggcaatctcgatcatagtgtgtcagaggtcgaattaaggcgcgcgttcgagaaatacggaatcattgaagaggtcgtgatcaagaggcccgccagaggtcaaggtggggcttatgcgtttctgaagttccagaacctcgatatggcacaccgggcaaaggtggcgatgagtggccgagtaatcgggcggaatccaataaaaatcgggtatggcaaagccaaccccactacaagactgtgggtgggcgggctgggcccaaatacctcactggccgccctggctcgagagtttgatagatttggtagtatccgcacaatcgatcatgtgaaaggtgattcctttgcgtatatacaatacgaaagccttgacgcggcacaggcggcgtgtgccaagatgaggggctttcctctcggcgggccggacaggaggcttcgcgtagactttgcaaaggccgaggagacaagataccctcagcagtaccagccgagccccctgcctgtccactacgagctactgacagatgggtatacaagacatcgcaacttggacgccgacctggtgagagatcgaaccccacctcacctcctttactctgacagggacaggacgttcctggagggcgattggacgagcccttctaaatccagtgaccgcaggaacagcctcgagggatacagccgctccgtgcgcagcaggagtggggagcgatggggagctgacggtgacagaggactgcctaagccctgggaggaacggaggaaaaggcgctctctgtcctctgacagaggcagaaccacccatagcccatatgaagagcgttcccgcacgaagggctctgggcagcagtccgaaaggggctcagataggacaccggaacgctcaagaaaggaaaaccactcctccgaggggacgaaggagagtagctctaattcactgtccaacagtcgccatggagcagaggaaagaggccaccatcaccatcaccacgaggctgctgatagctcacatgggaaaaaggctagggattccgagcgtaaccataggaccaccgaggcagagcccaagcctcttgaggaacccaaacatgaaacaaagaagctgaaaaatctctcagaatacgcccaaaccctgcagttgggatggaatggtctcctggtgctcaagaacagctgttttccaacctctatgcatatcttagaaggggaccagggcgtgattagctccctgctgaaagatcatacctcgggttctaagttgacccagctcaagatcgcacaacggctgcggttagatcaacccaaactggacgaggtgactcggaggattaagcagggaagcccgaacgggtatgccgtgctgctggccacccaggccacaccttcgggactcgggactgagggaatgcccacagtggagcctggactacaacgtaggctgttgcgtaacttagtctcgtacctgaaacagaagcaagccgcaggagtcatctctctcccagttgggggaagtaagggtcgggacgggactggcatgctgtatgcctttccaccctgcgacttttctcaacagtacctccagagtgccctcaggactctcggtaaacttgaggaagaacacatggtgattgtgatcgtgcgcgacacggcctag

SEQ ID NO: 203978 - DNA, 732 bp, synthetic construct
  misc_feature 1..732: note = Description of Artificial Sequence: Synthetic coding sequence
  source 1..732: mol_type = other DNA
atgggccgggtgggccgggccggccggagccagcggaccaagcagtccacagttttggcccccgtcattgaccttaagcggggcggttcctccgacgacaggcaaatagtggacactccccctcacgtcgcagctggccttaaagacccggtccccagcggattctccgccggcgaagtgctgataccacttgctgacgagtatgaccctatgttccctaacgactatgaaaaggtggtgaagcgccagagggaggaacggcagcgccagagagaacttgaaaggcagaaagaaatcgaggaaagggagaaaaggaggaaagaccgacacgaagcctcaggctttgcacgcaggcccgacccagactccgacgaagacgaggattatgagagagaacggaggaagagatcgatgggcggtgcagcaatcgctcctccgacatctctggtggagaaggacaaagagcttccaagggacttcccatacgaggaggattctagaccacgctctcagagtagcaaggccgctattcctcccccggtttatgaggaacaagataggcctaggtccccgacggggcctagcaacagcttcctcgcaaacatgggaggaacagtggctcataagatcatgcagaagtacggcttccgcgaagggcagggtctgggaaaacacgagcagggcctgtcgacagcgcttagcgtggaaaagacttctaagcggggaggctag

SEQ ID NO: 203979 - DNA, 1206 bp, synthetic construct
  misc_feature 1..1206: note = Description of Artificial Sequence: Synthetic coding sequence
  source 1..1206: mol_type = other DNA
atgagcctgtacgacgacctgggcgtggagaccagcgacagcaagacggagggatggagtaagaactttaaactgcttcagtcccagcttcaggtgaagaaagctgctttgactcaagccaaaagccagaggaccaagcaaagtacagttctggcgcctgttattgacctaaagcgggggggctccagtgacgacaggcagattgttgataccccacctcacgtcgcagctggccttaaggacccggtcccctcaggcttctccgcgggagaagttctgatacctctggccgacgagtacgatcccatgttccctaacgactatgagaaagtagtcaaaaggcagcgggaagagagacagcgccagagagaattagagaggcagaaggagatcgaggagcgggaaaaaaggcggaaggatcggcatgaggcttccggctttgctagaaggccggatcccgactcagacgaagacgaggattacgagagggagcgcaggaagcgctcaatgggaggggccgcaattgcacctccaacatccctggttgaaaaggataaggaactcccaagggactttccgtatgaagaggactccagacctcggagccaaagttcgaaagctgccatccctcctccagtctatgaggagcaggaccgcccacgctccccaactggaccaagcaattcgtttctagctaacatgggtggcactgtggcacacaaaattatgcaaaagtacggattcagagagggccaggggctcgggaaacacgaacaaggactgagtacagccttatcagttgaaaagaccagcaaaagaggcgggaaaattattgttggcgacgcgacagaaaaggatgcgtccaaaaagtcagactccaatcccttaacagagatcctcaaatgccctactaaagtggttcttctgagaaatatggtgggcgcaggggaggtggatgaagacctcgaggtggagaccaaagaggagtgtgagaaatatggcaaggttgggaagtgcgtgatttttgagataccgggcgcccccgacgatgaggccgtgagaatcttcttggagttcgagagagtagaatctgccattaaggccgtcgtggatctcaacgggagatacttcggagggcgagtggtgaaagcttgtttctataacctggacaaattccgcgtcctagacttggccgagcaggtctag

SEQ ID NO: 203980 - DNA, 639 bp, synthetic construct
  misc_feature 1..639: note = Description of Artificial Sequence: Synthetic coding sequence
  source 1..639: mol_type = other DNA
atgagcctgtacgacgacctgggcgtggagaccagcgacagcaagacagaaggttggtccaagaactttaaactgctgcagagccagctccaggtgaagaaagccgcactaacacaagcaaagagccagagaacaaaacagtctaccgttctggccccagttatcgatctaaagcggggcggttcaagtgatgatagacagatagttgatactccacctcacgtcgctgctggtctcaaagacccagtgccctccggtttctccgccggggaggtgttgatccctttggcagacgagtacgaccctatgttcccaaatgactatgaaaaggtcgtgaagagacagagagaagagcgtcaacggcagcgggaactcgagcggcagaaagagatagaggagagggaaaaacggaggaaagacagacatgaagcttcaggatttgcacgtcggcccgatcccgactcagacgaagatgaggactacgaaagagagagacggaagcgctcgatgggaggagcggccattgctcctcctacatcattagttgaaaaggataaggagctgcccagagatttcccgtatgaggaagactcccgcccacggagtcagtcatctaaggccgctatcccaccaccctag

SEQ ID NO: 203981 - DNA, 666 bp, synthetic construct
  misc_feature 1..666: note = Description of Artificial Sequence: Synthetic coding sequence
  source 1..666: mol_type = other DNA
atgagcctgtacgacgacctgggcgtggagaccagcgacagcaagacagagggctggtctaagaactttaaactgctccaatcccaactccaggtgaagaaggccgcgctcacacaagctaagtcccaaaggactaagcagagtacagtgctagcacccgtgatagacctcaagaggggggggtcaagtgatgacaggcagattgtggacacaccaccacatgttgccgctggtcttaaggatcccgttccctccggattttctgcaggggaggttctgatccctcttgccgacgagtatgaccccatgttcccaaacgattacgagaaagttgtcaagcggcagagagaggaacggcagaggcagcgcgagcttgagcggcagaaagaaattgaagagcgagagaaaaggaaagatcgtcacgaagcttctggcttcgcccgccgcccagacccagattccgacgaggatgaagactacgagcgggagcgtagaaagagatcaatgggcggagccgcaatcgcccctcctacttcgctcgtggagaaggacaaagaacttcctagagattttccgtatgaagaggactccaggccacgatcacagtccagcaaagccgccatcccaccaccagtttacgaggaacaggatcgtcctcgctcctag

SEQ ID NO: 203982 - DNA, 732 bp, synthetic construct
  misc_feature 1..732: note = Description of Artificial Sequence: Synthetic coding sequence
  source 1..732: mol_type = other DNA
atgggccgggtgggccgggccggccggagccagcggaccaagcagtccacggttttagctcctgtaatagaccttaaaagaggaggaagtagtgacgatagacagatcgttgatactcctccacatgtggcagcaggacttaaggaccccgtgccctctggcttttcggcaggagaggttctcatacctttggcagatgaatacgaccctatgttcccaaatgattatgaaaaggtggtcaagaggcagcgtgaagagcggcaaagacagcgagagctggagcggcaaaaggaaattgaggagagggaaaaacggcggaaggatcgccacgaagcctctgggttcgcccggcgacctgatccagactcagatgaggacgaagactacgaaagggagcgccgtaagcgcagcatgggtggtgccgctatcgcccccccaacttcgctagtcgagaaggataaggaactcccccgggatttcccatatgaagaggactcccggcctagaagtcagagcagtaaagccgcgatacctccgccagtctacgaggagcaggatagacccagatcccccactgggccttccaacagctttctcgcaaacatgggaggtacagtcgcacataaaatcatgcagaagtacggctttcgagaaggccagggacttggaaagcacgagcaggggctgtcaacagcgctgtcagtcgaaaagactagcaagcggggtggctag

SEQ ID NO: 203983 - DNA, 1206 bp, synthetic construct
  misc_feature 1..1206: note = Description of Artificial Sequence: Synthetic coding sequence
  source 1..1206: mol_type = other DNA
atgagcctgtacgacgacctgggcgtggagaccagcgacagcaagacagagggatggtccaagaacttcaaacttttacaaagccagctccaagtgaagaaagcagccttgactcaagccaaatcacagcgaaccaagcagtctaccgtgcttgcgccggttatcgacctgaaaaggggaggctcctctgatgatcgacaaatcgtggacacacccccccacgtagctgctggcctgaaggacccagtgccatcaggattctccgctggcgaagttctgatccccctggctgacgaatacgacccaatgtttcccaacgactatgagaaagtggtcaagagacagagagaggaaagacaacggcagcgcgagctggaaagacaaaaggaaattgaagagcgcgagaaaaggcggaaggatcggcacgaggcttctggatttgcaaggaggccagatcccgacagtgacgaagacgaggattacgagcgggagaggcggaaacgaagcatgggaggggctgccattgccccccctacttctctcgtagagaaagacaaggagctgcccagagactttccctacgaagaggattctaggcctagatctcagagttccaaagcggccatcccacccccggtgtatgaagaacaagatcgcccccgatctccaaccggtccttccaacagctttctggccaatatgggcggtaccgtagctcacaagattatgcagaagtacggattccgcgaggggcagggactcggcaagcatgaacaaggactgagtacagccctatctgtggagaaaaccagcaagagaggcggtaaaatcatagtcggcgatgctacggaaaaagatgctagcaaaaaatcggactcaaatccccttacagagattctgaaatgccccacaaaggtggttcttctgcggaacatggtgggggccggagaagtggatgaggacctcgaagtagaaaccaaggaagagtgtgagaaatatggaaaagtggggaagtgtgtgatcttcgaaatacccggcgccccagacgacgaagccgtacgcatcttcttagagtttgaacgcgtcgagtccgctatcaaggctgttgttgacctgaatggtagatattttggaggcagagtggttaaagcatgtttttataatctagacaaattccgagtgttagatctcgctgagcaagtatag

SEQ ID NO: 203984 - DNA, 678 bp, synthetic construct
  misc_feature 1..678: note = Description of Artificial Sequence: Synthetic coding sequence
  source 1..678: mol_type = other DNA
tgacccctggccgacgagtacgaccccatgttccccaacgactacgagaaggtggtgaaaagacagagagaggagagacagcggcaacgagagctcgagcggcaaaaagaaatagaggagcgcgaaaaaagacggaaagaccgacatgaggcaagtggctttgctagacgccctgaccctgactctgacgaagacgaagactacgaaagggagcggcggaagcggtctatgggcggggccgcaattgcccctccgaccagtcttgtggaaaaagacaaggagctgccccgtgatttcccctacgaagaggacagtcgcccaagaagccaaagctcaaaggctgccatccccccccccgtctacgaggaacaggataggccacggagccccactgggccaagcaattcatttctggctaatatgggagggactgtcgcccataagatcatgcagaagtacggattcagggagggccagggactgggcaagcacgagcaggggctgagtacagccctttccgttgaaaaaacatctaaaaggggcggtaagattattgttggggacgccactgaaaaaggggtttcacccggaaagcgggtgaccagaggaaaaggtctcgctccctctatttcagacatggcatcactcgatccacacgtgtctgcgggtggacagtag

SEQ ID NO: 203985 - DNA, 3684 bp, synthetic construct
  misc_feature 1..3684: note = Description of Artificial Sequence: Synthetic coding sequence
  source 1..3684: mol_type = other DNA
atggtgctggccgccgccatgagccaggacgccgaccccagcggccctgaacagcctgatcgtgtggcttgttccgtgcccggggcacgggctagccccgctccttctggtccaagggggatgcaacaaccacctccacccccacaaccacctcccccaccccaggcgggactacctcagataattcagaacgccgctaagcttcttgacaaaaacccattctcggtgagcaatccaaaccctctcctcccgtcacctgcctcgcttcaattagctcagctgcaggcgcagcttacattgcaccggcttaagctggcacagaccgctgttacaaacaatacagctgccgcaacggttctgaatcaggttctaagcaaagtggcaatgagccagccactgtttaatcaactccgtcacccatctgtgattaccggtccccatggacacgccggggttccccagcacgctgcagccatcccgtctacccgctttcctagtaacgccatcgctttctccccgccatcgcagacaaggggtccgggaccttcgatgaatttgcctaatcaacccccgtccgctatggtgatgcatcctttcaccggcgtgatgcctcaaacccctggccagccagccgtgatcctcggcatcggtaagactggccccgccccagctacagctggattttatgaatacggcaaagcctcttctggccaaacatacggccctgagaccgatggtcagcccggctttctacctagcagtgcctctacttccggctcggtgacatatgaaggtcactactctcatactggacaagatggtcaggctgctttttcaaaggacttttatggccctaatagccaagggagccacgtcgcctcagggttccccgcggagcaggccggtggactcaagtccgaagtaggcccgttgctgcaagggactaattcccagtgggagtccccacatgggtttagtgggcagagcaagccagacttaactgctggtcctatgtggccccccccccacaaccagccatatgaactttatgaccctgaagaacccacaagcgacaggacacctccatcctttgggggcaggctcaataattccaagcaagggttcatcggtgcgggtagacgcgctaaagaagaccaagccctgttgagtgttcggcccctgcaggcacacgaacttaacgattttcatggagtggccccccttcatttgcctcatatctgttccatttgcgacaagaaagtgtttgaccttaaagattgggaattgcacgtcaaaggaaagctgcacgcacagaaatgtcttgtcttcagtgagaacgccggcatccggtgtattctggggtcagccgagggcaccctttgcgcatcccctaatagcaccgctgtgtataatccggccgggaacgaagactacgcgtctaacttagggaccagctatgtgccaattcccgctagaagcttcactcaatcttcacctacattccccttggcgagtgtgggaacaacatttgctcaacgaaaaggtgccgggagggtcgttcacatctgcaatctacctgaagggtcttgcaccgaaaatgacgttataaatctcggcctgccattcggaaaagtcacgaactacattctgatgaaaagtaccaatcaggcttttctggaaatggcctacaccgaggcagcacaagcgatggtccaatattatcaggagaagagcgctgtgatcaacggggagaaactcctgattcggatgagtaagcgctataaagagctacagctgaagaaacccggcaaggcagtcgccgcaattattcaggacatacacagtcagagagaacgcgacatgtttcgagaggctgatcgctacgggcccgagcgaccgagaagccgaagtcccgtgagccggagtctgtctcccagatcccacacaccatccttcacatcatgcagttcatctcactccccacctgggcccagccgggccgattggggaaacgggcgggatagctgggagcactcaccctacgcccgacgggaggaagagcgcgatccagccccttggcgggacaatggggacgataaaagagatcgaatggatccatgggcacatgacagaaaacatcaccctcgtcaattagacaaagccgaactggatgaacgccccgaaggggggcgcccccatcgagagaagtaccctagaagcggcagtccaaatctccctcactccgtgtccagttataaaagccgcgaagatgggtattatcggaaagaacccaaagctaagtgggacaaatacctgaagcagcagcaggatgcccccggacgcagtcgtcggaaggatgaggcgcgactacgagaaagccgccatcctcacccagatgattctggaaaggaggacgggttaggcccaaaggtgacacgggctccagagggcgcaaaagccaagcagaacgaaaagaacaaaactaaacgtactgacagagatcaggagggagccgacgacagaaaggagaacacgatggcagaaaatgaagccggaaaagaggagcaggagggaatggaggagtcccctcagtctgtgggcaggcaagaaaaagaggcggaattcagcgatcccgagaacacaaggacaaagaaagagcaagattgggaatcagaaagtgaggccgagggagagagctggtaccccacaaacatggaggagttagtaaccgtcgatgaggtaggtgaagaagaagactttattgtggaaccagacatccctgaattggaggagatcgtgccaatcgatcagaaagataagatctgcccagagacttgtctctgtgttactactacactcgatctcgacttggcccaggatttccctaaggagggagtcaaggccgtgggtaacggcgccgcggaaatttccctgaaatccccccgggagttgccttcagccagtacttcatgcccttcagatatggatgtggaaatgcccggccttaatctagatgctgagcgaaagcctgcagagtccgagacaggactgtctctggaggacagcgattgctacgagaaagaggccaagggcgtggagtcatccgatgttcaccctgcacccaccgtgcagcagatgagcagtcctaaacccgctgaagagcgagcccgacaaccgagccccttcgtagatgactgtaaaacacgtggcacccctgaggacggtgcttgtgaggggtctccactcgaggagaaggcctctcctccaatcgagactgacctgcagaaccaagcctgccaagaggtcctgactcccgaaaactcacggtatgttgagatgaaatcccttgaagttcgctctccagagtataccgaagtggaattgaaacaacctctgtctctcccaagctgggaaccagaagatgtcttctcagagctctcaatcccccttggagttgagttcgtcgtgccccggactggcttctattgcaagctgtgcggactgttctatacttcagaagagaccgctaaaatgagccactgcaggtcggccgtgcactatcggaacctccaaaaatacctgtctcagcttgctgaggaagggttaaaggagaccgagggggccgattccccgcgccccgaagactccggaattgtgcctcgtttcgaacgaaagaagttatag

SEQ ID NO: 203986 - DNA, 3378 bp, synthetic construct
  misc_feature 1..3378: note = Description of Artificial Sequence: Synthetic coding sequence
  source 1..3378: mol_type = other DNA
atggtgctggccgccgccatgagccaggacgccgaccccagcggcccggagcagcccgatcgtgttgcgtgcagcgtgcccggagccagagcttccccagctccatcaggacccagggggatgcagcagcctccgcctcccccacagccaccacctccaccacaagcaggattaccacagatcatacagaacgccgctaaactgctcgataaaaacccattcagcgtttccaatcccaacccgcttcttccgagcccggctagcctccagttggcacagctgcaagcccagcttactctccacaggctcaaacttgcccagactgcagtgactaataataccgctgcagctaccgtcctgaatcaagtgttatcaaaagttgccatgtctcagccgctgtttaatcagctgaggcacccttccgtgatcacagggccccatggtcatgcgggggttccccagcatgctgcggccatcccgtccacccgatttccatctaacgccatcgccttctcacccccatcacagacccgaggtcccggcccatccatgaatcttcccaaccagcctccctctgctatggtgatgcatcccttcaccggtgtaatgcctcagaccccaggtcaacctgccgtcatcctcggcatagggaaaactggacctgcccccgcaaccgctggtttttacgagtatgggaaagcatctagcggacagacctatggtcccgagacagacggacaacctggctttcttcccagcagcgccagcacaagtgggtctgttacctatgaggggcattactcacacactgggcaggacggccaggcggcctttagtaaggatttttacggccccaactcccaaggaagtcatgtggcatctgggtttcccgctgagcaggctggtggcctaaaatccgaggtcgggccattgctgcagggcaccaattcacagtgggagagcccacatggcttttccggccagagtaagcctgatcttacagctggaccaatgtggcccccccctcacaatcaaccatatgagttatacgatccggaggagcccacttcggacaggaccccaccctcattcggaggccgactcaataactccaaacaggggtttatcggagcagggagacgggcaaaagaagaccaggctttacttagcgtcagaccgctacaagcccatgagctcaacgactttcacggcgtagcccctctccacttgccacatatctgttctatctgtgacaagaaagtgttcgatctcaaagactgggaactccacgtgaagggaaagctccacgcacagaagtgtctggtattcagcgaaaatgccgggatacgctgtatcctgggtagcgcagagggaacactctgcgcgtcccccaactctacagcagtatacaacccggccggtaacgaagattacgcctcaaacctggggacaagttacgtcccaatcccggctcgctctttcactcagtcctcccctacttttcctctggcctccgtgggcaccactttcgcccaaaggaaaggggctggacgggttgtccatatctgtaacctgcctgaaggttcctgcactgaaaatgacgtgatcaacttgggattaccattcggtaaggtaaccaactacattctgatgaagagcactaaccaggcttttctggagatggcttacacagaggctgcgcaggccatggtccagtattaccaggagaagagcgccgtaattaacggtgagaaactactgataaggatgtcaaaacggtacaaagagttgcagctcaaaaaacccgggaaagcagtggctgccatcatccaggatatccactcacagagggagcgcgatatgttcagagaggcggaccgctacggccctgagagacctcgatcaaggtctcccgttagtcggtcattgtctccacggtcgcataccccaagttttacatcgtgcagcagttcccactcccctcctggcccttccagggcagattgggggaacgggcgggactcatgggagcactctccatatgcccggagagaagaagagagggacccggcaccttggagagataacggcgatgacaaacgcgacaggatggacccatgggcacatgaccggaaacaccatcccagacagcttgataaggccgagttggatgagagaccggagggaggaagacctcatagagagaagtacccaagatccgggtctccaaacctcccccactccgtctcctcctacaaaagtagagaggatgggtattatcgcaaagagccgaaagctaaatgggataaatacctcaagcagcagcaggacgcccctggccggtctaggcgcaaagatgaggctcgccttcgggaatcccggcaccctcatccagacgactctggaaaagaggacggactcggacctaaggtgacacgggctccagaaggtgccaaggcaaagcaaaatgaaaaaaacaagactaagaggaccgacagagaccaagagggggccgatgataggaaagaaaacaccatggccgaaaatgaagctgggaaagaggagcaggagggtatggaagaaagcccccaaagtgtcggacggcaggaaaaggaggctgagttctccgatcccgaaaataccaggacaaagaaagagcaagattgggagtccgagtccgaggctgagggggaaagctggtaccccacgaatatggaggaactggtgaccgttgacgaggtcggcgaagaggaagactttatcgtcgagccagacatccccgagctggaggagattgtacccatcgaccaaaaggacaaaatttgccccgagacctgcctctgtgtcacaaccacactagaccttgatttagctcaggacttcccgaaagaaggcgtgaaagccgtaggtaatggcgccgctgagatttctctgaagtctcccagggagcttcctagtgcttccacctcctgtccctccgacatggatgtggagatgcccggcctaaatttggacgctgaacgtaagccagccgagtccgagaccggcctgtcccttgaggacagcgattgttatgagaaggaggcgaaaggagtcgagtccagcgatgtgcatcccgctccaaccgtacagcagatgtcaagtcccaagcctgccgaggaaagggctagacagcctagcccgttcgttgatgactgtaaaacacgcggcaccccagaagacggagcttgcgagggtagtccactggaggaaaaggctagtccgcccatcgaaaccgacctgcagaatcaagcctgtcaaggttcagacagtgatacccgcctggtttcaggttacagcctcacccctctcgagaaaactcccggtacatggaaatag

SEQ ID NO: 203987 - DNA, 1263 bp, synthetic construct
  misc_feature 1..1263: note = Description of Artificial Sequence: Synthetic coding sequence
  source 1..1263: mol_type = other DNA
atggccaccagcctgggcagcaacacctacaaccggcagaactgggaagatgccgattttccaatcctatgccagacttgcctgggggagaacccgtatatccgcatgaccaaggagaagtatgggaaagagtgtaaaatctgcgccaggccgttcacagtctttaggtggtgccccggggtgcgcatgagattcaaaaagaccgaggtctgccagacatgcagtaagcttaagaacgtctgtcagacatgcctgctggatctggagtatggactgccaatacaggttagagatgccggcctgtcttttaaggacgacatgccgaaaagcgatgttaacaaggagtactacacgcagaacatggaacgcgaaatttcgaattcagacggcactaggccggtggggatgctcggaaaagcaacttcaacctcagacatgctgctgaaactagcaagaactacaccatattataagcggaaccgaccccatatctgctcgttttgggtcaagggggaatgtaagcggggcgaagaatgtccatacagacatgagaagcccaccgatcccgacgaccccctagccgatcaaaacataaaggataggtactacggcataaatgatcctgtcgcagacaaactgcttaagcgagcatccacgatgcccaggctcgatccccccgaggataagactatcacgactctctacgtgggcggtctcggagatacaattacagagactgatttacggaaccacttttatcagttcggcgagatcaggacaattaccgtggtccagcggcagcagtgcgcttttatccagtttgccacccgtcaggcggctgaagtcgctgccgaaaagtcatttaataaactcattgtgaacggcagaaggttgaatgtgaagtggggaagaagtcaggctgcacgaggcaaagaaaaggagaaagatggcacgactgattctggaattaagctggagccggtccccggactacctggggccctgcctcctccccccgcagcagaggaggaggcatccgcaaactacttcaacttgcccccctcaggtcccccagccgtggtaaacatcgcattgcctcccccgccaggcatcgcgccaccacccccccccggatttggtcctcacatgttccacccaatgggtcccccacctccatttatgcgggcccccggacccatacactacccctcccaggacccacagcggatgggagcacatgctggcaagcactctagtccctag

SEQ ID NO: 203988 - DNA, 1116 bp, synthetic construct
  misc_feature 1..1116: note = Description of Artificial Sequence: Synthetic coding sequence
  source 1..1116: mol_type = other DNA
atggccaccagcctgggcagcaacacctacaaccggcagaactgggaggatgccgacttcccaattctttgccagacctgcttgggggaaaatccctatatccgcatgacgaaggaaaaatacggattgcccatacaggtccgggatgctgggctgtccttcaaagatgatatgcccaagagcgatgtgaacaaggaatactatactcaaaacatggagcgtgagatttctaattctgatggcactcggccagtaggcatgttagggaaggctacatctacctctgacatgctcctcaaactggcccggacaaccccctattacaagagaaaccggccccatatttgctcattctgggtcaagggcgaatgcaagagaggcgaggagtgtccatacagacacgaaaaaccaacagaccctgatgatcccctggctgaccagaatatcaaagacagatactacggcataaacgatccagtggctgacaaactccttaagcgggcctccaccatgccaaggttggatcctcccgaagataagaccatcaccactctgtacgtagggggactcggtgacacgattacagagacagacctcaggaaccatttctaccaattcggggagattcggactatcaccgttgttcaaaggcagcagtgtgcttttatccagtttgccacgagacaggcagccgaagtggccgccgaaaagtcgtttaataagctgatcgtgaacggtcgacggctgaacgtgaagtggggcagaagtcaggccgcacgcggaaaggaaaaggagaaggatgggaccactgactctggcatcaagttggaaccagtaccaggactgccgggtgccttgccacctccccctgctgcggaggaggaagcttccgctaactactttaacttgccaccatctgggccacccgccgtcgtgaatattgccctgccacccccaccaggtattgcccccccaccacctccaggattcggcccccacatgtttcaccctatggggccacctcctcctttcatgcgtgctcccggtccaatccactatcctagtcaggacccccaacgcatgggtgcccacgccgggaaacattcttcgccctag

SEQ ID NO: 203989 - DNA, 1116 bp, synthetic construct
  misc_feature 1..1116: note = Description of Artificial Sequence: Synthetic coding sequence
  source 1..1116: mol_type = other DNA
atggccaccagcctgggcagcaacacctacaaccggcagaactgggaggacgccgacttccctattctatgccaaacctgcttaggagagaacccatacattagaatggaaagagagaaatctgggctgccaatccaggtcagggacgctggactgtcctttaaagatgatatgcctaagtcggacgtgaataaagagtattacactcagaacatggaaagagaaatcagcaattcagatggtactcgacctgtggggatgctggggaaggcaacttctacatcagatatgctcttaaaactcgcaaggactacaccttactacaagaggaatcgacctcacatatgctcattttgggtcaaaggcgaatgcaaaagaggagaagagtgtccttacaggcacgagaaaccgacggatccggacgatcctcttgctgaccaaaatatcaaggaccgctattacggaatcaacgacccggtggcagacaaactgctcaaaagggcctcaaccatgccgcggctggatcctccggaggacaagacaatcacgactctgtacgtcggagggctgggcgacaccatcaccgaaacggacctgaggaatcacttctaccaattcggcgaaattcgcactattacggtggtgcaaagacagcagtgtgctttcatccagttcgcgacaagacaggcagccgaggtggccgcagaaaaaagttttaataaacttatagttaacggtagaagactcaacgtcaagtggggacgtagtcaggccgctcgcggcaaagaaaaagagaaagatggcaccactgactcgggtatcaagttggaacctgttcctggattgcccggcgcgttgccgcctcccccagcggcggaggaggaagcctccgcaaactactttaaccttccacccagcggaccacctgccgtagtaaatattgccctgcctccaccacctgggattgctccgcccccacccccaggattcggaccacatatgtttcacccaatggggcctccaccaccatttatgagagccccaggaccaatccactaccctagtcaggacccacagcgaatgggcgcacatgcagggaagcactccagcccctag

SEQ ID NO: 203990 - DNA, 2532 bp, synthetic construct
  misc_feature 1..2532: note = Description of Artificial Sequence: Synthetic coding sequence
  source 1..2532: mol_type = other DNA
atgagcttccccccccacctgaaccggccccccatgggcatccccgctcttccacccgggatccctccaccgcagtttcctggatttcccccacccgtgccgcctggaaccccgatgatccccgttcccatgagtatcatggccccggcccccaccgtcctcgtaccaacagtgagcatggtaggcaagcacctaggtgcacggaaggaccacccgggtctgaaggcaaaggagaacgacgagaattgcggaccaaccactactgtgtttgtagggaatatcagtgagaaggccagcgatatgttgataagacagctgcttgcaaaatgcggacttgtgttgtcatggaagagggtgcaaggcgcgagcggcaaactgcaggcgtttgggttttgcgaatataaagagcccgaatccactcttagagccctgagattgctgcacgacctacagatcggcgaaaagaagttgttagtcaaggtcgatgctaaaactaaagcccagcttgacgaatggaaagccaagaaaaaggcctcaaacggaaatgcacgccctgaaactgtgaccaacgacgacgaagaggctctggacgaagagaccaaaaggcgagaccagatgattaagggcgctattgaggtacttatacgagagtatagctcagagctgaacgctccttcacaggagagcgattcccatccacggaagaagaagaaggaaaagaaggaagatattttccggcgtttcccggttgcgcccctgataccatatcctctgatcaccaaagaggacatcaatgcaatcgagatggaagaggataagagagatctgatcagccgcgagatatccaagttccgcgatactcataagaaactagaagaagaaaaaggcaaaaaggagaaagagagacaggaaatcgagaaagaaagacgggaacgtgagagggaacgtgagcgggagcgcgaacgacgcgagcgggaaagggagagggagcgtgagagggaaagagaaaaagaaaaggagcgcgaaagagagcgggaacgggaccgagatagggatcgcacgaaggagcgcgatagggaccgagacagggagagggaccgagatagagaccgcgagcgctccagcgataggaataaggatcgttcacgttcgcgtgagaaatcgcgcgatcgcgagcgggagagggagcgagagcgggaaagagagagagaacgcgagagggagagggagcgcgagagggagcgggaacgggaaagggaacgcgaaagagagcgggaaaaagacaaaaagcgtgatcgggaggaggatgaggaggacgcctacgaacgcagaaagttggaacgcaagcttcgagagaaggaagccgcatatcaggaacgcctgaaaaactgggagatacgcgaaagaaaaaaaactagagaatacgaaaaggaagctgagcgcgaagaggagagaagacgagaaatggcgaaagaggcaaaacgcctaaaagagttcttagaggattacgatgacgaccgtgacgaccctaagtactacaggggttctgctcttcaaaaaagactgagggatcgagaaaaagaaatggaagcggacgaacgtgatcggaaacgagaaaaggaggagttagaggagatacgccagcgtctcctggccgaggggcaccctgaccctgatgctgagctccagcgaatggagcaagaagccgagcggagacgtcagccacaaataaaacaagagcctgaatcagaggaagaagaggaagagaagcaggaaaaggaagaaaaacgggaagaacccatggaggaggaagaggaaccagagcagaaaccttgcctaaagcccactctgcggcccatatcttccgccccttcagtttcatctgcgagtggaaacgcgacaccgaatactcctggtgacgaatctccctgcggcatcattatcccccacgaaaacagtcccgatcagcaacagcctgaggagcaccgcccgaagattgggctctcgcttaagctcggagcctctaactccccaggacagcctaattcagtgaaacgcaaaaagctgcctgtcgattcagtgtttaataagtttgaagatgaggactccgacgacgtgcctcgtaaacgaaagctggttccccttgattacggcgaggatgacaaaaatgccacaaagggaactgtgaacaccgaggaaaaaagaaagcacattaagtccctgatagaaaaaatacctaccgcgaagcccgagctattcgcttaccctctagattggtccattgtggattctatcctgatggagaggagaattcgcccatggatcaacaaaaaaatcattgagtacatcggggaggaggaggccaccctcgtggattttgtttgctctaaagtaatggcccacagctctccccaatctatacttgacgatgtggctatggtactggacgaggaggcagaggtatttatcgtgaaaatgtggcggctcttaatctacgagaccgaagccaagaaaatcgggctcgtgaagtag

SEQ ID NO: 203991 - DNA, 384 bp, synthetic construct
  misc_feature 1..384: note = Description of Artificial Sequence: Synthetic coding sequence
  source 1..384: mol_type = other DNA
atgagcttccccccccacctgaaccggccccccatgggcatccccgcattgccccccggcataccacccccgcagttccccggcttccctcccccagtgccacccgggaccccaatgattccagtgcccatgtctattatggcccccgcgccaaccgtgctggtccccactgtctctatggtgggcaaacacttgggagctcggaaagaccatccaggtctgaaagccaaagaaaacgacgagaactgcggtcccactacaacagtgttcgtcgggaacatctcagaaaaggcctcagacatgctgatccgccaactgttagcaaagtgcggactggttttaagctggaagcgcgtgcagggtgctagcggaaagttgcagtag

SEQ ID NO: 203992 - DNA, 903 bp, synthetic construct
  misc_feature 1..903: note = Description of Artificial Sequence: Synthetic coding sequence
  source 1..903: mol_type = other DNA
atgagcttccccccccacctgaaccggccccccatgggcatccccgcccttccaccaggtattccacccccacagttcccaggtttcccaccgcccgttcctcctgggacacccatgatccctgtccctatgagtatcatggcacctgcacccaccgtattggtgcctaccgtgtctatggtcggaaaacaccttggtgctagaaaagaccaccccgggctgaaggccaaggagaatgacgaaaactgtgggccgaccactacggtgttcgtgggtaatatctcagaaaaagcctccgacatgctcatccggcaacttctcgccaaatgtggcttggtactttcttggaaacgcgttcaaggagcttccggcaagctgcaggcctttggcttctgcgagtacaaggaacctgagagtacactgagggctctccggttgctacatgacctccaaatcggagagaagaagctgttagtgaaagttgacgccaagaccaaggcccaactggacgagtggaaagctaagaaaaaagcatctaacgggaatgccagacccgagaccgtgacaaatgatgatgaggaagccctggacgaggagacgaagcgacgcgaccagatgatcaaaggtgctatagaagttctaatcagggaatactcttctgagcttaacgccccaagccaggagtccgacagccatcctaggaaaaaaaaaaaggagaaaaaagaagacatctttcgtcgctttcccgttgcacccctgatcccttaccccttgattactaaagaagatatcaacgcaatcgagatggaggaggataagcgagaccttatttcccgtgaaatttccaaatttcgggatacccacaaagtagtttttctgagttttcacctcatccctatttag

SEQ ID NO: 203993 - DNA, 885 bp, synthetic construct
  misc_feature 1..885: note = Description of Artificial Sequence: Synthetic coding sequence
  source 1..885: mol_type = other DNA
atgagcttccccccccacctgaaccggccccccatgggcatccccgccctgcctcctggcatcccacctccccaattccctggatttccaccgcctgtaccacctggaacacctatgatcccggtgcccatgagtatcatggcccccgcacctacggttctggttccaacggtgagcatggtcggcaagcatctcggagctcggaaagatcaccccgggctgaaggctaaggagaatgatgagaactgtggcccaactactaccgtgtttgtcggcaatatatccgagaaggcctccgatatgctaattaggcagctgctggcgaagtgcggcttggttctgtcttggaagagggtccagggcgcaagcggcaagctgcaggccttcggattctgtgagtacaaggagcctgagagcaccctgcgtgccttgaggctcctacatgacctgcagatcggggagaaaaaactgttggtcaaagtcgacgcaaaaacgaaagcccaactcgacgagtggaaagcaaaaaaaaaagccagcaacggtaacgcccgacccgaaacagtgacaaatgacgacgaggaggccttggatgaagagactaagaggagagaccagatgatcaagggggcgatcgaggtgctcataagggagtacagttccgagctgaatgccccctcccaggagtcggacagtcaccccagaaaaaagaagaaagaaaagaaggaagatatcttcagaagatttccggtggcccccctgattccctaccctctcattacgaaggaagacatcaacgcaattgaaatggaagaggacaagcgagacctgatttcaagagagatttcaaagtttcgcgacacccacaagagatcctacggcgattag

SEQ ID NO: 203994 - DNA, 2532 bp, synthetic construct
  misc_feature 1..2532: note = Description of Artificial Sequence: Synthetic coding sequence
  source 1..2532: mol_type = other DNA
atgagcttccccccccacctgaaccggccccccatgggcatccccgctctgccaccaggaattccacccccacagtttcctggttttccgccccctgtgcctccagggactcccatgatcccagttcccatgagtataatggccccagcacccacagtgctggtgccaaccgtttccatggtgggaaagcatctaggcgccagaaaggaccaccccggactaaaagccaaggagaatgatgagaactgtggccctaccacaaccgtcttcgttggtaatatttctgagaaggcttcagatatgctgatcagacagctgttagccaaatgtggcctcgtgctgagctggaagagagtccagggtgcctctggcaagctgcaggccttcggcttctgcgaatataaagagccagagtctacactgcgggctctacgactgctacacgacctccaaattggggaaaagaaactcctggtgaaggtggacgccaaaaccaaagcgcagctggacgaatggaaggccaagaagaaagcctctaatgggaacgccaggcctgaaaccgtgacgaacgatgacgaagaagccctggatgaggagaccaagagaagggaccagatgataaaaggagcaattgaagtgttaatccgggagtactcttccgaactcaacgcgccttcccaggaatctgacagccaccctagaaagaaaaagaaagaaaaaaaggaggatattttccggaggtttcccgtggctcctctgataccttaccctctgattacaaaagaagacataaacgcaatcgagatggaagaggacaagcgtgatctgatcagccgtgagattagtaaattccgtgacacccacaagaaactggaggaggagaaggggaaaaaggaaaaagagagacaggagatagaaaaggagcgcagggagagggaaagggaacgggaaagagagcgggaacgcagggaaagagagcgggagagagagagggaaagggagagagaaaaggagaaagagcgggagagagagcgcgagcgggatcgggaccgtgataggacgaaggaacgggatcgcgatagggatcgtgagcgtgatagggatcgcgacagagaacggtctagcgatagaaataaagaccggagccgcagtagggagaagtccagagatcgcgagcgggaacgtgaaagagagcgcgaaagagaaagggagagagagcgtgagagagagcgggagagagagcgcgagcgtgagcgggagagagaacgggaacgggaaaaggataagaagcgtgacagggaggaggatgaggaagatgcgtatgagagaaggaagcttgagcgaaaacttcgcgagaaggaggccgcatatcaagagcgcctaaaaaactgggagatccgcgaacgaaagaagacccgagagtacgagaaagaagctgaaagggaggaggaaaggcgcagagagatggcaaaagaggcaaaacgcctcaaagagtttctggaggactacgatgacgatcgagatgacccaaaatactacagaggaagcgccctgcaaaagcgccttcgcgatcgggagaaagagatggaagccgatgagcgggaccgcaaacgggagaaggaagagctggaagaaatccggcaacgcctactagctgagggccaccctgatccagatgcggaactccagcggatggaacaggaggcagagcggcggcggcaaccacagatcaagcaagagcctgagtcggaagaggaggaggaagagaaacaggagaaggaggaaaagcgggaagaaccaatggaggaggaggaagaaccggaacagaagccttgcctgaagcctacactgaggcccatttcttcagctccctcagttagctctgcttcaggaaacgctacaccaaatacacctggcgatgagtcgccatgtggcattattatcccacatgagaactcaccggaccagcagcagcctgaggagcaccgccctaaaattggcctttctctgaagctcggggcttccaattctcctggccagcccaatagcgtaaagcgaaaaaaactccctgtcgatagtgtcttcaataagttcgaggatgaggactccgacgacgtgccgaggaagcgaaagctggtcccactcgattacggagaagacgacaagaacgctacaaaaggtacggtgaacactgaagaaaagaggaagcacattaagtccctcatcgaaaagattcctacggctaagcctgagctttttgcctacccattggattggtccattgtagacagcattctgatggaacggcgcattagaccttggattaataaaaaaatcatcgaatacattggagaggaggaagctactctcgtcgacttcgtctgttcaaaggttatggcccactcctccccacagtctatcctggacgacgttgctatggtactcgatgaagaagccgaagtttttattgtgaagatgtggcgactgctgatatatgaaacagaggcgaagaagattggacttgtcaaatag

SEQ ID NO: 203995 - DNA, 732 bp, synthetic construct
  misc_feature 1..732: note = Description of Artificial Sequence: Synthetic coding sequence
  source 1..732: mol_type = other DNA
atgagcttccccccccacctgaaccggccccccatgggcatccccgccttgccccccgggatccccccaccacagtttcctgggtttcctccgccggtgccccccggcacacccatgattccggtgccaatgtctatcatggcacccgctcccacagtgctcgtgcctacagtttctatggtgggtaagcacctcggcgcccgaaaagatcacccaggactaaaagccaaagagaatgacgaaaattgtggacctacaaccacggtatttgttgggaacatttccgaaaaggccagtgacatgctgatcaggcagttgctcgccaagtgcggactcgttttgagttggaagcgtgttcagggcgcttccggtaagctgcaggcatttgggttttgcgagtacaaagagccagagtccaccttgcgtgctcttcgcctgctgcacgacctgcagattggagaaaagaaacttctcgtcaaagtcgacgcaaagactaaagcacaactggatgaatggaaggctaaaaagaaggcgtccaatggtaacgcccgccctgagaccgtgacaaatgacgatgaggaggccctagatgaagaaacaaagagaagggaccaaatgatcaaaggagctatagaagtcctgattcgggagtacagctccgagctgaatgccccatcccaggagtctgattctcatcctcgcaagaagaaaaaggagaagaaggaagattag

SEQ ID NO: 203996 - DNA, 885 bp, synthetic construct
  misc_feature 1..885: note = Description of Artificial Sequence: Synthetic coding sequence
  source 1..885: mol_type = other DNA
atgagcttccccccccacctgaaccggccccccatgggcatccccgcactgcccccagggatccctccccctcagtttcctggcttccctccaccagttccacctggcacacccatgattccggtgcctatgtcaataatggcccccgcaccaaccgtgctcgttcccactgttagcatggtgggaaaacatctgggcgcacgcaaagaccacccaggcttgaaggccaaggagaacgatgagaattgcgggcctaccacgactgtattcgtcggaaatatttccgaaaaggcatcagacatgctgatcaggcagctcctagccaagtgtggattggtactgagttggaaaagggtgcagggcgcttccggaaagttgcaggcgttcggcttttgtgaatataaggaacccgaaagcacgctccgggccctgagacttctgcacgacttacagataggagaaaagaaactcctggtaaaagtagacgctaaaaccaaggcccagctggacgaatggaaagctaagaagaaggccagcaacggtaacgctcgacccgaaactgtgactaatgatgatgaggaggccctggatgaagaaacaaaacggagagatcaaatgattaagggcgcaatcgaggtcctgatccgggaatactcaagtgagctgaacgcccctagtcaggagtctgatagccaccccaggaagaaaaagaaggagaagaaggaggacatctttcgacgcttcccagttgccccactgattccataccctctcataaccaaagaggacattaatgccattgaaatggaggaggataagcgtgatcttatcagcagagagatttccaaatttcgggacacccataagcggtcttacggcgattag

SEQ ID NO: 203997 - DNA, 1350 bp, synthetic construct
  misc_feature 1..1350: note = Description of Artificial Sequence: Synthetic coding sequence
  source 1..1350: mol_type = other DNA
atgctgcccgccgccaccgccagcctgctgggccccctgctgaccgcttgcgcactcctgccattcgcacagggacagactccaaattataccaggcccgtctttctctgtggtggtgatgtgaaaggggaatctggatacgtggcttccgaggggttcccaaacttgtatccgccaaacaaagagtgcatttggactattacggttccagagggtcaaacagtgagcttgagcttccgggtgttcgacttagaacttcacccggcctgtagatatgatgccctggaggtgtttgcgggctccggcacctctggtcagcggctgggaagattctgtggcacattccggccagcgcctcttgtggcaccaggtaaccaagttaccctaaggatgactactgatgaaggaacaggtggcagaggctttctcctctggtacagcggaagagctacatccgggactgagcaccagttttgcggcggacgattagagaaggcacaggggactctaaccacacctaactggcccgagtctgattatcccccgggaattagttgttcctggcacatcattgctcctccagaccaggtaatcgcactcacgtttgaaaagtttgacctcgaacccgatacatattgcaggtacgattctgtgtcagtgtttaatggagctgtgagtgacgattcccgcaggcttggcaagttttgtggagacgccgtgccaggctccatctcttctgaaggcaacgagcttctggtacagttcgtgagcgacctgagcgtaaccgctgatggattctctgctagctacaagaccctgccccgtggtacagccaaggaaggccagggtcctgggccaaagaggggcaccgaacccaaggtcaagttgccccccaagtcccagcccccggaaaaaacagaggagtctcctagcgcacctgacgctccgacttgtcccaagcagtgtcggcgcacaggaactctgcaatccaatttctgcgcctcctctctcgttgttaccgcaactgtcaagagcatggtccgagagcctggagaagggctagctgttacggtctctctgataggcgcctacaagaccggagggctcgatctgccttcaccacctacaggggcgtccctaaaattttacgttccatgcaaacagtgtccccccatgaagaaaggggtttcatatttgctcatgggtcaggtggaggaaaataggggccccgtacttcctcctgagtccttcgttgtacttcatcgcccaaaccaggaccagatccttaccaacctgtccaaacgcaagtgtcctagccagccagtaagggcagccgcatctcaagattag

SEQ ID NO: 203998 - DNA, 1857 bp, synthetic construct
  misc_feature 1..1857: note = Description of Artificial Sequence: Synthetic coding sequence
  source 1..1857: mol_type = other DNA
atggccggcctgaccctgttcgtgggccggctgccccccagcgcccgttccgaacagcttgaggaacttttctctcaggtaggtcccgtgaaacagtgtttcgtggtaacagagaagggcagaaccgtggctgtggattgggcggtggccaaagacaagtataaggacactcagtcagtgtccgcaattggcgaggagaaaagtcatgaatcaaagcaccaggagtcagtgaagaaaaaagggcgggaggaggaagatatggaggaggaagaaaacgacgacgatgacgacgacgatgacgaggaggacggagtattcgacgacgaagacgaagaagaggagaatatcgagtcgaaggtgacaaagcccgtacagatccagaagcgcgcagtaaagagacctgcacctgcgaaatcaagcgaccactctgaagaagactccgatctcgaagaatccgacagcatagacgacggagaggagctcgcccagtccgacaccagcaccgaggagcaggaagataaagccgtgcaagtttctaacaaaaagaagaggaagctaccttcagacgtgaacgaaggcaaaacagtatttattaggaacctgtctttcgattctgaagaggaagagctgggagagctccttcagcagttcggggaacttaaatatgtcagaatcgtgctacacccggatacagaacatagtaagggatgcgcgtttgcccagttcatgactcaggaagcagctcaaaagtgtctgcttgccgcatctccagaaaatgaggccggcgggttaaagttggatggccggcagttaaaggtggacctggccgtgacgagggacgaggctgccaaactgcagactacaaaggtgaaaaaacccaccggcacccggaatctatatctggctcgcgaaggtttgattcgagccgggaccaaggcagctgagggcgtcagcgctgcggatatggcaaaacgggagcgctttgaactgttgaagcaccagaagttaaaggaccagaacatcttcgttagcaggactagattgtgcctccataacttgcccaaggccgtggacgataaacagcttcggaaacttttgttgtccgcaaccagtggggaaaagggcgtccgaattaaggagtgtagggttatgcgggacttgaaaggcgtgcacgggaatatgaagggacagtcactgggctatgcattcgcggagtttcaggaacacgagcatgcactgaaggccttaagattgattaataataatcctgaaatatttggcccccttaaacggcccatcgtcgagttctctctcgaagatcgccgcaagcttaagatgaaggaactgagaatccagcggagtctgcaaaaaatgcgttccaagcctgccactggcgagccacagaaaggccagcccgagccagcgaaagaccagcagcaaaaggctgctcagcatcataccgaagagcagtctaaagtgcctccagagcagaagcgaaaggctggctcaacctcctggaccggattccaaactaaagcagaggtagaacaggttgagctgcccgacggtaagaaacgacgtaaagtgctcgccctcccaagccacagggggcccaaaatccgcctgcgagataagggtaaggtgaaaccagtgcaccctaagaagcccaagccacagatcaaccagtggaaacaggaaaagcagcagctcagctccgagcaggtgtcccgaaaaaaagctaaaggtaataagacagagactagattcaatcagttggttgagcagtataagcagaaattgctgggcccctccaagggcgctcctcttgccaaacggtctaagtggttcgacagttag

SEQ ID NO: 203999 - DNA, 720 bp, synthetic construct
  misc_feature 1..720: note = Description of Artificial Sequence: Synthetic coding sequence
  source 1..720: mol_type = other DNA
atgctgctgcagcccgccccctgcgcccccagcgccggcttccccagacccctggccgcccctggggccatgcacggatcccaaaaagacacgacgttcacaaaaatttttgtaggcggattaccataccataccactgacgcctcacttcggaaatattttgaggggttcggggatatagaagaggctgtcgtgatcacggataggcaaacaggcaagtctaggggctatggttttgtcaccatggctgaccgggccgccgccgagcgggcctgcaaggatccaaaccctatcatcgatggccgaaaggccaacgttaacctggcttacctgggagccaagccccgcagtttacagactgggttcgccataggcgttcagcagctccatcccactctcatccagcgcacctatggtctgaccccacactacatttatcctcctgcaatcgtgcagccttctgttgttatccctgcggctcccgttccctcactgtcctctccctatatcgagtacaccccagcctcccctgcctacgcccagtatcctcctgctacttacgaccagtacccatacgcagcttccccggctacagctgcttcattcgtcggatactcttacccagcggccgttccccaggcgctgtctgcagctgctcctgccggaactacattcgttcagtaccaggcacctcagctgcaacccgacagaatgcaatag

SEQ ID NO: 204000 - DNA, 477 bp, synthetic construct
  misc_feature 1..477: note = Description of Artificial Sequence: Synthetic coding sequence
  source 1..477: mol_type = other DNA
atggccgaccgggccgccgccgagcgggcctgcaaggaccccaaccccattattgatggaaggaaagccaatgtcaacctggcttacttgggagcaaagccaagatcactgcagacgggttttgcaatcggtgtacaacaactgcatccgactctgatccagagaacctacggcctcacgcctcattacatataccctccagccattgtgcagccctctgtcgtgatacctgccgcaccagtccctagcttgagcagtccttacatcgagtacacacctgcctcacctgcgtatgcccagtacccccccgccacctacgatcagtatccctacgccgccagcccggcgacagccgcctcatttgtgggttacagttacccggctgccgtaccgcaggctttgagcgcagctgcccctgcgggcaccacgtttgtacagtatcaggcaccgcaattgcagccggaccgcatgcagtag

SEQ ID NO: 204001 - DNA, 366 bp, synthetic construct
  misc_feature 1..366: note = Description of Artificial Sequence: Synthetic coding sequence
  source 1..366: mol_type = other DNA
atgctgctgcagcccgccccctgcgcccccagcgccggcttcccccgaccactggcagctcctggggcaatgcacggcagccagaaagacaccaccttcactaaaatatttgtcggcgggttgccctaccacacgacagatgctagtctgcgcaagtacttcgagggctttggggacattgaagaagcggtggtgataacggatcgtcagactggaaaaagtagaggctatgggtttgtcaccatggcggaccgcgccgccgcagagagagcgtgcaaggatccaaacccaatcatcgacgggcggaaagcgaacgtgaacttagcctacctgggagctaaaccccgttcactgcagacgggatag

SEQ ID NO: 204002 - DNA, 1095 bp, synthetic construct
  misc_feature 1..1095: note = Description of Artificial Sequence: Synthetic coding sequence
  source 1..1095: mol_type = other DNA
atggtgaagctgttcatcggcaacctgccccgggaggccaccgagcaagaaattagaagtctgttcgagcagtatggtaaagtgttagaatgtgatatcatcaaaaactatgggttcgtgcacatcgaggataaaacggcagccgaagatgccattcgtaacctgcaccattataagctccatggggtgaatataaatgtcgaagcctctaaaaacaagagtaaaacttccacaaaactgcacgtcggcaacatctccccaacatgcactaataaagagctccgggcaaagttcgaagagtacggacccgtaattgaatgtgatattgtcaaagactatgcttttgtccacatggaacgtgcggaagacgccgtcgaggccatccgcggtctcgataacacagagttccagggaaaaaggatgcacgtgcaactgagcacttcacgattgaggacagcgcccgggatgggagatcagtctggatgttacagatgtggaaaggaaggtcattggtctaaagaatgccccatcgatcgatctggaagggtcgctgacctgaccgaacagtataacgagcaatatggagccgtcaggaccccctataccatgtcttacggtgacagtctttactacaataatgcatacggagcccttgatgcttattacaagcggtgccgggcagcgcggtcatacgaggctgtggcggccgccgctgcttctgtatataactatgcggaacagacgctgtcccagttaccgcaagtgcagaataccgcgatggccagccacctgacctccacctctttagacccgtacgacaggcacctgcttcctaccagcggggcagccgcaacggccgcggcagctgccgctgccgctgccgctgtgactgctgccagtacctcctactacggccgtgatcgatcacccttgcggagggctactgcccccgttccaactgtgggagaggggtacggctacggccatgagtcggaactctcccaagcttccgctgccgcgcgtaacagcctatatgacatggccagatacgagagggagcagtatgccgatagagcacggtacagcgccttctag

SEQ ID NO: 204003 - DNA, 1095 bp, synthetic construct
  misc_feature 1..1095: note = Description of Artificial Sequence: Synthetic coding sequence
  source 1..1095: mol_type = other DNA
atggtgaagctgttcatcggcaacctgccccgggaggccaccgagcaggaaattcgatccctatttgaacaatacggaaaggtgctggagtgcgatattatcaaaaactatggattcgtccatatagaagacaaaacagccgccgaggacgcaatcaggaacctgcatcattacaagctccatggagtgaatattaatgtagaagcctccaagaacaaatccaaaacgagcaccaagttacacgtgggtaatatttcaccaacttgcacgaataaagagctgagggcaaaatttgaggaatatggacctgtgatcgaatgtgatatagtgaaagattacgcttttgttcatatggaacgggctgaggatgctgtggaggcaataaggggcctggataacaccgaattccaaggcaagcgaatgcatgtacagctgagcactagcagactacgtacggcacctggaatgggtgatcagagtggatgttacaggtgcggtaaagaggggcactggagtaaggagtgcccaatcgaccgctccggccgtgtggctgacctgaccgagcagtataatgagcagtatggcgccgtcaggactccttataccatgtcctatggcgattcactgtattacaacaatgcatatggcgcactggatgcatattacaagcggtgtagagcagcccgatcctatgaggcagtcgctgcagcagctgcctctgtgtataattacgcggaacaaaccctctcccaactgcctcaggttcaaaacactgctatggcaagtcatttgacatccacgtctcttgatccgtatgatagacacttacttccaacctccggcgctgctgctaccgctgccgcggctgcggcagctgcagcagccgtcacggcagcgagcacttcttattacggccgggaccggagtcctctccgccgtgcaaccgcccccgtccctaccgtgggagaaggttatggctacgggcatgagtccgagctgtcccaggcctctgctgccgcccgcaacagtctgtatgacatggcaagatatgagcgggagcagtacgccgatcgggcacggtactccgccttttag

SEQ ID NO: 204004 - DNA, 1095 bp, synthetic construct
  misc_feature 1..1095: note = Description of Artificial Sequence: Synthetic coding sequence
  source 1..1095: mol_type = other DNA
atggtgaagctgttcatcggcaacctgccccgggaggccaccgagcaggagattcgcagtttatttgagcagtatggaaaagtgctagagtgcgacatcatcaaaaattacgggttcgtgcacatcgaggacaagaccgccgccgaggacgcgatccgaaatctgcatcattataaactccatggcgtgaacatcaacgttgaggcctccaaaaataagtccaaaacatctacaaaactgcatgttggcaatataagccctacttgcaccaataaagaactgcgagccaagtttgaggaatatggacccgtgattgagtgcgatattgtcaaagactatgcgttcgtgcatatggagcgggctgaagatgccgtggaggctatcaggggcctggacaacaccgaattccaagggaagaggatgcacgtccagttatctacctccagactgcgcacagccccagggatgggcgatcagtccggatgttacagatgtggtaaggaaggtcactggtcaaaggagtgtccaattgacaggagtggaagggtagccgacttaaccgaacagtataatgagcagtatggcgccgtaagaaccccatacacaatgtcctacggggattctctgtattataataatgcttacggtgcactcgacgcttattacaagaggtgtagggctgcccgttcatacgaggccgtggctgcggccgcagcttccgtctacaattacgctgagcaaacgttatctcagttgccccaggtccaaaatacggccatggcgagccacttaacatcgacctctctcgacccgtacgacagacatcttctgccgacctctggcgcggctgccaccgctgccgccgccgcggcagccgctgctgcggtgactgctgcgtctacctcttactacggacgagaccgttcccccctgcgccgggcgaccgcaccagtccctacagtgggtgaagggtacggctacgggcacgagagcgaactcagccaggcaagcgccgctgcccgaaattcactgtatgacatggcccggtatgagagggaacagtacgccgacagggcccggtattcagctttttag

SEQ ID NO: 204005 - DNA, 534 bp, synthetic construct
  misc_feature 1..534: note = Description of Artificial Sequence: Synthetic coding sequence
  source 1..534: mol_type = other DNA
atggtgaagctgttcatcggcaacctgccccgggaggccaccgagcaggaaatccgatctctgttcgaacaatatgggaaggttctagagtgtgacatcatcaagaattacggctttgtgcatatagaggataaaactgccgccgaagacgccattaggaacctccatcactacaaactccacggggtgaacattaacgtggaagccagcaagaataagagcaaaaccagcacgaaactgcacgtcgggaatatttccccaacctgcaccaacaaggagctgagggccaagtttgaagagtatgggccagtcatcgaatgtgatatcgtaaaggactatgcatttgtgcatatggagagggctgaggacgcagtcgaggccatccgcggcctggataacactgaattccagggggaaccaccttcactaggccggggactcaatactcgcttatgcgctgaaaatgggtggatctccaaacgccgaggcttagtcaaaataaccgctgtcgggtggcttgtgatgaagaagtag

SEQ ID NO: 204006 - DNA, 534 bp, synthetic construct
  misc_feature 1..534: note = Description of Artificial Sequence: Synthetic coding sequence
  source 1..534: mol_type = other DNA
atggtgaagctgttcatcggcaacctgccccgggaggccaccgagcaggagattcggagcctcttcgagcagtatgggaaagttctggaatgtgatattattaagaactacggctttgtccatatcgaggacaaaaccgccgctgaagatgccattaggaatctgcatcattataaactccacggagtgaacatcaatgtggaggcttccaagaataagtccaaaactagcactaaactgcacgtgggcaatattagcccaacatgtaccaataaagaactgcgcgctaaatttgaggaatatggcccagtcatcgaatgtgacatcgtgaaagattatgcctttgtgcatatggaacgagccgaagatgctgttgaggctattcgcgggctggacaacacggagtttcagggtgagcctccatctttaggaagagggctgaataccagactgtgtgctgagaacggatggatctctaaaaggcgggggttggtgaaaataacagccgttggatggttggtgatgaagaaatag

SEQ ID NO: 204007 - DNA, 522 bp, synthetic construct
  misc_feature 1..522: note = Description of Artificial Sequence: Synthetic coding sequence
  source 1..522: mol_type = other DNA
atggtgaagctgttcatcggcaacctgccccgggaggccaccgagcaggagatcaggagcctttttgagcagtatggtaaagtgctggagtgcgacatcattaagaactatggatttgtgcatatagaggataaaacagctgcagaggatgctatcaggaatctgcaccattataaacttcatggggtaaacatcaatgtggaagcttccaagaataagtccaaaacaagtacaaaactccacgtgggtaacatttcacctacctgcactaataaggagctccgcgctaagtttgaagaatacggcccagtgatcgaatgcgatatcgttaaggattatgccttcgtgcacatggaacgtgctgaggacgcggtggaagccatccgggggctggacaacaccgaatttcaagggaaaataacacctgtcaccgaaggctactgctgctgcaataagggccacacatacatattcaagaactgcaacctgatcctggaatccagaaagagccggcgctgttag

SEQ ID NO: 204008 - DNA, 432 bp, synthetic construct
  misc_feature 1..432: note = Description of Artificial Sequence: Synthetic coding sequence
  source 1..432: mol_type = other DNA
atggtgaagctgttcatcggcaacctgccccgggaggccaccgagcaggagatccgatcactatttgagcagtacggcaaagtgttggaatgtgacatcatcaagaactacggattcgttcacattgaggataagactgctgcggaggacgcaatcaggaatctccatcattacaagctccacggcgtgaacattaatgtggaggcaagcaaaaacaaaagtaaaacctccacgaaattgcacgtcggcaatattagtcccacatgtactaataaagaattgagagccaagtttgaagagtacggacctgtgattgagtgtgacatcgttaaagattatgctttcgtgcacatggagcgcgcagaggacgctgtagaggcaatacgcggactcgataacactgaatttcagggggggatgtgcgttgggtag

SEQ ID NO: 204009 - DNA, 1443 bp, synthetic construct
  misc_feature 1..1443: note = Description of Artificial Sequence: Synthetic coding sequence
  source 1..1443: mol_type = other DNA
atggccggcgccggccccgcccccggcctgcccggcgccggcggccccgtagtgccaggccccggggccggcattcccgggaagagcggggaagaacgcctgaaagagatggaggcggagatggctttattcgagcaagaggtcttaggcgccccagtcccagggattcccaccgcggttccagccgttcctaccgttcctacagtccctacggtggaggccatgcaggtacccgcagcacccgttatcagaccaataatcgctacaaatacctaccaacaggtgcagcagacgttggaggctagagccgcggccgcagcaactgtggtaccgccaatggtgggcggccctcctttcgtggggccggtaggattcggtccaggcgaccgatcccacttagatagccctgaagctcgagaggctatgtttctccggcgcgcggccgtggcgccacagcgtgcccctatcctgcgtccagctttcgtcccccacgttttacagagagccgactccgccttgtcttcagcagccgcaggccccagaccgatggcccttcggccccctcatcaggccctggtgggacctccgcttccaggacctcctggtccacctatgatgctcccccctatggcccgtgcacccgggcctcccttggggagcatggccgccctgcgcccaccattagaagagccagctgcaccaagagaacttggactcggccttggcctgggtctgaaggagaaagaagaagctgttgttgccgccgccgccgggctcgaggaggcctccgctgccgtcgctgtcggggcaggtggcgccccggccggaccagctgtgattggcccaagtctgcctctggccctcgctatgcccctgccagagcccgagccactgccgttgccgctcgaagtggttcgaggcttgctccccccactcaggatccccgaactgctgtctctgagaccacggcctcgaccaccaagacccgagccgcctcctggcctcatggccctagaggtgccagaaccactaggggaagacaagaaaaagggtaaacccgagaaacttaaaagatgcatacgcactgccgccggctctagttgggaagatcctagcctcctggagtgggatgcagacgatttcagaatcttttgcggggatttaggaaacgaggtgaacgatgatatcttggctagggctttttcgagattcccgtcattcctgaaggccaaggtcatccgggataagaggactggtaaaacaaaaggctatgggtttgtgagcttcaaggaccctagcgactatgttcgggccatgagggagatgaatggaaagtacgtggggtccaggccaatcaaactgagaaaatcaatgtggaaggacaggaacttggatgtggtgagaaaaaagcagaaagagaaaaaaaaactcggtcttaggtag

SEQ ID NO: 204010 - DNA, 1356 bp, synthetic construct
  misc_feature 1..1356: note = Description of Artificial Sequence: Synthetic coding sequence
  source 1..1356: mol_type = other DNA
atggccggcgccggccccgcccccggcctgcccggcgccggcggcccagttgttccagggcctggcgctggcattccaggaaaatctggggaggagcggctgaaagaaatggaggctgagatggctcttttcgagcaggaggtgctgggcgcccctgtacccggaatacccactgctgtcccagctgtacctactgtgccaacggtgccaactgtggaggccatgcaggttcctgccgcccccgtgattagacctatcatcgcaacaaatacttaccagcaagtccagcagacgcttgaagctcgggcggcagccgctgcaactgtggtgccacctatggtgggaggacctccattcgttggacccgtggggttcggccccggcgaccgatctcatcttgactccccagaagcacgcgaagcaatgtttttgcgacgcgcagcagctgggccacgccctatggccctgaggcccccccaccaagcccttgtaggccctcccttgcctgggccacctggtcctcccatgatgctgccgccaatggctagagcccctggacctccacttggatccatggcagcgctcagacctcccctcgaggaacccgccgcgccaagagaactggggctgggcctcggtctgggactcaaggagaaggaagaggccgtggtggcagccgccgcggggctcgaagaagcctctgcggcagtggctgtgggagccggaggagcccctgcaggcccggccgtgataggtccttcattacccctcgctctcgcaatgcccctgcccgaacctgaacctctgcccttgcctttggaggtcgtccgagggctgctgccgcccctgcggattcctgagctgctgtctcttcgacccaggcctcgacctcctcggcctgaacctccccccgggttgatggcgctggaagttcccgaacctctgggcgaggacaagaagaaagggaagcccgagaaactgaaaagatgtatacgcaccgctgcgggatcttcttgggaagacccaagcttgttggagtgggatgccgatgatttcagaatattttgcggcgatttaggaaatgaagtgaacgacgacatcctagcccgggctttctctcggtttccaagtttccttaaagcaaaagtcatacgcgataaaaggaccggcaagaccaaaggatacggcttcgtaagcttcaaggaccctagcgattacgtgcgggccatgagagagatgaatggtaaatatgtgggaagtcggcctatcaagctaagaaaaagtatgtggaaggaccggaatttagacgtggtccgaaagaagcagaaggaaaagaaaaagctgggcctgagatag

SEQ ID NO: 204011 - DNA, 801 bp, synthetic construct
  misc_feature 1..801: note = Description of Artificial Sequence: Synthetic coding sequence
  source 1..801: mol_type = other DNA
atgggcgccgccgccgccgaggccgaccggaccctgttcgtgggcaatctggaaactaaagtgacagaggaactcctattcgagttgtttcatcaggccgggccagtgatcaaggtgaaaattcccaaagacaaggacggcaagcccaaacagtttgccttcgtcaacttcaagcacgaggtgtctgtgccctacgccatgaacctgttgaacggcatcaaactgtacgggagacccatcaaaatccagtttagatcagggtctagccacgctccgcaggacgtttcattaagttaccctcagcaccatgtaggtaatagtagcccaactagcacctcacctagccgctacgagaggaccatggataacatgacttcgtccgcccagattatccagagaagcttcagtagccctgagaattttcagcgacaggccgtcatgaatagtgcactgcggcagatgagctacggaggcaaatttggaagctccccactggatcagtctgggttctccccgtcagtgcagagtcatagccactcttttaaccaatcctcatctagtcagtggcggcagggcactccctcttcgcagcgcaaagtgaggatgaactcctacccatatttggctgatcggcactactcccgagagcagcgctataccgatcacggatccgaccaccactataggggaaagagagatgacttcttctatgaggacagaaaccacgacgactggtcacatgattacgacaacaggcgcgattctagtcgggatgggaagtggaggagtagccggcattag

SEQ ID NO: 204012 - DNA, 525 bp, synthetic construct
  misc_feature 1..525: note = Description of Artificial Sequence: Synthetic coding sequence
  source 1..525: mol_type = other DNA
atggccgacgtgctggacctgcacgaggccggcggcgaggacttcgccatggacgaggacggcgacgaatcaatccacaaactaaaagaaaaggccaagaagcggaaagggcgaggatttggatctgaggaagggagccgcgcccggatgagagaagattatgatagcgtggagcaggatggagatgaacctggcccccaacggtcggttgaaggctggatcttatttgtaacaggcgttcatgaagaagctacggaggaagacatccatgataagtttgccgagtacggcgagatcaaaaatattcacctcaacctagatcggagaaccgggtatcttaaaggttatacattggttgaatatgagacctacaaagaagcccaggccgcaatggaagggctgaacggacaggatctgatggggcagcctatctcggtggattggtgcttcgtgagggggccaccgaagggaaaacggcggggtggcaggaggcgctcccgttccccggatcgcaggcggcggtag

SEQ ID NO: 204013 - DNA, 522 bp, synthetic construct
  misc_feature 1..522: note = Description of Artificial Sequence: Synthetic coding sequence
  source 1..522: mol_type = other DNA
atggccgacgtgctggacctgcacgaggccggcggcgaggacttcgccatggacgaggacggtgatgaatcgattcacaaactgaaagaaaaagcaaagaagcggaagggaagaggtttcggctctgagggctctcgggccagaatgcgggaggactacgacagcgtagagcaggacggggatgaaccagggccacagcggagtgttgaaggctggatattgttcgtcaccggcgtgcatgaggaggcgaccgaggaggatatccacgataagtttgccgaatacggtgagatcaagaatatacatctcaacctagacaggcgcactggttacctgaaggggtataccctggtggaatacgagacgtacaaggaagcccaggctgccatggagggacttaacgggcaggacctgatggggcagcctatctcagtcgattggtgtttcgtgagagggcctcccaagggcaagagaaggggcggtaggcgtaggagccgctctccagatcgccggagacggtag

SEQ ID NO: 204014 - DNA, 1179 bp, synthetic construct
  misc_feature 1..1179: note = Description of Artificial Sequence: Synthetic coding sequence
  source 1..1179: mol_type = other DNA
atggtggaggccgaccggcccggcaagctgttcatcggcggcctgaatctggagactgacgaaaaggcactcgaggccgagttcgggaaatatgggaggattgtggaggtgctcttaatgaaagatcgtgagaccaacaagtcgcgcggattcgcgttcgtcacattcgaatcacccgcagatgccaaggccgctgcccgtgatatgaacggcaaaagcttagacggcaaagccattaaggtcgctcaggctactaaacccgccttcgagagttctcgccgtggcccacccccacccagaagtcgtggtaggcctcggttcctcagagggacccgcggcggcggcgggggaccacggcggtccccgagtcgtggaggtcccgacgatgatgggggatacacggccgatttcgacctgcggccatccagggctcctatgcctatgaaacgcgggcctcccccacgacgtgttggcccccccccaaaaagggcggccccaagcggaccagcgagatcatcgggggggggaatgagaggaagagccctcgctgtcagaggacgtgatggatactcaggcccaccaagacgggagccactccctcctagaagggatccctacttaggccctcgggatgaggggtacagcagtcgcgacggatatagtagccgcgattatcgcgaacccagaggctttgccccaagccccggagagtacacccaccgcgactacgggcattccagtgttcgcgatgattgcccactgcgcggttattccgaccgcgacgggtatggagggagagaccgcgactacggcgaccacctcagtagagggtcccaccgcgaaccatttgagagctatggcgagctgcgcggggcagccccaggacgggggacaccacccagttacggtggtgggggccgatacgaggaatatcgtgggtactcccctgatgcctattctggtggccgggactcctactcgtcttcatacggacggtccgataggtactcacgcggccgccacagagtcggccggcctgaccggggcctgagcctgtccatggaacgaggctgccccccacagcgggatagctactcgcgatctggatgcagggttccccgtggaggggggcgcttaggcgggagactggaacgggggggcggacgctcgcggtactag

SEQ ID NO: 204015 - DNA, 1491 bp, synthetic construct
  misc_feature 1..1491: note = Description of Artificial Sequence: Synthetic coding sequence
  source 1..1491: mol_type = other DNA
atggtggaggccgaccaccccggcaagctgttcatcggcggcctgaaccgggagaccaacgagaaaatgctgaaagccgtattcggcaagcacggacctatatccgaagtcctccttatcaaagacaggaccagtaaaagccgaggattcgccttcatcacctttgaaaatcctgcagacgccaaaaatgccgccaaagatatgaacgggaaaagcctacacggcaaggcgattaaggtggaacaagcaaaaaagcccagcttccagagcggcgggcgcaggaggccacccgctagtagtagaaacaggagcccctccgggtccctacggtcagcgaggggctcccgtggagggaccaggggatggctgccctcacacgaaggccatctcgatgatggcgggtatacacctgacttgaaaatgtcttactcaaggggtctcatccccgtgaaacgcggcccttcttcccggtccggaggtcctcctccaaagaagtctgccccaagcgcggtggcccgctcaaattcatggatgggctctcagggtcccatgagccagcgcagagagaactacggcgtgccccccagaagggcaacgatctccagttggcgcaatgacaggatgtctaccaggcacgatggatacgctacaaatgacggaaatcacccaagttgccaggagaccagagactatgctcctccctcaagaggctatgcctatagggataacggccactcaaatagagacgaacacagttcacggggttaccgcaaccacagaagtagcagggagactcgggactatgcaccacccagtcggggtcacgcctatcgggattatgggcattctcggcgagacgaatcatacagtagaggttaccggaacagacgttcttctcgcgagaccagggagtacgctcctcccagtcggggacacgggtaccgagactacggacacagtcgccgacatgagtcttattcaagaggataccgcaaccatcccagctcgagagaaactagggattacgcacccccccaccgtgattacgcctacagagactatgggcactcctcatgggacgaacactcctcgagagggtactcctatcacgacggatacggcgaggccctgggcagagatcattctgaacatctgtctggttctagctatcgggacgctctacagcgctatggaacatcccatggagctcccccggctcggggccctcgtatgtcttacggcggctccacgtgtcacgcctactctaatacccgcgatcgctacggccgatcctgggaatcatatagctcttgcggcgattttcactattgcgatcgcgagcatgtctgtaggaaggatcaaaggaatccaccgagcttgggaagagtgctgccagacccccgagaggcttgcggcagttcgtcttacgtggcctccatagttgatgggggagagtcgcgctccgagaagggggacagctcaagatattag

SEQ ID NO: 204016 - DNA, 1491 bp, synthetic construct
  misc_feature 1..1491: note = Description of Artificial Sequence: Synthetic coding sequence
  source 1..1491: mol_type = other DNA
atggtggaggccgaccaccccggcaagctgttcatcggcggcctgaatagagagacaaacgagaaaatgttaaaggccgttttcggaaagcacggacccatctctgaggtgctgttgataaaggaccgcaccagcaaatcgagaggatttgcttttattaccttcgagaatcccgccgatgcaaagaatgcagcaaaagacatgaatggcaagagtctgcacgggaaggctatcaaggtcgagcaagcaaagaagccctcctttcagtctggcggccgtcgtcgccctcccgcctcgtcccgcaacaggagtccttctggctcgcttaggagtgctaggggttctagaggcggtactcgaggctggctgccaagccacgaaggacacctagacgatggaggttacacacctgaccttaaaatgtcctattctcgcggattgataccggttaagagaggccctagcagccgatccggggggcccccacccaaaaagtccgccccctccgccgtggcacgctctaactcatggatgggtagccagggaccgatgtctcagcgccgtgaaaattacggagtgcctccacgcagagctacaatctctagttggcggaacgaccggatgagcacaaggcatgatggctatgccactaatgacggaaatcatcctagctgccaagagacacgagactatgcgccgccatcccggggctatgcctacagggacaacggccattccaaccgcgatgagcactcctcacgcggctatcgcaatcaccggagtagtagggaaacacgtgattatgccccaccctctagaggacatgcctatcgcgactacggacatagtagacgggacgaaagttatagtcgggggtaccgtaatagacgctccagtagagagacacgagagtacgcacccccctccaggggccacggatatcgggattatgggcacagccgccgccacgagtcctatagccgcgggtatagaaaccaccctagttcgagggaaacaagagactacgctcctccgcatagagactatgcataccgggattacggccactctagctgggacgagcattcgtctaggggatattcctaccacgacggctacggtgaggcactcggccgtgaccactccgagcacctgagcgggtcctcatatcgcgatgctctccagcgctacgggacctctcacggtgccccaccagcccgggggccaaggatgtcatacgggggcagtacgtgccatgcttacagtaataccagagaccggtacgggcgctcgtgggagagttacagttcatgcggcgacttccattactgtgaccgagaacacgtttgcagaaaggaccagagaaatcccccatctctcggccgagttctccctgatcctagagaagcatgtggcagtagcagctacgttgcgtctatcgtagacggcggcgaatcccggtctgaaaaaggtgattcgtctaggtactag

SEQ ID NO: 204017 - DNA, 870 bp, synthetic construct
  misc_feature 1..870: note = Description of Artificial Sequence: Synthetic coding sequence
  source 1..870: mol_type = other DNA
atgagcacccggcacgacggctacgccaccaacgacggcaaccacccttcttgtcaggaaacccgcgattatgcgcccccctcccggggatacgcttatcgcgacaacgggcatagcaatcgggacgaacactcaagtagagggtacagaaatcatcgaagtagtagagaaacgagagactatgccccaccttcacgagggcacgcgtatcgcgactacggccattctcgtcgggacgagagttactcaagaggttataggaaccgcagaagctcgagggaaacccgggaatatgcccccccctccagagggcacggctaccgggactacgggcactcacgaaggcatgagtcctatagccgggggtatcgcaaccacccttcaagtcgggaaactcgcgattacgctccccctcaccgcgactacgcatacagagactacggccactccagctgggacgaacattctagccgaggttactcctaccatgatggttacggggaggctctgggcagggaccattcagagcatctctctggatcctcttacagagacgctttgcagaggtacggtacaagtcacggtgctccacccgccagaggccccagaatgtcatacggaggtagcacttgtcacgcctatagtaataccagagatcggtacggccggtcctgggaatcatattccagttgcggggactttcactactgcgatcgtgagcatgtgtgccgcaaagaccagagaaatcctccgagccttggacgggtgttaccggaccctcgcgaggcctgcggcagctcatcttatgtcgccagcatcgtagacggaggagagtccagatctgaaaagggtgacagctcaaggtactag

SEQ ID NO: 204018 - DNA, 1266 bp, synthetic construct
  misc_feature 1..1266: note = Description of Artificial Sequence: Synthetic coding sequence
  source 1..1266: mol_type = other DNA
atgggcaagcggctggaccagccccagatgtacccccagtacacctactattatccgcattatctgcaaacaaagcagtcttatgccccggctccacatccaatggctccaccctcaccctctacaaattcttcaagcaataactccagcaacaattcgtcgggggagcaattgtccaagaccaacctgtacattcgaggactccctccgggaactactgatcaggatttaattaagctttgccaaccttacgggaagatcgttagtacgaaagctatccttgataaaaataccaatcaatgcaaaggctatgggtttgtggactttgattcaccggctgctgcgcagaaggccgtggcatctctgaaagccaatggagtccaggctcagatggcaaagcagcaggagcaggaccccacgaatctctacatttccaatctgccaatctctatggacgagcaggaactggaaaacatgttgaaaccattcggccatgttatttccactcgcatcctccgagatgctaatggcgtgagccggggcgtaggattcgcacggatggaatctaccgaaaaatgcgaagttgtgattcagcactttaacggcaagtacctcaaaacaccacccggtatacctgcccccagcgagcctctcctgtgcaaattcgctgatggcggacagaagaagaggcagaaccagtcaaagtacacccagaacggccgtccatggccccgggagggagaggccggaatggcactaacgtatgatcccacagcagctatacaaaatggtttttatagctccccttactccatcgcaacgaaccgaatgattcctcaaacctccattactccattcattgctgcttctcctgtctcgacctaccaggtgcagtcaaccagctggatgcctcaccccccgtacgtgatgcaaccaaccggcgccgttattacaccaactatggaccatccgatgtcaatgcagcccgccaatatgatgggccccctgactcagcagatgaatcacttgagcctggggaccaccgggacctacatgaccgccgctgccccaatgcaaggaacttacattcctcagtatacacccgtaccccccacggcagtatccatcgaaggtgtggtagccgacacatcaccacagaccgttgcaccatcttcacaggataccagcggacagcaacaacagatagccgtcgacacctcaaacgagcacgccccggcgtattcttaccaacagagcaaaccatag

SEQ ID NO: 204019 - DNA, 1263 bp, synthetic construct
  misc_feature 1..1263: note = Description of Artificial Sequence: Synthetic coding sequence
  source 1..1263: mol_type = other DNA
atgggcaagcggctggaccagccccagatgtacccccagtacacctactattacccacactacctccagaccaagcagtcttacgctcccgcccctcaccccatggccccacctagtccctccacgaatagctccagcaacaattccagtaacaactcctcaggtgagcagctctcaaaaacaaacctatatatccggggtctgccacctgggaccacagatcaagacttaatcaagctgtgccagccatacggcaaaattgtgtccactaaggccatcctggacaaaaatacaaaccagtgtaaaggctacggtttcgtggattttgatagccccgccgccgcgcagaaggctgtcgctagcttgaaagccaatggagtgcaggctcagatggccaagcagcaggagcaagaccccacaaatttatatatctcaaatttacctatctcgatggatgagcaagaattggaaaacatgcttaaaccattcggccacgtgattagcaccaggatcctgcgcgacgctaacggcgtgtcaaggggagtcggtttcgccagaatggagtccacagaaaagtgcgaagtggtcattcagcattttaacgggaagtacctcaagacccctcccggaatccctgccccatctgagcctcttctgtgtaaatttgctgacggtggtcaaaagaaacgacagaaccagagtaagtacactcagaacggccgaccttggcctagagagggtgaggcagggatggcactgacctacgacccaaccgccgccatacagaatggcttctattcttctccttatagcatcgccaccaatcgcatgattccacagacgtcaatcacccccttcattgcagccagtcccgtgagtacttatcaggtgcagagtacctcgtggatgccccacccgccttacgtgatgcagccaactggggcggtgatcacaccgaccatggatcaccccatgagcatgcaaccggccaacatgatgggtcctctcacacaacagatgaaccatctctcccttggaacaaccggtacttatatgacagctgcagcccccatgcaaggcacatacatccctcaatacacccccgtcccgccaacagccgtcagcatcgaaggcgtcgtcgcagacaccagcccccagacagtggctccatccagccaagacactagcggccagcagcagcagatagctgtggatacctccaatgagcatgcccctgcctactcatatcagcagtcaaaatag

SEQ ID NO: 204020 - DNA, 1260 bp, synthetic construct
  misc_feature 1..1260: note = Description of Artificial Sequence: Synthetic coding sequence
  source 1..1260: mol_type = other DNA
atgggcaagcggctggaccagccccagatgtacccccagtacacctactattatccccattatctgcaaacaaagagctatgcacctgccccacatccaatggctccaccctcacccagcaccaacagctcgagtaataattcctcaaataactcttccggcgaacagctgagtaagacaaacctttacatccggggactccccccagggactacagaccaagacctgattaagctgtgccagccctatggcaaaatcgtcagtacaaaggcgatcctagataagaacaccaatcagtgcaaaggttacggcttcgtggatttcgattctccagccgctgcccagaaggcagtcgcgtcacttaaggcaaacggagtgcaggcacagatggctaaacaacaggaacaggatccaaccaatctttacatcagcaacctcccaattagcatggacgagcaagaactggaaaacatgctgaaaccatttgggcatgttatttccaccaggatactgagagatgccaacggcgtaagtaggggcgtgggattcgcccggatggaatccaccgaaaagtgcgaagtggtaattcagcacttcaatggtaagtacctcaaaaccccccccggcatacccgcaccctctgaaccccttctatgcaagttcgctgacggtggacagaaaaaaaggcagaatcagtccaaatatacccagaatggcagaccctggcctcgagagggcgaagccggcatggccctgacatacgatccaacggccgctattcagaatggattctacagtagcccatactccattgcaactaaccgcatgatccctcagaccagtataacgccttttatcgccgccagtcctgtctcgacttaccagggggcagtaatcacacccactatggaccaccctatgtctatgcagcccgccaacatgatggggccccttactcaacaaatgaaccatctgtccctcggcacaacaggcacgatccaatcacaggaccgcataatgattctgcatcagctcctttgccagtacatgaccgcagcagcacccatgcaagggacctacataccccagtacacacccgtcccaccaacagcggttagcattgagggcgtcgtcgccgacactagcccacagacagtggccccaagcagccaggatacatccggccagcagcagcagatcgcagttgatacctccaacgaacacgcccctgcctatagttaccagcagtccaagccgtag

SEQ ID NO: 204021 - DNA, 1314 bp, synthetic construct
  misc_feature 1..1314: note = Description of Artificial Sequence: Synthetic coding sequence
  source 1..1314: mol_type = other DNA
atgggcaagcggctggaccagccccagatgtacccccagtacacctactattatccccattatttgcagactaaacaatcttatgctccggcgcctcatcctatggccccaccgtcgccaagtaccaactcttcaagtaataattcctccaataatagctctggggagcaattaagcaaaacaaatctttacatcagaggattaccccccggcaccaccgatcaggatctaatcaagctgtgccaaccctacggcaagattgtgagtacaaaagctattctcgacaaaaacacgaatcagtgcaaaggctatggatttgtggactttgattctcccgctgccgcccaaaaggctgtggcttcattgaaagccaacggtgtgcaagcacagatggccaaacaacaagagcaggaccccaccaatctctatatctctaatctgccaatcagtatggacgagcaggagctggagaacatgttgaagccttttggccacgtaatctccactcgcattctgcgggacgcaaacggagtgtctagaggggtcgggtttgccaggatggaatccactgaaaaatgtgaggtagtaattcagcattttaatggaaagtatctgaaaacccctcccggaattcctgctcccagcgaaccgctcctctgtaagttcgccgacggtggccagaaaaaacgtcaaaatcagtccaaatatactcagaacggcaggccgtggccgcgtgagggggaagctgggatggccttgacatacgaccctacagccgctatccagaacggcttctacagttctccctattcgattgcaactaatcggatgattccgcaaaccagtattaccccatttatcgccgccagcccggtgtccacctatcaggttcaatcaaccagttggatgccacacccaccatatgttatgcagccaactggagccgtcattacccccacgatggatcacccaatgagcatgcagcctgcaaatatgatgggtccactgacacagcagatgaaccacctctctctcggtactacgggaaccatacagtcccaggacagaatcatgatcttgcaccaactactgtgtcagtacatgactgccgccgcccctatgcagggaacttacattccgcagtatacccccgtgccccccactgcagtgagcatagaaggcgtcgtggcggataccagcccccagacggttgctcctagtagtcaagatacctctggacagcaacagcagatcgctgttgatacctctaatgagcacgctcccgcctatagttatcagcaatctaaaccgtag

SEQ ID NO: 204022 - DNA, 1305 bp, synthetic construct
  misc_feature 1..1305: note = Description of Artificial Sequence: Synthetic coding sequence
  source 1..1305: mol_type = other DNA
atgggcaagcggctggaccagccccagatgtacccccagtacacctattactaccctcattacttgcagactaagcagtcttatgccccagcccctcacccgatggctcccccgagcccctccaccaactcgtcatcaaacaactcatcaaacaattcgtcaggtgagcagctttccaagacaaacttgtatattcgaggcctgccccctggaaccactgaccaagacctgatcaagctgtgtcagccctatggcaaaattgtgtctacaaaggcaatcctggacaagaacactaaccagtgtaaaggatatgggttcgttgatttcgactcgcctgcggccgcccagaaggccgtggcaagcctcaaagccaacggcgtgcaggcccaaatggccaaacagcaggaacaagatccaacgaacctgtacatttctaacctacccatttctatggatgaacaggagctggaaaacatgcttaagcctttcggtcatgttatctcaactcgcatcttgagagatgcaaatggtgtgagtaggggggttggattcgcacggatggaatccactgagaagtgcgaagtggtcatccaacatttcaacgggaaatacctaaaaactcctcctggtatccccgctccaagtgagcccctactctgtaagtttgccgatggcggccagaagaaacgacagaaccagtcaaagtacactcagaacggacggccttggcctagggaaggagaagtgctgagaggccggaccgtacctcggcaaaaccgggaggccggaatggcattgacctacgaccctaccgccgctatccagaatggcttctactcctcaccttatagcatcgcaacgaatcgaatgatcccacagacatcaattacgcccttcatagccgcctctccagttagcacctaccaggttcagtcaacctcttggatgcctcaccctccatatgtgatgcagcctaccggcgctgtgataacaccgactatggaccaccccatgtcaatgcagcctgccaacatgatgggacctctcacgcaacaaatgaatcatcttagcttgggcacaactggcacatatatgacggctgccgcacctatgcaagggacgtatataccacagtacaccccagtgccgccaaccgcagtttcaatagaaggggtggtcgccgatacttcccctcagaccgtcgctccaagtagccaagacacgtctggacagcaacagcagatcgcagtggatacctctaacgagcacgcacccgcctattcgtaccagcaatctaaaccctag

SEQ ID NO: 204023 - DNA, 1311 bp, synthetic construct
  misc_feature 1..1311: note = Description of Artificial Sequence: Synthetic coding sequence
  source 1..1311: mol_type = other DNA
atgggcaagcggctggaccagccccagatgtacccccagtacacctactactatccacattacctccagacgaaatcatacgccccagccccgcatcctatggcaccaccctccccttccacaaacagcagtagtaataactcgagtaataactcctccggagaacagctctccaagacaaacctctacatccgtggtctcccacccggaacaacagaccaggacctcatcaagctgtgccagccttatggtaagattgtgtccacaaaagccattcttgataagaacaccaatcaatgcaagggatatggtttcgtggactttgattctccagcggccgcgcagaaggcggtggccagcttaaaggccaacggggttcaggcccagatggcaaagcagcaagaacaggacccaacaaacctgtacatttctaatctccccatttctatggacgagcaggagctggagaatatgctgaaaccattcggacatgtgatttcaactcgcatcctgcgcgatgcaaatggggtttctagaggggtgggattcgcgcgcatggagagcacagaaaaatgcgaggttgtcatacagcacttcaacggaaagtaccttaaaaccccacccggcatccctgccccttctgaacctctgttatgcaaatttgccgatggaggacagaagaaacgacaaaatcagtctaaatatacccagaatggccgtccatggccccgggagggcgaagctggtatggctcttacttatgatcccactgcggccatccagaacgggttttattcaagtccatacagcattgcaaccaatcgcatgatccctcagactagtattacacccttcatcgcggcctcacctgttagtacctatcaagttcagtctacctcttggatgccccaccccccttacgtcatgcagccaactggggctgtgatcacccctacaatggaccaccccatgagtatgcagcctgccaatatgatgggtcctcttacccaacaaatgaaccacctcagtttaggcaccaccggcaccattcaatcccaagaccgcattatgattctccaccagctcctgtgtcaatacatgaccgctgccgctcccatgcaagggacctacattccccagtatacaccagtgccccctacggcagtcagcatagaaggcgtggttgctgacacctctccacagaccgtggccccatcatctcaggacacgagcggccagcagcagcagatagcggtggatacgtcaaatgaacatgcccctgcatactcctatcagcagagtaaaccatag

SEQ ID NO: 204024 - DNA, 1302 bp, synthetic construct
  misc_feature 1..1302: note = Description of Artificial Sequence: Synthetic coding sequence
  source 1..1302: mol_type = other DNA
atgggcaagcggctggaccagccccagatgtacccccagtacacctattactatccacactacttacagacaaaacagagttacgccccggcaccccatcccatggctcccccatctcctagcactaatagttcctctaacaacagcagtaacaactcatccggcgagcaactctctaaaaccaatctctatatcagagggctgccacccggcaccaccgatcaggacctgatcaagctgtgccaaccttacggtaaaatcgtgagcaccaaagctatactagacaagaacactaaccagtgtaaaggatacggattcgtcgactttgatagcccggccgcggctcagaaggcggtcgccagcctcaaagccaacggagtgcaagcccagatggcaaagcagcaagaacaggacccaacaaacttgtatataagcaatctgcccatctccatggatgagcaggaactggagaatatgctaaagcccttcgggcatgtgatatccacacgaattctgagggatgcaaatggcgtttcaaggggcgttggctttgcccgaatggagtcaacagagaaatgtgaggtcgtcattcagcactttaacggcaaatatctgaaaaccccacccgggatcccggctccgtccgagcctttactttgcaaatttgccgatggtggccagaaaaaacgccaaaaccagtccaagtatacacagaacggcaggccctggccacgggaaggggaagttttgcgcggtcgaacagtcccgcgacaaaatcgagaagccgggatggccttgacatatgatcccaccgccgcaattcagaatggtttctatagcagcccatactccatagccacaaatcgaatgatcccccagacttcaatcacaccctttattgccgcttcaccagtgtctacctatcaggtgcagtcaacctcttggatgcctcatccaccatacgttatgcagccgactggagctgtgataacccctaccatggatcacccaatgagcatgcagcccgccaatatgatgggaccgctgacacagcaaatgaaccatttgtcccttgggactacagggacatatatgacagctgcggcccctatgcagggcacatacattccccaatacacaccagtacctccaacagccgtgtcaatagagggagtggtagccgacactagtcctcagacagtagccccttcatctcaagacacttctgggcaacagcagcagatcgccgtcgatacctccaacgagcacgcccctgcatattcttatcaacaatcaaagtag

SEQ ID NO: 204025 - DNA, 615 bp, synthetic construct
  misc_feature 1..615: note = Description of Artificial Sequence: Synthetic coding sequence
  source 1..615: mol_type = other DNA
atgaacaacggcggcaaggccgagaaggagaacacccccagcgaggccaatctccaggaagaagaagtgaggacgctgtttgtgagtggactgccattggatataaaaccacgcgagttgtatttattgtttcggccattcaaaggctacgaggggtctctcatcaaattgactagcaaacagcctgtcggattcgtgagttttgacagtagatctgaggctgaggcagccaaaaacgccttgaatgggatccgatttgatccagaaatcccgcagactctgcgactggaattcgcaaaggccaacaccaaaatggcaaaaaataaactggtgggcactcctaacccctccactccactgcccaatacagttccccagtttattgctagagaaccttacgaactaaccgtgcccgccttgtacccctcaagccctgaggtctgggcgccttaccccctttatccagctgagttggccccagcgttgcccccaccagcttttacataccctgctagtttgcatgctcagctttgtgaaggacagacagtgcgacgcagtcatcctctgtctgcacccagtcccgactcagccagccttgcatggttccccgtgtag

SEQ ID NO: 204026 - DNA, 591 bp, synthetic construct
  misc_feature 1..591: note = Description of Artificial Sequence: Synthetic coding sequence
  source 1..591: mol_type = other DNA
atgaacaacggcggcaaggccgagaaggagaacacccccagcgaggccaatttgcaggaagaggaggtgcgcacactgttcgtatcaggactgccgcttgatatcaaaccccgcgagctgtacctgctattccgcccatttaaaggttacgaaggaagcctgataaaattgacatcgaaacaacccgtaggtttcgtgagcttcgacagtcgaagcgaagcggaggctgcaaagaatgctcttaatgggattaggtttgaccctgaaattccgcagactctccggctagagttcgcaaaagccaataccaagatggccaaaaacaagctggtaggcaccccgaacccaagcacccctcttcccaacactgtgcctcagtttatcgctcgcgaaccttacgaactcacagttcctgctctgtaccccagctcaccagaagtgtgggccccttacccactgtatccagcggagcttgcacccgcactgccacctcctgcattcacctacccggcatcgttgcacgcacagatgaggtggctccccccgagcgaagctacgtcccagggctggaagtctaggcaattttgttag

SEQ ID NO: 204027 - DNA, 660 bp, synthetic construct
  misc_feature 1..660: note = Description of Artificial Sequence: Synthetic coding sequence
  source 1..660: mol_type = other DNA
atgaacaacggcggcaaggccgagaaggagaacacccccagcgaggccaacctgcaagaagaagaggtgcgcacgcttttcgtgagtgggctgccgctcgacattaagccacgggagttgtaccttctctttaggcccttcaagggctacgaaggctccctgataaagctgacctctaagcaacccgtcggtttcgtcagttttgacagccggtccgaagcagaggctgcgaaaaatgccctgaatggcattcggtttgatcctgaaattccacaaacgctcaggttagaattcgctaaggccaatactaagatggccaagaataagcttgtgggcactccaaaccccagtactcccttgcctaacacggtgccacagttcattgctagggaaccctacgagctcaccgtgcccgccctgtacccctcaagtccggaggtctgggcaccctaccccttataccccgccgagctcgctcccgcactccctcctcctgccttcacatatccggcctcacttcacgcccagtgttttagtcccgaggccaagcccaatacccccgtgttctgccccctgctgcagcagatacggttcgtgagcgggaatgtttttgtgacttaccaaccaaccgctgaccagcagagagagcttccatgctag

SEQ ID NO: 204028 - DNA, 591 bp, synthetic construct
  misc_feature 1..591: note = Description of Artificial Sequence: Synthetic coding sequence
  source 1..591: mol_type = other DNA
atgaacaacggcggcaaggccgagaaggagaacacccccagcgaggctaaccttcaggaagaggaggttcgtaccctgttcgtgtcagggctgccactggacattaaaccccgcgagctgtacttgctcttccggccgttcaaaggctacgaaggctccttaatcaaactcacgtcaaagcagcccgtcggatttgtttcatttgactcacgcagcgaggctgaggcagctaagaatgctcttaacgggatccgcttcgaccctgagattcctcaaacacttagactcgagttcgccaaggctaataccaagatggcgaagaataagctggtcggcacacccaacccgtccactccgctccctaataccgtgccccagtttatcgctcgcgaaccttatgaattgacagtgccagctctctacccaagcagccccgaagtctgggccccctaccccttgtacccggcagaactggcccctgcgctgcctcctcccgcttttacataccctgcctctctgcacgcccagatgcggtggctgcctccgtcagaagctacatctcagggctggaaatcgaggcaattttgttag

SEQ ID NO: 204029 - DNA, 462 bp, synthetic construct
  misc_feature 1..462: note = Description of Artificial Sequence: Synthetic coding sequence
  source 1..462: mol_type = other DNA
atgaacaacggcggcaaggccgagaaggagaacacccccagcgaggctaatctacaggaagaagaagttaggaccctcttcgtctccggcctgcctctggacattaagccacgtgagctgtaccttctgtttcggcctttcaaagggtacgagggcagcctgatcaagctaaccagcaagcagcccgtgggctttgtgtcttttgactcaagaagtgaagccgaggccgccaaaaacgcgctaaacggaataaggtttgatccggaaatcccgcagacgctgcggttggaattcgctaaggcaaacactaaaatggccaaaaataagctggtagggacacccaaccccagcaccccacttccaaacactgtgccacaattcattgcacgtgagcctctcatgcgctggctgcctcctagtgaagccaccagccagggatggaagtccaggcaattttgctag

SEQ ID NO: 204030 - DNA, 1257 bp, synthetic construct
  misc_feature 1..1257: note = Description of Artificial Sequence: Synthetic coding sequence
  source 1..1257: mol_type = other DNA
atgctggccagccagggcgtgctgctgcacccctacggcgtgcccatgatcgtcccagcagccccatacttacctggtttaatacagggtaaccaggaagccgccgcagccccagacaccatggcccaaccgtatgcctcagcacagtttgcccccccccagaatgggatccctgctgaatacacagcccctcaccctcatcccgccccagagtataccggccagaccacggtgcccgaacacaccctgaacctgtacccaccagctcagactcatagtgagcagtcacctgccgatacctccgcacaaactgtttcaggtaccgcgacacagacagacgacgccgctccaaccgacggtcagcctcagactcagccttccgagaacactgaaaacaaaagtcagcctaaacggctacacgtgtccaatatccccttccgtttcagggaccccgacttacgccaaatgttcggacaatttggcaagattttggacgttgaaatcatttttaacgaaagaggttccaagggctttggctttgtaacatttgagaactcagcggacgctgaccgtgcacgtgagaagttacatggcacagtagttgagggaaggaaaatcgaagtgaataatgccacagcgcgagtcatgaccaataaaaagacagttaacccctacaccaatggctggaaattgaatcccgtcgtgggggcagtatattcccccgagttctacgcaggaaccgtgcttctgtgccaggcgaatcaggaaggatccagtatgtatagtgcaccatccagtctggtttacacctcagctatgccagggtttccttaccccgctgccaccgctgccgcagcttaccgcggcgcgcatttgaggggcagggggcgcaccgtgtacaacaccttcagagctgcagcccctccacccccaattcctgcatacggcggcgtggtgtaccaggagccagtgtacggaaataagctcctccagggagggtacgccgcctatcgatacgctcagccaacccctgcaactgcggctgcatactcagactcctatgggagggtgtacgccgccgatccgtaccaccacgctctagcccctgcacccacttatggggtgggcgcaatgaatgccttcgctcctctgacagatgcaaagaccaggagccacgccgacgatgtggggttagtgctgtcttcacttcaggccagtatctacagggggggctacaaccgtttcgctccctattag

SEQ ID NO: 204031 - DNA, 1209 bp, synthetic construct
  misc_feature 1..1209: note = Description of Artificial Sequence: Synthetic coding sequence
  source 1..1209: mol_type = other DNA
atgatcgtgcccgccgccccctacctgcccggcctgatccagggcaatcaggaggccgcggccgcacccgacacgatggctcaaccatacgcgtccgcacagttcgcaccaccacaaaacggaattcccgccgagtataccgcaccgcacccccatcctgctcctgaatacactgggcagaccacggtgccagaacacactttaaatctgtacccacctgctcaaactcatagtgaacagtccccagccgacactagcgcccagacagtatctggtacagcaacccagacagacgacgccgccccaaccgacggccagcctcaaacgcagccttccgagaatacagaaaacaaaagccagcccaagcgcctgcacgtgagcaatatccccttcaggttccgagaccccgatcttaggcagatgttcggccagttcggtaaaattttggacgtggagattattttcaatgagagaggatccaagggatttggcttcgtaacgtttgaaaacagcgccgatgccgaccgagcgcgcgagaaactgcatggcaccgttgtagaggggcgaaaaattgaggttaataatgccacagcacgtgtaatgaccaacaaaaagaccgtgaatccttacaccaatggttggaagctgaatccagtggtcggagctgtgtattcaccagagttctacgccggcactgtactcttgtgccaggccaatcaagagggatcatctatgtacagcgcaccatcatcactcgtatacacttcagccatgcccggttttccttacccagctgctaccgcagccgcagcttatcgaggggcccacctgagagggagagggcggaccgtctataatacctttagagcggccgctccccccccgcccatcccagcatatggcggcgtagtttatcaggatggattctacggggcagacatatatggcggctacgccgcgtatcgatatgcccagcctactccagcgactgccgctgcgtactcagactcatacggccgcgtttacgctgccgatccatatcatcacgccctggctcccgctcctacttacggggtaggtgccatgaacgctttcgcgcctctaacggacgccaagacaaggtcccacgcagacgatgtgggcctggtgcttagctccctccaggcgtccatatataggggcggctataaccggttcgccccatattag

SEQ ID NO: 204032 - DNA, 1176 bp, synthetic construct
  misc_feature 1..1176: note = Description of Artificial Sequence: Synthetic coding sequence
  source 1..1176: mol_type = other DNA
atgctggccagccagggcgtgctgctgcacccctacggcgtgcccatgattgtgccggctgctccatacctgccagggctcatccaaggtaaccaggaggcagcagctgcccccgataccatggctcagccatatgccagtgctcagttcgcaccgccccagaacggaatcccggcagagtatactgctccgcaccctcatccagctccagagtataccggccagaccaccgtccccgaacacactctgaacctgtacccccctgcccagacacattcggagcagtcccctgccgacacgtcagcgcaaactgtcagcggaaccgccacccagacagacgatgcagcaccaaccgatggacagcctcaaacacagcccagcgagaacacagaaaataagagtcagcctaagcgcctgcatgtgtccaacatacccttccgctttagggaccctgacttgagacagatgttcggtcaatttggtaagattcttgatgtagagatcatttttaacgaacggggctcaaagggattcggattcgtaacgttcgaaaacagcgccgacgctgacagggctcgtgagaaattgcacggtactgtggtcgaaggaagaaagatcgaggttaacaatgccaccgcacgggtgatgactaataagaagaccgttaacccatacaccaacggatggaagctgaaccctgttgtgggtgccgtatactccccagaattctacgcagttcccggcttcccttacccagccgcaactgccgcagcggcctatagaggagctcacctgcgtggccgtggtaggactgtgtacaacaccttccgtgctgctgccccaccacctcccattccagcttatggaggagttgtctatcaggagcccgtgtacggaaacaaattgctccaagggggttacgccgcttacaggtacgctcagcccactcctgcaacagcagccgcatattccgactcttacggccgggtgtatgccgccgacccataccaccatgcacttgcaccagcccctacatatggcgtgggagcgatgaacgccttcgcacctttaaccgatgccaagacccggagtcacgccgacgatgtggggctggtgttaagctcactccaggccagcatctaccgaggaggatacaatagattcgccccgtattag

SEQ ID NO: 204033 - DNA, 1188 bp, synthetic construct
  misc_feature 1..1188: note = Description of Artificial Sequence: Synthetic coding sequence
  source 1..1188: mol_type = other DNA
atgctggccagccagggcgtgctgctgcacccctacggcgtgcccatgatcgttcctgcggccccgtatctgcctggattgatccagggtaatcaagaggccgcagccgcgccagataccatggctcagccctacgcgtccgctcagttcgcacctcctcagaacgggataccagcggagtacactgcaccccaccctcaccccgccccagagtataccggccagacaactgtacctgagcacaccctgaacctgtatccccctgctcagacccatagtgagcagtccccggcggatacctctgcccagaccgtgtccggaacggccacgcaaactgatgatgcagccccgaccgacgggcagccacaaactcagcccagtgagaataccgagaataaaagccagcctaaacgtctgcacgtctcaaacattcccttccggtttcgcgatccagacttgagacaaatgtttgggcagtttgggaagattctggacgttgaaataatttttaatgagcgggggagcaagggatttggtttcgtgactttcgaaaattctgcagatgctgatcgcgcgcgggagaagctccatggcaccgtcgtggagggacgcaagatcgaagtgaacaacgcaaccgccagggtgatgaccaataagaaaaccgttaacccgtatacaaacggttggaagctcaaccctgtggtgggggccgtttacagtccggaattctatgctggcactgtcctactgtgtcaggccaaccaggagggatctagcatgtactcagcacctagctcactggtgtacacctccgcgatgcctggctttccttaccctgccgcaaccgccgccgctgcgtatcgcggagcgcacctgaggggcagggggcgcacagtttacaacacattccgcgctgcagcaccccctcctcctatccctgcatatggtggggtagtctaccaggagcctgtctacggtaacaaattactccagggtgggtatgccgcataccgttatgcgcaacctacgcccgccaccgccgccgcatactccgacagaaatcaattcgtgtttgtcgcggcggacgaaatttcctgtaatacttccgcagtcaccgatgagttcatgctaccaaccccaactactacacatttgctgcagcctccccccactgctctggtcccctag

SEQ ID NO: 204034 - DNA, 1179 bp, synthetic construct
  misc_feature 1..1179: note = Description of Artificial Sequence: Synthetic coding sequence
  source 1..1179: mol_type = other DNA
atgctggccagccagggcgtgctgctgcacccctacggcgtgcccatgattgtcccggcggctccctacctgcccggcttgatacagggaaaccaagaggccgccgccgctcctgatactatggcacagccctatgcttcagcacaattcgctcccccacaaaatgggatccctgcagagtatacagcgccacacccacaccctgcccccgaatatacaggacagaccaccgtgcccgagcacaccctcaatctctatccacccgctcaaacgcattcagaacagtcacccgccgacaccagcgcacagacagtgtcaggcaccgctactcagaccgacgatgcagccccaacagacggccagccccagactcagccttcagaaaataccgagaataaaagccagcctaagagactgcacgttagcaatataccgtttcgctttagggacccggacttacgccaaatgttcgggcagttcggcaaaatcttagacgtggaaatcattttcaatgagagaggctctaaaggtttcggatttgtaaccttcgaaaacagcgccgatgccgaccgagctcgcgaaaaactgcacggaaccgttgtcgagggacgcaagattgaggtcaataacgccactgcccgagtcatgacaaacaaaaaaaccgtgaacccatataccaatggatggaagctgaatccagtggtgggagctgtttatagcccggaattctacgcagggaccgtgttactttgccaggccaatcaagagggaagttcgatgtatagtgctcccagttccctggtctatacgagcgcaatgcctggcttcccctacccggccgccaccgcggctgccgcatacagaggcgcacatctgcgaggcaggggccgaacggtctacaataccttccgtgcggctgctccccccccaccaattcccgcttacggcggcgtggtgtaccaggagcctgtatacgggaacaagctgctccagggaggatacgcagcttacaggtacgcacaacccacacctgcaacagcagcggcctactctgacagttacgggcgggtctatgcagcagatccataccatcatgcgctcgctcccgcaccaacctatggagttggagccatggcctccatatatcgcggtgggtataatcgttttgctccatactag

SEQ ID NO: 204035 - DNA, 1194 bp, synthetic construct
  misc_feature 1..1194: note = Description of Artificial Sequence: Synthetic coding sequence
  source 1..1194: mol_type = other DNA
atgaactgcgagcgggagcagctgcggggcaaccaggaggccgccgccgcgcctgacactatggcacagccctatgccagcgcccagtttgcccctccacagaatgggattcctgctgagtacaccgccccccacccacaccctgctcccgagtatacaggccaaacaaccgtgccagagcatactctaaacctataccctccagctcaaactcactccgagcagagcccagctgatacctctgcccagactgtgtccggtacagccacacaaaccgatgacgccgcacccactgacgggcagcctcagacgcagccgtctgagaatacagaaaataagagtcaacctaaacgactccatgtgagtaatattccgttccgctttagagatccagacctccggcagatgtttggtcagttcgggaaaattttggatgtcgaaattatctttaatgaacggggctccaaaggattcggctttgtcacatttgaaaattcagccgatgccgatagggcacgggagaaacttcatgggacggttgtggaggggagaaagattgaggttaataatgctactgcacgggtgatgacgaataagaaaaccgttaatccttacacgaacggttggaaactcaatccagtggtaggtgccgtctatagccctgagttctatgcaggaactgtgcttctctgccaggccaaccaggaggggtcttcaatgtatagcgccccgtcttcattagtgtatacgtcagccatgcccggatttccttaccctgcagcaacagctgccgctgcctacaggggggcccatttacggggccggggaagaacagtatataacacatttcgagccgccgccccccctcctcccattccagcttacggcggtgttgtgtaccaagatggattttacggtgccgacatctatggaggctatgccgcttataggtacgcgcagccgacacccgctacggccgcagcctatagtgacagctatggcagagtctacgccgccgacccttaccaccatgctctggcaccggctcccacctatggcgtgggagccatgaacgcttttgcccctcttaccgacgctaaaacacggtcccacgccgacgacgtgggactggtgctgtcgagtttgcaagcctctatttatcggggcggctacaacagatttgccccttactag

SEQ ID NO: 204036 - DNA, 1401 bp, synthetic construct
  misc_feature 1..1401: note = Description of Artificial Sequence: Synthetic coding sequence
  source 1..1401: mol_type = other DNA
atggagaccggccagcggacccacgccagcggcacctacagcttcctggatcgcacacagcattccgacattaaggccgactgcaacacatgcgtggagatcgaagatcgtaaagtaagcaggcagcagatgaattgcgaaagagagcagctccgtggaaatcaagaggccgccgcagcgcctgatactatggcccagccctatgcatcggcccagttcgcccctccacagaacggaatccctgctgagtataccgccccacacccacatcctgcccccgagtacaccggccaaactacagtgcccgagcatacactgaacttgtaccctcccgcacaaacacacagtgagcagagccctgcagacaccagcgcacagacagtctccggcactgcaacacagacagacgacgctgcgcctactgacggccagccccagacccagccctcagaaaatacggagaataaatcacagccaaagaggttgcacgtttcaaacatcccttttagatttagggacccagacctccggcagatgttcgggcagtttggcaaaatactggatgtcgaaatcatcttcaatgagaggggctcaaagggatttggatttgttacatttgagaactccgcggacgccgacagggctagagaaaagttgcacggaacagtcgtggaggggaggaaaattgaggtgaacaacgctaccgccagggtcatgaccaataaaaagacagtgaacccttatacaaatggatggaaacttaacccagtcgtgggggccgtgtacagcccggagttttatgcaggaacagtcctcctgtgtcaggcaaatcaggaggggtccagcatgtattctgccccgagcagcctggtttacacatctgctatgcctggatttccttaccctgcagccacagctgcagccgcttaccgcggagcccacctgcgcggccgtggccggacagtgtacaacacgttccgcgcagcagcgccccccccgcctatccctgcatatggcggcgtagtttaccaggatggattttacggcgcggatatctatggagggtacgctgcgtacaggtacgcccagcctacccccgctacagcagccgcttactctgaccgaaatcagtttgtgttcgtcgctgctgacgagatttcctgcaacaccagcgcagttactgatgagtttatgctgcccacgcctacaacaacacatttgcttcaacctccaccaaccgcattagtgccatgtccaaaagtgcctgccccggcacaaacaagcgaagagttgagctgcacactgccaggcctttgctgtcaagcggcggaaaatctgactgcctctccaccattgctccagtttatgtttaaggttatagtcgcccaagaacggaagtag

SEQ ID NO: 204037 - DNA, 1194 bp, synthetic construct
  misc_feature 1..1194: note = Description of Artificial Sequence: Synthetic coding sequence
  source 1..1194: mol_type = other DNA
atgaactgcgagcgggagcagctgcggggcaaccaggaggccgccgccgcaccagacacaatggctcagccatatgcctccgctcaatttgcacctcctcaaaacggaatacctgccgaatatactgccccgcaccctcatcccgcgccagagtacaccggccagacaacagtacccgaacacaccctgaacttgtatcccccggcgcaaactcacagtgaacagtccccagcggatacaagcgcccagaccgtatccggaacggccacacagacagatgacgctgcccccacagatgggcagccccagacgcagccctctgaaaatactgagaataagtcccagccaaagagactgcacgtcagcaacatccccttccgctttcgtgatccggatctacgccagatgtttggtcagttcggaaaaatactggacgtggaaatcatctttaatgagcgtgggtctaagggatttggatttgtcactttcgagaatagcgcagacgccgatagggctagggaaaaactgcacggaactgtggtagaaggcagaaagatagaggtgaacaatgcaacagctcgtgttatgaccaataaaaaaactgttaatccatacaccaatgggtggaaactaaaccctgtggtgggcgcagtgtatagccctgagttttacgccggaacagttctactatgtcaagccaatcaggaaggctctagcatgtatagtgcgccatcctccctcgtttacacctcagcaatgcctgggtttccctatcctgccgccactgcagcagccgcataccggggagctcatctgcggggcaggggtcgtaccgtgtacaacactttcagagctgccgcccctcctccccccatcccagcctatgggggggtcgtgtatcaagacggattttacggagcagatatctatggcggttacgccgcttaccgctacgcccagccaacacctgcaaccgcagcagcatactctgacagttacgggagagtgtacgcggccgacccataccatcacgcactggcgcccgcgccaacgtatggcgttggagcaatgaatgcctttgccccactgacggacgctaaaaccaggtctcacgccgatgatgttggacttgtgttatcgagcctccaggcctcgatttaccgtggaggctacaaccgatttgcaccatactag

SEQ ID NO: 204038 - DNA, 792 bp, synthetic construct
  misc_feature 1..792: note = Description of Artificial Sequence: Synthetic coding sequence
  source 1..792: mol_type = other DNA
atgaactgcgagcgggagcagctgcggggcaaccaggaggccgccgcagcacctgacactatggctcagccctacgctagcgctcagtttgcaccgccccagaacggaataccagcagagtatacagcgcctcatccccacccagcgccggaatataccgggcaaacaaccgtcccggaacatacccttaacctttacccaccagcccagacacacagcgaacaaagcccagccgatacctctgcccaaactgtgtcaggaaccgccacccagacggatgacgccgcgccaactgatgggcagccccagacccagccgagtgaaaacacggagaacaaaagccagcctaaaagattgcacgtcagcaacattcctttccggttccgggatcctgacctgaggcagatgttcggacaattcggaaagattctggatgtggaaattatattcaacgagagagggtcaaagggctttggatttgtcaccttcgagaacagcgccgacgcagatagggccagggagaaacttcatggtacggtggtggaagggcggaaaatcgaagtcaataacgcaacagcgagagtaatgacgaacaagaaaacggtaaacccttacacaaatggatggaagctaaacccggtggtcggcgccgtgtatagcccagagttctatgccggcactgtcttgttatgccaggcgaatcaggaagggtcctccatgtatagcgcgccaagtagtctggtgtacactagtgcaatgccggggttcccctatccagctgctacagcatag

SEQ ID NO: 204039 - DNA, 1113 bp, synthetic construct
  misc_feature 1..1113: note = Description of Artificial Sequence: Synthetic coding sequence
  source 1..1113: mol_type = other DNA
atgaactgcgagcgggagcagctgcggggcaaccaggaggccgccgccgctcctgacacgatggcgcaaccatatgcctcggcacagttcgcaccaccccaaaatggcatccctgctgaatacacagcaccccacccgcacccagcacctgagtacacgggacagactaccgtacctgagcacaccctgaacttatatccaccggctcaaacacactccgagcagtcccccgcagatacctctgcacaaaccgtgtccgggacagccacgcagacagacgatgctgcaccgacggacggccagccccagacacaaccatcagagaataccgagaataagtcccagcctaaacgtctgcatgtcagtaatatccccttccggttcagggaccctgacctgaggcaaatgtttggacagtttgggaagattctggatgtggagataattttcaacgagcgtggcagtaagggattcggctttgttacctttgaaaactctgctgatgctgaccgggctcgagaaaagctacacgggacagtagtcgaggggcggaaaatcgaagtgaacaacgcaacagctagggtcatgaccaacaagaagacagtaaatccatataccaatggatggaagctgaaccccgtggtcggcgccgtgtattcaccagaattttatgccgtccctggatttccatatccagctgctacggctgctgcggcttatcggggagctcatctcaggggacgcggacgcacggtctataacacctttagagccgctgccccaccaccccctattcccgcatacggaggcgtcgtgtatcaggatggattctacggggccgacatctacgggggctacgcagcctataggtacgcccagcccacccccgcaactgcagccgcatactccgacagttacggtcgtgtttatgctgctgacccttaccatcacgcccttgcgcctgcaccaacatacggggtgggtgcgatgaatgcatttgctcctctgaccgatgccaagacacgctcacacgccgatgacgtcggtctggtcctgtcatctctacaggcctcgatttacaggggcgggtacaaccgatttgccccatactag

SEQ ID NO: 204040 - DNA, 1725 bp, synthetic construct
  misc_feature 1..1725: note = Description of Artificial Sequence: Synthetic coding sequence
  source 1..1725: mol_type = other DNA
atggcccacaacaagatccccccccggtggctgaactgcccccggcgcggtcaacctgtcgcaggtcgcttcctacctctaaagacaatgctaggaccccggtacgattctcaggtagccgaagagaaccgtttccacccgagcatgctctccaattatctgaagtcgctgaaggtcaaaatgggtcttctcgtggacttaacaaatacgagccggttctacgaccggaatgatattgagaaggaaggtataaagtacatcaaacttcagtgcaaaggacacggggaatgcccaacaaccgaaaacacggagacttttattagactttgcgagcgcttcaacgagcgcaatccccctgaactgataggggttcattgcacccacggctttaatcgtactgggtttctcatttgcgcattcctggtcgagaagatggactggtcaattgaggccgccgtggcaacatttgcacaggcccgcccccctggaatttacaaaggcgattatcttaaggaattgttccggcgatatggtgacattgaagaggccccccctccccccctgctgcccgattggtgcttcgaagatgacgaagacgaagatgaagatgaagatgggaaaaaggaatccgaacccggttcatcagcctcctttgggaagcgccgcaaggaacgactgaaactgggtgccatcttccttgagggcgtgacagtcaaaggcgtgacccaggtaaccacgcagcccaaactgggagaagtccaacagaagtgccaccaattttgcggatgggaggggagcggctttcctggggctcagcctgtctcaatggataaacaaaatattaagctgctggatcttaagccttacaaagtgagctggaaggcagacggtactaggtatatgatgctgatagatggcacgaacgaggtttttatgatagacagggataacagcgttttccatgtgtccaatttggaattccccttcaggaaagacctgcggatgcatttaagtaatacacttctggatggggagatgataattgacagagtaaacggtcaggcagtccctcgatacctgatttatgacattatcaagttcaactcgcaacccgtgggagactgtgatttcaatgttcggcttcaatgcattgaaagggagatcattagtccgcgtcatgaaaagatgaagacaggcttaattgacaaaacgcaggagccttttagtgtacgcaataagccctttttcgacatttgtacctcaaggaagaagtataagcccggccgctgtgacgacatcctcaaatggaaacctccctctcttaacagcgtggatttcagactgaagataacaagaatgggcggcgagggactactgccccagaacgttggcctcttatacgtgggaggatacgagcgcccctttgcccagatcaaggtgaccaaagagttaaagcaatatgataacaagattattgaatgcaagttcgagaacaatagctgggtgttcatgcggcaacgaacagataagtccttccccaacgcctacaacaccgccatggcggtttgtaactccatttcaaaccctgttactaaggagatgcttttcgagttcattgataggtgtacagcagcttctcagggccagaagagaaagcatcatctcgaccccgacacagaactgatgcccccccctccacctaagagaccgcggcccctgacctag

SEQ ID NO: 204041 - DNA, 1626 bp, synthetic construct
  misc_feature 1..1626: note = Description of Artificial Sequence: Synthetic coding sequence
  source 1..1626: mol_type = other DNA
atggcccacaacaagatccccccccggtggctgaactgcccccggagaggccaacctgtggccggcagattcctgcctcttaagacaatgttgggccctagatatgacagccaggttgctgaagagaatcggtttcacccttctatgttgtctaattacctgaagagcctgaaggtgaaaatgggactcctggtggatctaacgaatacatcgcgcttctatgatcgaaacgatatcgaaaaagaaggaatcaaatacatcaaactccagtgtaaaggtcacggtgaatgtcctaccactgagaacaccgagacctttattcgcctctgcgaaagatttaacgaacgtaatccaccagagttgattggtgtccactgtacccatgggtttaataggacagggttcctcatctgtgcttttctcgtggagaaaatggattggagtatagaagccgccgtggctacattcgcccaggccagacctcccggcatctacaagggcgattacctcaaggaattattcaggcgctatggggacatcgaggaggccccccctccacctctgctcccagactggtgtttcgaggacgacgaggacgaggatgaagacgaggatggcaagaaagagagtgagcccggcagtagtgcgagcttcggaaaacgacggaaggagcgcttaaagctcggcgcgatatttttagaaggcgtaacagtgaaaggagttactcaggtgactacacagcccaagctcggagaggtgcaacaaaaatgccatcagttctgcgggtgggaaggatcaggctttcccggagcgcaacctgtctctatggacaagcagaacataaagttactggacttaaagccatataaagttagttggaaggccgacggcaccagatacatgatgttaatcgatgggactaatgaggtctttatgatcgatagagacaacagcgtgttccacgtatccaatcttgaatttccttttcgtaaggacctacggatgcacctatccaacactctgctggacggggagatgattatcgatagggtgaatggccaagcagtgcctaggtacttaatttacgacatcatcaagttcaacagccagcctgtcggcgactgtgactttaacgtccgtctgcaatgtatcgaacgcgagattattagcccccgacacgaaaagatgaagaccggattgattgataagacacaggagcctttttccgtcagaaataaaccattttttgatatttgcacatcaaggaagctactggaaggtaactttgctaaggaagttagtcacgaaatggatggcctgattttccagccaaccggcaaatataagccaggccgatgcgacgacatcctgaaatggaaaccaccttcgctgaattctgtggattttcgcctgaagatcacccgaatggggggggaaggcctgctgccccagaatgtcgggctgttatacgtggggggctacgagagacccttcgcgcaaatcaaagtctgcctttttatatttagcgtcctgttccttgatgttctgctgagcagaatacaccagaacctggctaataacaaccaacatattaaaatttcttgttcttcgactctcgggggctag

SEQ ID NO: 204042 - DNA, 1794 bp, synthetic construct
  misc_feature 1..1794: note = Description of Artificial Sequence: Synthetic coding sequence
  source 1..1794: mol_type = other DNA
atggcccacaacaagatccccccccggtggctgaactgcccccggcgtggtcagcctgtggcggggaggttcctacccctcaaaacaatgctaggacccagatatgactcacaagtggctgaagaaaacaggttccacccatctatgctgtcgaattatctgaaaagtctgaaggtaaaaatggggctgctggtcgatcttaccaatacctcgaggttttatgatcgaaatgacatcgaaaaagaaggaatcaagtatatcaaacttcagtgtaagggtcacggtgagtgtcccacaaccgagaatactgaaacgttcatccgcctatgcgagagatttaatgaacgcaatcctccagaactgattggggttcattgcacccacggctttaaccggacgggtttcctgatatgcgctttcttggtcgaaaagatggattggtcaatagaagctgcagtggctactttcgcgcaggcccggcctcccggcatttataagggggactacctcaaggaactgttcaggagatatggggatatagaagaagccccgccaccacctctgctgcctgactggtgcttcgaggacgacgaggatgaggatgaggatgaagatgggaaaaaagaatcggagccaggctcttctgcgagcttcggcaaaaggagaaaggagaggctgaaacttggagcgatctttcttgagggagtcaccgtgaagggtgtgacacaggtgaccacacagcccaagttaggagaagtgcagcagaagtgccatcagttttgtggctgggagggcagtggcttcccgggcgctcagcccgtatccatggataagcaaaatatcaaactgctggatctgaaaccttacaaagtgtcttggaaagcagatggtacgcgttacatgatgctgattgacgggactaatgaggtgtttatgattgatagagacaacagcgtttttcatgtatcaaatctggaatttcccttccgaaaagatctacgcatgcacttgagcaatacactgctggacggcgagatgatcattgatcgagtgaacgggcaagcagtgccccgttacttgatctatgacatcatcaagtttaattctcagccggtgggagactgtgattttaacgtgagattgcagtgcattgagcgcgagatcatctctccacgccacgaaaagatgaagacaggcctaatcgacaagacccaagaaccatttagtgtccgaaacaaaccctttttcgacatttgcactagcaggaagctgcttgagggcaactttgctaaagaggtttcccacgagatggacggcctcatcttccagcctacaggaaaatataagcctgggaggtgtgacgatatactgaaatggaagcctccttctctgaactcagtcgattttagattgaaaatcactcgcatgggtggggagggactcctccctcagaatgtcggcctgctctatgttggcggatatgagcgtcctttcgcacaaattaaggtgacaaaggaactgaagcagtacgataacaagataatagaatgcaaatttgagaacaactcctgggtgttcatgagacagagaaccgataagagctttcccaacgcctacaatacagccatggcagtctgcaacagcatctcgaaccctgttaccaaagaaatgctcttcgagttcattgaccgatgtactgctgccagccaagggcagaagcgaaaacaccacctagaccccgatactgagcttatgcctcccccaccccccaagcgcccccgccccctcacatag

SEQ ID NO: 204043 - DNA, 1707 bp, synthetic construct
  misc_feature 1..1707: note = Description of Artificial Sequence: Synthetic coding sequence
  source 1..1707: mol_type = other DNA
atgctgggcccccggtacgacagccaggtggccgaggagaaccggttccacccatctatgctcagtaattacctgaagagcctgaaagtcaagatgggacttctcgttgatctgacgaatacatccagattttacgacaggaacgacatcgaaaaggagggaattaaatatatcaagctgcagtgcaaagggcatggagagtgtcccaccaccgaaaatacagaaactttcatccgcctgtgtgaacggttcaatgaacggaatccccccgagctgatcggggtgcactgcacacacggcttcaatcgtactggattcctcatttgcgcattcctagtggagaaaatggactggtcaattgaggcagcagtcgctacgttcgctcaggcccgccccccaggaatctacaaaggagactatctgaaagaactgtttcggcggtacggcgacattgaggaggccccaccacctcctttgcttcccgattggtgcttcgaggacgacgaagatgaggacgaggacgaggacggcaagaaggagagtgagccaggatcttcggcatcattcggaaaaaggaggaaggagagattgaagctgggagctatcttcctggagggagtgacggtgaaaggggtgacacaggtaacgacccaacctaaactgggggaggttcagcaaaagtgccatcagttctgtgggtgggagggctcagggtttccaggagcccagcccgtttcaatggataagcagaacataaagttgttggatctcaaaccttacaaagtgtcttggaaggcagacggcacaaggtatatgatgctgatcgacggcacaaacgaagtgtttatgatcgaccgcgacaattcagtgtttcatgtgtccaatcttgagttcccttttcgcaaagatctgcgaatgcacctgtctaatacgctgctcgatggagaaatgattattgatagggtcaacggacaggccgtgcctagatacctaatttacgatataatcaaatttaattcacagcccgttggcgactgtgatttcaacgtgcggctccagtgtattgaacgagagatcatcagtcctcggcatgagaagatgaagactggattgatcgataagacccaagagccttttagtgtgaggaacaagccatttttcgatatatgcacatcccgaaaattattagagggtaacttcgctaaagaggttagccatgagatggatggcctgatattccagccaacaggaaaatacaaaccaggcagatgtgatgacattctgaagtggaagcctcctagcttgaacagtgtggattttcgtctgaaaattactcgaatgggcggggaaggcctgctaccacagaacgtcggcttgctctacgtcgggggctacgaacgcccctttgcgcagatcaaggtcaccaaagaactcaagcagtatgataacaaaattatcgaatgcaaatttgagaataactcttgggtattcatgagacagcggaccgataagagctttcctaacgcctataataccgcaatggctgtgtgcaattctatctcaaaccccgtgacaaaagagatgctgttcgagttcatcgaccggtgcaccgctgcctcccaagggcagaagcgcaaacaccatctggacccagatactgagctgatgcctcctccccctcccaaaaggccccgtccacttacatag

SEQ ID NO: 204044 - DNA, 1545 bp, synthetic construct
  misc_feature 1..1545: note = Description of Artificial Sequence: Synthetic coding sequence
  source 1..1545: mol_type = other DNA
atgggcctgctggtggacctgaccaacaccagccggttctacgaccggaatgacattgagaaggaagggataaaatatataaaacttcagtgcaagggtcacggggagtgcccaaccacagagaataccgagacttttatcagactgtgtgagaggtttaatgagcgcaaccctcctgagctgatcggggtccattgcacacatggatttaacaggaccggcttcctgatatgcgcttttctggtagaaaagatggattggagcattgaagctgcagtggccacctttgctcaggcccgacctcctggtatttacaagggagattacctgaaggaactgtttcgcagatatggcgatatagaggaagccccgccaccgcccttgcttcccgactggtgttttgaagacgatgaggatgaggatgaggatgaggacgggaagaaggagtctgagcccggatccagtgcttccttcgggaagagaaggaaagagcggcttaaactcggtgctatatttttggagggcgtgacggtgaaaggggtcactcaagtaaccacccagcccaagctaggagaggtccagcagaagtgccaccagttttgcggatgggaggggtctggattccctggcgcccagcctgtttctatggacaaacagaacattaagctactagacctgaaaccttataaagtgtcatggaaagccgacggtacacgctatatgatgttaatcgatggaacgaacgaagtgtttatgatcgatcgcgacaattccgtattccatgtgtccaatctcgagtttccttttagaaaggacctgaggatgcatctctccaataccctactcgacggcgagatgatcattgatcgtgtgaatgggcaggcggtgccaaggtacctgatatacgacattatcaagttcaattcccagcccgtaggagactgcgatttcaacgtgcgcctccagtgtattgagagggaaataataagtcccaggcacgagaagatgaagacgggcttgatcgataagacacaagaaccctttagcgtcagaaacaaaccttttttcgatatatgcacttctcggaaaaaatataagcctgggcggtgtgatgacatcctgaaatggaaacccccgagcctaaattctgtggactttcgcctcaaaatcaccaggatgggtggggaaggcctcctgccccagaacgttggcctgttgtacgtgggcggatacgaacgaccttttgctcagatcaaagtgacaaaggagctcaagcagtacgacaataagataatcgagtgcaaattcgagaataatagctgggtgttcatgagacagagaacagataagagttttcccaacgcttataataccgcaatggcggtctgtaatagcatctctaatccagtcactaaagagatgctgttcgagtttatcgacagatgcaccgctgcatctcaaggccagaagcgcaaacatcacctggatccggataccgagttgatgccgcctcccccccccaaacgcccccggcccctgacttag

SEQ ID NO: 204045 - DNA, 1263 bp, synthetic construct
  misc_feature 1..1263: note = Description of Artificial Sequence: Synthetic coding sequence
  source 1..1263: mol_type = other DNA
atggccgccctggtgcggcccgcccggttcgtggtgcggcccctgctccaggtggtccaagcatgggatcttgacgcccggagatgggtaagagcacttaggaggtctcccgtgaaggtggtgttccctagtggcgaagtcgtcgagcagaaacgcgcacctggtaaacaacctcgcaaagcgccttcagaggcctccgcccaggagcagagggagaagcagcctttggaggagtcagcatcccgcgcaccttcgacgtgggaggagagtgggctgcggtacgataaagcttatccaggggatcggaggctctcttccgttatgactatcgtgaagagtaggccttttcgggagaagcagggcaagatcctcctcgaaggtcggagactgatctccgacgccctgaaggccggagctgtgcctaagatgtttttcttctcccgcctcgagtacctgaaggaattgcccgtcgataagctaaaaggggtgtccctcatcaaagtgaaattcgaagacattaaagactggagtgacctggtcacgccccaaggtattatggggatcttcgcaaaaccggaccatgtgaaaatgacatatcccaagactcaactgcagcacagcctgcctctcctgctgatctgcgataacctccgtgacccagggaacctgggaacgatcctcaggagtgcagccggcgccgggtgctctaaggtcttactgaccaaggggtgcgtggatgcctgggagccaaaggtccttagggctggtatgggcgcccactttaggatgcccattatcaacaacctggaatgggagacagtgccaaattatttaccccccgatacgagggtgtatgtggctgacaactgcggactttatgcccaggcagaaatgagcaacaaggcttctgaccacggctgggtgtgcgatcagcgggtgatgaagttccataagtatgaagaggaggaggacgttgaaactggagcctcacaggattggctgccccatgtggaggtgcagtcttatgatagtgactggacagaggccccagctgccgtggtaatcggtggcgaaacttacggggttagccttgaatctttacagctggctgaatcaactggaggaaagcgcctactcatccccgtcgtaccaggcgtcgatagcctcaattcagcaatggctgcttccatcctgctctttgaaggaaagaggcagctacggggacgagcagaagatttaagccgcgaccgctcataccactag

SEQ ID NO: 204046 - DNA, 4182 bp, synthetic construct
  misc_feature 1..4182: note = Description of Artificial Sequence: Synthetic coding sequence
  source 1..4182: mol_type = other DNA
atgctgagccggcccaagcccggcgagagcgaggtggacctgctgcatttccagagccagtttctggcggcgggcgcggctcctgcagtccagctcgttaaaaaaggcaaccgggggggcggggatgctaactcagacaggccacccttgcaagatcaccgggatgtggtgatgttggacaatttacctgacctgccacccgccctggtgccttcccctcctaagcgggcccggccaagccctggccactgtctgcccgaggacgaggatccagaggaacggttgcgccgccacgatcagcacattacagcagtactgacaaagatcattgagagagatacaagttcagtagcagtgaacctacccgtgccttcaggtgtggcctttcccgccgtgttcctgcgatccagggacacccagggcaaatccgccacatccggtaagagatccatcttcgcccaggagattgctgcccgacgtattgctgaggccaagggcccctccgtgggcgaggtcgtcccaaatgtcggcccgcccgagggcgctgtgacctgcgagacccccactccccgtaaccaaggctgtcagttgccgggatcctcacattctttccaagggcctaacctcgtcaccggcaagggacttagagaccaggaagccgagcaggaggctcagacaattcacgaggagaatatcgccaggctacaggcaatggcccccgaggaaatcctgcaggagcagcagagactcttggcccagctggatccttctctcgtagcctttttaaggtcgcatagccatactcaggaacaaacgggagaaactgcctcagaggagcagaggcccggaggaccgagtgctaacgtcacaaaggaggagcccctgatgagtgcttttgcgtcagaaccgaggaagcgtgataagcttgaacccgaggccccggcactggcattacccgtgacgcctcagaaagagtggctacatatggataccgtggagctcgagaagcttcactggacacaggatttaccacctgtgcgaaggcagcaaacacaggagcgcatgcaggcccgtttcagcctgcagggtgagttgctggccccagacgtggaccttcctacccacttgggacttcaccaccatggggaagaagccgaacgggccggctactccctgcaggagctgtttcatctgacacggagtcaggtgagccagcagagggccctggcactgcatgtattggctcaagtgatttcccgggcacaggcaggggagtttggcgaccgccttgcaggatcagtactctctctgctgctagatgctggcttcctgtttctcttaagattctccctggacgacagagtggacggagtgatcgctacagccatccgggcccttagagccctgctggtggccccaggcgatgaggagctcctggattccacttttagctggtatcatggagccctgacgttcccgctcatgccttctcaggaagataaagaagatgaagatgaggatgaggagtgccccgccggaaaagccaagcggaaatcccccgaggaggagagccgaccaccaccagatttggccagacacgatgtcataaagggattacttgctacctccttactgccaagactgaggtacgtgctcgaagtgacataccctgggcccgctgttgttctcgacatattggcggttctgatacgcctagctcgtcattccttggagtctgctacaagagttctggagtgtcccagactcatcgaaaccattgttcgcgagttcctgccaacaagctggagcccagtcggcgcagggcctacaccctctctgtacaaggtaccatgcgctactgccatgaaactgttaagagttctggcttccgccggacggaatatcgcagccagattactctcatcctttgaccttcggagtcggctatgtcggatcattgccgaagccccgcaggagctggccttgccacctgaggaagccgaaatgctaagtactgaggctctgagactgtgggcagtggctgcctcatacggccaaggggggtatctttaccgggagctctatcctgtgttgatgagagctctgcaagtggtgccgagggaactgtccacccatccacctcagccactgagtatgcagaggatagcctctctgttaacattattgacacagctgacgctcgccgcgggctccactcctgcagaaaccatctccgattccgcagaggcgagtctgagtgccacgccttctttagtgacatggactcaagtgtcgggattgcagccactggtggaaccatgccttagacaaaccctgaagcttctcagcaggccggagatgtggagagctgtagggcctgtgcccgtggcctgcttactctttctaggtgcttattaccaggcctggtcacagcagcccagctcttgtcctgaggattggttgcaggacatgcagcgtctatcagaagagctcttgttgccccttctgtcccagcccacactgggaagtctgtgggactcactgcggcactgcagcctgctatgcaatcctctcagctgcgtgcccgctctggaagcacccccttcccttgtcagcctgggatgttctggaggttgtccccgacttagcctggccggatcagcgtcaccgtttcccttcctcacggcactgctgtctctgctcaatacactggcacaaatccacaaggggttgtgtgggcagcttgccgccattctggcagcccccggacttcagaactattttctacaatgcgtggcccccggtgccgcccctcaccttacaccattttcagcctgggcgctgcgccacgaataccatctccagtatctggcgcttgctctcgcacagaaggccgccgcactacaaccattgccagccactcatgcagctctgtaccacggaatggctttggccctgctgtcccgcctactaccaggaagcgagtaccttacacatgagttactcttatcctgtgtcttcagactggagtttctgcctgagcgcacctctgggggacctgaagcggcggatttctctgatcagctcagtctggggtcttcccgcgtcccccgatgtgggcagggaacactccttgcacaagcctgccaggatctcccgtcgatccgtaactgttacctaactcactgttctccagcacgcgccagcttgttggcgtcccaggctctgcatagaggggagctccaaagggtccccaccctcttactgccaatgccaactgaacctctgcttcccacagactggccttttttgccgctcattcggctgtaccatagggcctctgacacgccctcagggctgtctcctaccgacaccatgggtaccgcaatgcgcgttctgcaatgggtgcttgtcctggagtcatggcggccacaggcactttgggccgtgccccctgccgcccggctggcacggttgatgtgcgtgtttctggttgatagcgaactgttcagagagagccccgtgcagcacctagttgcggccttactggcccaactttgtcagccacaagtcctgccaaatctgaaccttgattgtaggcttcctggcctcacttcattcccagacctgtacgctaacttccttgatcattttgaagcagtgtcattcggagatcatctatttggcgccttggtgctgctgcccctacagaggaggttttcagtaacactaagactcgccttgtttggggagcacgtgggggcactgcgcgctctgtcgctgcccctcactcaattgcccgtcagtctagaatgctacaccgttcccccagaagataacctggccttactgcagctgtactttcgaacactcgtgacaggcgcactccgcccccggtggtgccctgtgttatatgccgtggccgtcgcccatgttaatagcttcattttctctcaggacccccaaagctctgatgaagtcaaggccgcccggagaagcatgctccagaaaacctggctccttgccgacgaaggcttaaggcaacacctgttacactacaaacttccaaattccacattacctgagggtttcgaactttactcacaactgcccccgctgcggcagcattatctgcaacgcctgacgtctaccgtgctccaaaacggcgtgagcgaaacatag

SEQ ID NO: 204047 - DNA, 1839 bp, synthetic construct
  misc_feature 1..1839: note = Description of Artificial Sequence: Synthetic coding sequence
  source 1..1839: mol_type = other DNA
atggccgacttcgccggccccagcagcgccggccggaaggccggcgcccccaggtgttcacggaaagcagccggaaccaagcagacatctaccctgaagcaggaggatgctagtaaaaggaaagctgagctcgaagccgccgtgcgcaagaagatcgaattcgagcggaaggcactccatatcgtggagcagctcttggaagagaacattacggaggagttcctgatggagtgtggccggtttattacacctgctcactacagtgacgtagtagatgaacggagcatcgttaagctgtgtgggtatcccttgtgtcaaaaaaagctggggatcgtacctaaacaaaagtacaaaatttcaacaaagacaaataaggtgtatgatataacagagcggaagtcattttgcagtaatttctgttatcaagcttctaagttcttcgaagcccagatccccaaaacaccggtatgggtaagagaggaggagagacatcccgactttcagctgcttaaagaggagcagtctgggcactccggcgaggaagtgcagctgtgttctaaagcaattaagaccagcgacatcgacaatcctagtcacttcgaaaaacaatacgaatcttccagctcttccacgcattctgattcaagtagcgacaatgaacaggacttcgttagcagtatactgcccgggaaccggcccaattcgaccaacatccggcctcagcttcaccaaaaatctatcatgaagaagaaagccggacacaaagcaaatagtaagcataaagacaaagagcagactgtcgtggacgtgacagaacagctgggagactgtaagcttgattcccaagagaaggatgcaacttgtgagctcccactgcagaaggtgaacacccaaagctcttccaacagcacactgcccgagcgactgaaagcgtccgaaaatagcgagagtgagtactccagaagcgagattacacttgtgggcattagcaaaaaatcagccgagcatttcaaacgcaaattcgcgaagtccaaccaagtctcacgcagcgtgtcatcttccgttcaggtttgtccagaggttggcaagcgaaaccttctgaaggtgctcaaagaaaccctgatcgaatggaagactgaggagactctgcgttttctgtatggccagaactacgcgtctgtgtgtctgaaaccagaagcgagtttagtaaaagaggagctggacgaggacgatattatcagcgatccagatagtcactttcctgcctggcgcgaaagccagaattcactggatgaatccttacccttccgtggtagtgggaccgccatcaagccgcttccatcatacgaaaacctgaagaaggaaaccgagaagcttaatctaagaattagggaattttatcgcggaaggtatgtcttaggcgaagagactactaaatcgcaggactcagaggagcatgatagcacttttcctttgatagacagcagcagccaaaatcagatccggaaaaggattgtgctcgaaaagctgagcaaagttttgccgggactcctcgtgccgctccaaataactctcggcgatatctatactcagctcaaaaatttagtgagaaccttcaggctgacaaaccgcaacattattcacaaaccggctgagtggactcttatcgccatggtcctactctctctcctgacccccatcttgggcatccaaaaacactctcaggaaggcatggtattcactcgcttcttggatactttgctggaagaactgcacctaaagaacgaggatcttgagagcctgacgattatcttcagaacatcatgcctccccgagtag

SEQ ID NO: 204048 - DNA, 1755 bp, synthetic construct
  misc_feature 1..1755: note = Description of Artificial Sequence: Synthetic coding sequence
  source 1..1755: mol_type = other DNA
atggccgacttcgccggccccagcagcgccggccggaaggccggcgcacctcgatgtagcaggaaagcggccggaacaaagcaaacgtccacacttaaacaggaggacgcatcaaagcgaaaagccgaacttgaagccgcagtccgtaaaaagatcgaattcgagcgaaaagccctacatatcgtggaacaactcctcgaagaaaatatcactgaggagttccttatggaatgcggcagatttattaccccagcccattatagcgacgtggtggacgaacgtagcatagtgaagctctgcggctatcccctgtgccaaaagaagctgggaatcgtgcccaagcagaagtataagatctcaaccaaaactaacaaggtgtatgatatcaccgaacgtaagtctttttgctcaaatttctgctaccaagcatcaaagttctttgaggctcaaatccccaaaacgccagtgtgggtcagggaggaagagcgccacccggactttcagctactgaaggaagagcaaagcggccattcaggggaggaggttcagctctgtagtaaggccataaaaactagtgacattgacaacccctcacactttgagaaacagtacgagagtagctcgtctagcacccactcagattcaagctctgacaatgaacaagacttcgttagctcaattttgccagggaaccgtcccaattcgaccaacattcgcccacaattgcaccagaagagcataatgaagaaaaaggccgggcacaaagctaatagcaaacataaggataaagagcaaactgttgtggacgtgaccgagcagcttggggactgtaaactggattcccaggagaaggacgcgacctgtgaactcccccttcagaaggttaacacacagagctcgtccaactcgaccttgcctgagagacttaaggctagtgagaactcggagtctgagtacagccgcagcgaaataactctggtaggaataagcaaaaaaagcgctgagcactttaagcggaaattcgcgaaatcaaaccaggtaagccggtctgtaagctcctctgtgcaggtgtgtcccgaggttggaaagcgtaatctgctgaaggtgttgaaggagaccctgatcgaatggaaaactgaagagacacttcgctttttatatggacagaactatgcctccgtgtgtttaaaaccagaagcctcactcgttaaagaggagcttgatgaggacgacattatcagcgatccggatagtcactttcccgcctggagggaaagccagaattcactggatgaatccctgcctttccgcggttcaggtacggccattaagcccctgccttcttatgaaaacctgaagaaggagaccgagaagctcaatctgagaatccgagagttttataggggacgatatgtgctgggagaggaaactacaaagtcccaagactctgaagaacacgattccacttttcctctgatcgattccagctcccagaatcagatcagaaaacggatcgtgctggagaagctgagtaaggtgcttcctggcttactagtgccactccagatcactcttggtgacatctatacccagctaaagaatctggtaaggacgttcagactcacaaatagaaatatcatccacaaacctgcagaatggacactcattgctatggtgctgttaagtttcttgcttaatgtcaagacgagaatcaaaacattcatgatgatatatttccacttaatgaactcctag

SEQ ID NO: 204049 - DNA, 1998 bp, synthetic construct
  misc_feature 1..1998: note = Description of Artificial Sequence: Synthetic coding sequence
  source 1..1998: mol_type = other DNA
atgaccagcgccaacaaggccatcgagctgcagctgcaggtgaagcagaacgctgaggagctgcaggatttcatgcgcgatttagagaattgggagaaagacatcaagcaaaaagatatggagctgcgccgacagaatggcgtgccagaagaaaatctccccccaattagaaatgggaacttcagaaaaaaaaaaaagggtaaagccaaggagtcctccaaaaaaactagagaggagaacactaagaataggattaagtcttacgactacgaggcctgggccaaattagacgttgatcgcatcctcgatgaactggataaggatgacagtacccacgagtctctgtcccaggaaagcgagagcgaggaggacggcattcatgttgacagccagaaggcgttagtgctaaaagagaagggcaacaaatacttcaagcaagggaaatacgacgaggctatcgactgctatacaaaaggaatggacgccgacccttacaacccggtcctgcccacaaaccgcgccagtgcctatttccgactgaagaagttcgcggtggccgagagtgactgcaacttagcagtggctctcaataggtcatatactaaagcctattctagaaggggggccgcccgcttcgctctgcagaaattagaggaggcaaaaaaagactatgaaagagtgttggaacttgaacctaataactttgaggccaccaatgagctgcgaaaaatctcccaggccctggcttccaaggaaaacagttatccaaaggaggccgatatcgttatcaagtccactgagggcgagagaaagcaaatcgaggcccagcaaaataagcagcaggctatcagcgagaaagatcgcggaaatgggttcttcaaggaggggaagtatgagcgggctattgagtgctatacccgggggattgccgcggacggcgccaacgccttgctgccagcaaaccgggctatggcttatctgaaaattcagaagtacgaggaagccgagaaagactgtactcaggccattctgcttgacgggtcatattcgaaggccttcgccaggcgcggaacagctcgtacgtttctagggaaacttaatgaggcaaagcaagattttgaaaccgtcttgctattagagcccggcaacaaacaggcagtgactgaacttagtaagattaagaaagagctcatcgagaagggccattgggacgatgtcttcttagacagcacacaacggcagaacgttgtgaagcccatagataatccaccacacccagggtctaccaagcccctcaagaaagtgatcatcgaagagaccggcaatctcatacagacgatagatgtgccagacagcacgactgccgcagccccagagaacaatccaatcaatcttgcaaatgtcattgcggcgacgggcacaaccagtaaaaaaaattctagccaggatgacctgttcccaacgagcgacacaccacgcgctaaggtgcttaaaattgaagaggtttcagatactagtagcctgcaaccacaggcgagtctcaaacaggacgtttgccaaagttatagcgaaaaaatgccaatcgagattgaacaaaagcctgcccagttcgccactaccgtcctccctcccatcccggccaacagttttcagcttgaaagtgactttcggcagctgaagtcctctcccgatatgctttatcagtacctgaaacaaatagagccatccctgtatcccaagctgtttcaaaagaaccttgacccagacgtcttcaaccagatcgtcaaaattctccacgatttttatattgagaaagagaagccgctcctgatctttgaaatcctccagcggctttcagaattgaagcgtttcgatatggccgtgatgttcatgtccgagacagaaaaaaaaattgctagggctctgttcaatcatatcgataaatctggtcttaaagattcttcagttgaggaactcaagaagaggtacggagggtag

SEQ ID NO: 204050 - DNA, 1896 bp, synthetic construct
  misc_feature 1..1896: note = Description of Artificial Sequence: Synthetic coding sequence
  source 1..1896: mol_type = other DNA
atgaccagcgccaacaaggccatcgagctgcagctgcaggtgaagcagaacgcggaagaactccaggacttcatgcgcgatctggagaactgggaaaaggatataaaacaaaaggatatggagctgcgacgccagaacggggtaccggaggagaacttgccccccatccggaatggtaattttagaaagaagaagaaggggaaggccaaggagtcaagcaaaaagacccgggaggaaaacacaaagaatagaatcaagagttatgactatgaggcctgggccaaactcgacgtggatcggatactggatgaattggacaaagacgacagtacacacgagtctctctcccaggagagtgagagcgaagaagacggaatacacgttgatagccagaaggctctggtcctgaaagagaaaggtaataagtacttcaaacagggtaagtacgatgaagccattgactgttacacaaagggcatggatgccgatccatacaatcctgttctgcccaccaacagggcctcggcgtattttcggctaaaaaaattcgcagtggcagaatctgactgtaacctcgcagtagccttgaacagaagctacacgaaagcctatagccggcgcggggcggcacgctttgcactacagaaattggaggaggccaaaaaggactacgagagggtgcttgagttagagcccaacaatttcgaagccacaaacgaattacgaaagatttcacaggccctggcatctaaagagaatagttacccaaaggaagcagacatcgtgataaaatcaaccgagggcgagcggaaacaaatcgaggcccagcagaacaagcagcaggccatatcggaaaaagacagaggcaatggattttttaaagaaggcaagtatgagcgagccatagaatgctacacaagggggatagccgcagatggcgctaacgcgcttttacccgctaacagagcaatggcttacctcaagattcaaaaatacgaagaggccgagaaagactgcacgcaggcaattctgttggatggtagttattcgaaggcatttgccaggcggggaacagccagaactttcctgggaaaactgaacgaagccaagcaggactttgaaacggttctgcttctggaaccagggaacaaacaggccgtgactgagttgtctaaaattaagaagaagcccctgaagaaagtgataattgaagagaccgggaatctgatccagacaatcgatgtgcccgatagcactaccgctgccgccccggagaacaacccaattaacctggccaacgttatcgctgccactgggactacttccaaaaagaactcttctcaggacgacctcttccctacaagcgacaccccgagagcgaaggtgctgaaaattgaggaggtgtccgacacaagctctttgcagccacaggcgtctctgaaacaggatgtgtgtcagtcctactccgagaagatgccaattgagattgagcagaaacccgcccagtttgcaaccacagtgttgcccccaatccccgccaactcgttccagttggaatcagattttcgacaactgaaaagctctcctgacatgctgtatcagtacctaaagcagattgagccgtcattgtaccccaagctcttccaaaaaaatctggatcccgacgtattcaaccagatcgtaaagatcctgcatgacttttatatcgagaaagaaaagcccctcctaatctttgaaatcctccaacggctcagcgagttgaaaagatttgatatggcagtaatgtttatgagtgagaccgaaaaaaaaattgcaagggcactctttaaccacatcgacaagtcaggtctaaaggacagcagcgtggaagaactgaagaagcgttatgggggatag

SEQ ID NO: 204051 - DNA, 1521 bp, synthetic construct
  misc_feature 1..1521: note = Description of Artificial Sequence: Synthetic coding sequence
  source 1..1521: mol_type = other DNA
atggacgccgacccctacaaccccgtgctgcccaccaaccgggcctcagcctatttccgtcttaaaaagtttgcagtggcagagtctgattgtaacctggccgtggctctgaatcgcagctatactaaagcctatagccggaggggagccgctaggttcgcactgcagaaactggaagaggccaaaaaggattacgagcgtgtgctagagctggagccaaataactttgaagccaccaacgagttgcgaaagatcagtcaagccctggcctctaaggagaatagctacccaaaggaggcagatattgtcattaaatctaccgagggtgaacgaaagcagatcgaggcacagcaaaacaaacagcaggccatctccgaaaaagaccgggggaacggttttttcaaggaaggaaagtacgagcgcgccatagaatgctacacccgcggtatcgccgctgacggagctaatgctctgttaccagccaacagagccatggcgtatctaaagatacagaagtatgaggaggctgaaaaggattgcactcaggctatcctgctggatggttcttatagtaaggcttttgcgcggcgaggaaccgcaagaacattcttaggtaaactgaacgaagcaaagcaggattttgagaccgtcctgctcctcgaaccaggtaacaagcaggcggtgactgagctgtcaaagattaaaaaggagctgatagagaaggggcattgggacgatgtgtttctggatagcacccaaagacaaaacgtcgtcaaacctattgacaatcctcctcatcccggctccactaaacctcttaagaaagtgatcatagaggagaccggcaacctgattcagactatcgatgtccccgattcaactactgccgccgcccccgaaaataaccctatcaacctggcaaacgtaatcgctgccactggtacaacttccaaaaaaaattccagtcaggatgacttattcccaacatctgataccccaagggcaaaggttctgaaaatcgaagaagtttcagacacatcctccctacagccacaggcatctcttaagcaggacgtatgccagtcctactctgaaaagatgccaatcgaaattgaacagaaacccgcccagtttgccactacagtgctcccgcctatcccagcaaacagcttccagcttgagtctgatttcaggcagctcaaaagcagccctgatatgctttatcagtatctgaaacagatcgagccaagtctgtatcccaaactttttcagaagaatctggatcctgatgtgttcaaccaaattgtgaaaatattgcatgatttctacatagagaaagaaaagcccctgctcatttttgaaattttgcagcgccttagcgagctgaaacgctttgacatggctgttatgttcatgtccgagacggagaaaaagatcgctagggctctttttaatcacatcgacaagtccgggctcaaggatagcagcgtcgaggagcttaaaaagcggtacggcgggtag

SEQ ID NO: 204052 - DNA, 4821 bp, synthetic construct
  misc_feature 1..4821: note = Description of Artificial Sequence: Synthetic coding sequence
  source 1..4821: mol_type = other DNA
atgatcgccgagcccgcccacttctacctgttcggcctgatctgcctatgtagcggcagtcggttgcgccaggaagactttcctccccgcattgtggagcatccttccgatctaatagtaagtaagggggagcccgccacgctgaactgtaaggctgaaggccgaccaacccctaccatcgagtggtacaaaggcggagagcgggtggaaaccgataaggacgacccaagaagtcacagaatgctccttccaagtggctctctattctttctgagaatagttcacggtcgaaaatcgaggccggatgagggggtgtacgtctgcgtggcgcggaattacctgggcgaggctgtgagccataatgcaagcctggaagtggcaatcctgcgggatgattttcgtcagaatcctagcgacgtgatggttgccgtcggcgagccagccgtgatggagtgtcaaccaccaaggggccatcccgaacctactataagctggaagaaggatgggtctccccttgatgataaagacgaacgcatcaccatcagagggggcaaactgatgattacatatacacgcaaatctgatgccggcaaatatgtgtgcgtgggtaccaacatggttggcgaaagagaaagcgaggttgcggaactaacagttctcgagaggccatctttcgtaaagcggccaagcaacttggccgttacggtagacgattctgccgagttcaagtgtgaggcaaggggagaccctgtcccgacagtaaggtggcggaaggacgacggagaacttccaaagtctagatatgaaatcagggatgaccacactttaaaaataaggaaggtgaccgcgggcgatatggggagctacacatgtgtggcggaaaacatggtcggcaaagcagaagcctctgctactctaactgtgcaagccccttccgagccaccccacttcgttgtgaaacctcgtgatcaggtggtagccctcggacgcaccgtgaccttccagtgcgaggctacgggcaaccctcaaccagctattttctggcgccgggaaggctctcagaatctgctcttctcttaccaaccgccccagtcaagcagccggttttccgtgtctcagaccggagatctgactatcactaacgttcagcgatccgacgtcggctattatatttgccaaacattaaacgtcgccggatcaataatcacgaaggcctacctggaagtcactgacgtcatagccgacaggccaccaccagtgattcggcagggacccgtaaatcagacagtggcagtcgacggtacctttgtcctgtcatgtgtggccacaggatccccagtgccaacaattctatggaggaaagatggagtgttagtgtccactcaggacagcaggattaaacagctagaaaacggagtccttcaaataagatacgcaaagctaggcgacactggacggtatacttgtattgcaagcacaccttccggagaggcgacatggtcagcctacatcgaggtacaggagtttggcgtgccagtgcagccaccccggcccaccgatccaaatctgattccgtcagccccttcaaagcctgaggttacggatgtatccagaaacaccgtcaccctgtcttggcagcctaaccttaattccggtgccacccccacatcgtatatcatcgaggcattttcccacgcttccggcagctcctggcagactgtagctgagaacgtaaagactgaaacgagcgctattaaaggactgaagcctaacgccatatatttgttcctcgtgagggcagccaacgcctacggaatctcggatccaagccagattagcgatcccgtcaagacacaggatgttctccctaccagccagggagtggaccacaagcaagtgcagcgggagttaggcaacgctgtgctccatttgcacaacccaactgtcctgagcagctcttcaatcgaagtgcactggactgtggaccagcagtctcaatatatccagggttataagatcctgtacagacctagcggcgccaatcatggagagtctgactggttggtgtttgaggtccgcaccccggcaaagaacagtgtggttatcccagacctccggaagggtgtcaattatgaaattaaggctcggccatttttcaacgaattccagggggcagacagtgagatcaaattcgcaaagaccttggaagaggcaccgtcggcccctccacagggcgtaaccgtttcaaaaaacgatggcaacggcacagcgatcctggtgtcctggcagcctccccctgaagacacacaaaatggcatggtccaagaatataaggtctggtgcctgggcaacgaaacccgctatcatatcaataaaaccgtggatggaagtaccttctcggtcgtcataccctttctcgtacccggcattaggtacagtgtcgaggtggccgcctctaccggagccgggtcgggtgtaaaaagtgaacctcagttcattcagttggatgcacacggcaaccctgtgtctccggaagaccaagtatcgctggcacaacagatctctgatgtggtgaagcaacccgcattcatcgcagggatcggggccgcatgctggattatccttatggtcttcagcatttggctatatcgtcatagaaagaaaagaaacggcctgacttctacatacgccggaatacggaaggtaacatatcaaagaggaggcgaggccgtctcttccggcggccggcccgggctgctcaatatctcagagcctgccgcacagccctggctggcggacacatggcccaatactggtaataatcacaatgattgttctatttcgtgctgcactgcagggaacggcaactccgacagcaacctgacaacttattccaggcctgcagattgcattgcaaactacaacaaccagctggacaacaagcagaccaatctcatgttgccagagtctacagtgtacggagacgtggatctctccaataagatcaatgagatgaaaacgttcaattcgccaaatctcaaggacgggcgttttgtcaacccgtcaggtcagcccacgccatacgcaactacacaacttatccagagcaatctgagcaataacatgaataacggctccggagattcaggagaaaagcactggaagcctctgggccagcagaaacaagaagtggctcctgtacagtacaacatcgtggagcagaataaacttaataaggactacagggccaatgacacagtgccacctactatcccttacaatcagtcctacgatcagaatacgggtggaagctacaacagcagtgatagagggtcttcaacgtcggggagccagggacacaagaagggcgcccgcaccccgaaggtccccaaacagggaggaatgaactgggcagacctactgcccccgccacctgctcaccctcccccccactccaactccgaagaatacaacatttccgttgatgagagctacgatcaagaaatgccctgtcccgtaccacccgcgcggatgtacttgcagcaggatgagctggaggaggaggaggatgaacgagggccgacccccccggtacggggtgccgcgtcttcccccgccgctgtgtcatattctcaccagtcaaccgcaacattgacgccgagcccccaggaagaactccaacccatgttgcaggattgcccggaggagacagggcatatgcagcaccagccggaccggcggcggcagcccgtgtccccaccaccgcctccccgacctatatcgccgcctcacacatatgggtatatctctggccccctggtcagcgatatggacacagacgctccggaggaggaggaagatgaggctgacatggaggtggccaaaatgcagactcggaggttgctactcaggggactcgagcagactccggctagcagtgtgggagacctggagtcatcagtcactggatcaatgattaatggctggggatctgcatctgaagaggataatatttccagtggaaggtcgtccgtctctagttccgatggatcttttttcaccgacgctgactttgcacaggctgtggccgcggcggctgaatatgctggcctgaaggtggcaagacggcaaatgcaggacgccgccggaaggaggcatttccacgcgtcccaatgtccccgcccaacaagtcctgtgagtaccgactcaaatatgtccgctgctgtgatgcagaagacgcgccccgccaagaagctgaaacatcagccgggccacctgcgccgggagacctacaccgatgatctccctcctccccccgtgccccctcccgcgattaagtctcctacagcacagagcaagacccagttagaagtccgaccagtggtcgtgcccaaactgccgtctatggatgctaggactgataggtccagtgaccgaaaaggttcaagctataaagggcgggaggtacttgacggaaggcaagtcgtggacatgcgtacaaatccgggagatccccgggaggctcaagagcaacagaatgacggaaaggggcgaggtaataaagcagctaaaagagatctgcccccagctaagacacatttaattcaagaagacatacttccctactgccgcccaacttttccgacctcgaacaacccgagggacccatcttcctcctcgtccatgtcctcccgcggctcaggctctagacaacgcgagcaggcaaatgtgggccggcgtaacattgcagagatgcaagtgctgggaggctacgagaggggagaggataacaacgaggaactggaagaaacagagagttag

SEQ ID NO: 204053 - DNA, 4968 bp, synthetic construct
  misc_feature 1..4968: note = Description of Artificial Sequence: Synthetic coding sequence
  source 1..4968: mol_type = other DNA
atgaagtggaagcacgtgcccttcctggtgatgatcagcctgctgagcctttctcctaatcacctcttcttggctcagctgatcccagaccccgaggatgtggagagaggaaacgatcatggaacaccaattccaactagtgataacgacgataatagcctgggctataccggatctagactgcgtcaagaggactttcctcctcgcatagtggaacatccttctgaccttatcgtgagcaagggagagcctgctactctcaactgcaaagcagaaggcaggcctacacccactatcgagtggtacaagggtggagaaagggttgagactgataaagatgatccacgctctcaccgcatgttgctgcctagtggcagcctgttcttcctccgcatcgtgcacggtcgcaaatctaggccagacgaaggcgtgtacgtgtgtgtggctcgaaattatctgggggaggccgtctcgcataacgctagcctggaggtagctatccttcgtgacgattttcggcagaacccttcagatgtcatggtggccgttggcgagcccgccgtaatggagtgccagcccccacgtggacatcctgagcccactatttcctggaaaaaagacggtagcccgcttgacgacaaggacgagagaattaccatccggggcggaaagctgatgatcacatacacaaggaagtcggacgctgggaagtatgtatgtgtcggaacaaacatggtgggagaaagggagtccgaggtcgctgaattgaccgtgttggagcggcccagcttcgtgaagagaccaagcaacctggcagtaaccgtggatgactctgcagagtttaagtgcgaggctaggggggacccagtccccactgtccgttggagaaaggatgacggcgagctcccaaagagtaggtacgagattcgagacgaccatactctaaagattagaaaggtaactgcaggcgatatgggtagctatacttgtgtcgctgaaaacatggtgggcaaagcagaagcttccgcaacactgacagtgcaggaaccgccccacttcgttgtgaagccaagagatcaagtggtcgctctgggtcgtacggttacattccagtgtgaggccacgggaaatcctcagccggccatcttctggagacgggaaggcagccagaacctgctcttctcttatcagccccctcagagctcctcacggtttagtgtctcacagacaggagacctcacaatcacaaatgttcagcgctccgacgtaggctactacatttgtcagacactgaatgtcgcaggttcaatcataacgaaggcttatctggaggtaactgatgtgatcgccgataggcccccacctgtcatccgtcagggacctgttaatcaaaccgtggccgtcgacggtacattcgtgcttagttgtgtcgccactggcagccctgtgccgaccattttgtggaggaaggacggggttctggtttcaacgcaggactctcgtatcaagcagttagagaatggagtcctgcagatcagatatgccaagttgggggacacagggaggtacacctgcattgccagcacaccctccggcgaggccacatggagcgcctacatcgaagtgcagggtaaggttaatgagttcggcgttcccgtgcaacctcctcgacctactgatcccaatttgatcccctcggctcccagcaagcctgaagtgaccgacgtgagtcggaataccgttacgctgtcctggcagcccaatttgaatagtggtgcaacccctacatcttatataattgaggctttctcccacgcatccggatccagttggcagacggtggccgaaaacgtgaagaccgaaacaagcgcaattaagggactcaaacccaacgccatctacctgtttctcgtgcgcgccgccaacgcttatgggatctccgatccaagtcagatttcagatcccgtcaaaacacaggatgtgctacccacaagtcaaggcgtggaccataagcaagtccagcgcgagttgggaaatgccgtcctccacttacacaaccccaccgtgctgtcatccagttccatcgaagtgcactggaccgtggaccagcagagccagtacatccagggatacaaaattctctatagaccaagtggagctaatcacggagaaagcgattggcttgtcttcgaagtcaggaccccagccaagaattccgtggttataccagatctgagaaagggagtgaattatgagatcaaagccagacctttttttaatgagtttcaaggtgccgattccgaaattaagttcgccaagaccctggaggaagccccgagcgcccctccacagggcgtgaccgtgtccaagaacgacggaaatggaactgctatactcgtgtcatggcagccccccccagaagacacgcagaacggaatggtccaggagtataaagtctggtgtttaggcaatgagactcgataccacatcaataagacagtcgatggatctacattttctgtggtgataccttttttggtccctggtattagatactctgtggaggtggccgcctcaacgggagctgggagcggggtgaaaagtgaaccgcagtttatccagctggatgcccacggcaatcccgtaagccctgaagaccaggtgagccttgcccagcagattagcgatgtcgtcaaacagccagcattcattgctggcataggggcggcttgttggatcatcctgatggtgttctcaatctggctctaccgccacagaaagaagagaaacggtcttaccagtacatatgccgggataagaaaagtcccatcttttacatttacaccaaccgttacctaccagcgcggaggcgaggccgtgtcaagcggaggccgcccagggttgctgaatatctctgaaccagcggcccagccatggctggccgacacctggcctaatacaggtaataaccacaacgattgtagtatttcttgctgcacggccggtaacggaaacagcgactccaacttaacaacatactcacgacctgccgactgcatagctaactataataatcagctggataataagcaaaccaacctgatgctccccgagagcaccgtgtatggcgacgtggacttatccaacaagatcaacgagatgaaaaccttcaacagccctaacctgaaggacgggaggttcgtgaacccctcagggcaacctaccccctacgctaccacccagctgatccagtctaacctgagcaacaacatgaataacggaagtggtgacagcggtgagaaacactggaagccactgggacagcagaagcaggaggtagcaccagttcaatataacatcgtcgagcagaataagcttaacaaagactatagagctaatgacacagtgccgccaactattccctataaccaatcttatgaccagaataccgggggaagctataactcctccgacagagggagcagcactagcggcagtcaaggccacaagaaaggcgctcgcacacccaaagtccctaagcagggagggatgaattgggctgatctcctgcctcccccgcccgcacatcctcctccgcatagcaacagtgaggagtacaacatcagcgttgatgaaagttacgaccaagagatgccatgccctgtcccccccgctcgaatgtacttacagcaggacgaacttgaagaggaagaagatgagcgcggacccaccccacccgtacggggtgctgcttcttcacctgcagctgtgagctattctcaccagagtacagccactctgacgccatcaccccaagaggaactccaacccatgttacaagattgtcccgaggagacgggacatatgcagcaccagccggataggagaagacagccagtcagtcccccaccacctccaaggcctatctctcctcctcacacatacggatatatctctggtcccttggtgtccgacatggataccgatgcacccgaggaagaagaagacgaagctgatatggaagttgcaaaaatgcagactcggcggctcctactcagaggtctagagcagacgcccgcttctagcgtgggcgatctggagagcagtgttactggaagtatgattaatgggtgggggagcgcctctgaagaagataatatttcttctggcagatctagcgtcagcagcagtgacggctcatttttcaccgatgccgacttcgcccaggctgtggcggctgccgctgagtatgctgggctgaaagtggcaagacggcaaatgcaggatgcagcaggcagaagacattttcacgcctctcagtgtcccagaccaacatctcctgtgtccaccgattccaacatgtctgccgccgttatgcagaagacccgtcctgctaagaagcttaaacatcagcctggccatttacggagagagacctacaccgacgatctccccccacctcctgtccctcccccggccattaaatctcctaccgcccaatccaaaacacagcttgaagtgaggccggtcgtcgtgcccaaactgccgtcgatggatgcacgcactgacagaagtagcgatcggaaggggtcttcttataaaggacgagaagttcttgatggcaggcaggtggtcgatatgaggaccaacccaggcgaccctagagaggcccaggaacaacagaacgacggcaagggcagggggaacaaagctgcaaagcgggatctgcccccagcaaaaacacatctgatccaggaggacattctaccttactgccgcccaaccttcccaacgtccaataatccccgagatccttctagcagcagcagcatgagttccaggggcagcggttctagacagcgagaacaggccaacgtcgggcgccggaacatagctgaaatgcaggtgctgggagggtacgagcgcggagaggacaataacgaggagctcgaggaaccttccagctag

SEQ ID NO: 204054 - DNA, 4839 bp, synthetic construct
  misc_feature 1..4839: note = Description of Artificial Sequence: Synthetic coding sequence
  source 1..4839: mol_type = other DNA
atgatcgccgagcccgcccacttctacctgttcggcctgatctgcctctgttcaggctcccgattgcgtcaggaagattttccaccgcgcattgtcgagcatccatctgatctgatagtctctaagggcgaacctgctacactgaattgtaaggctgaaggccgccccacacccaccattgagtggtacaaagggggggaacgcgtcgagactgataaggacgatccgaggagtcacaggatgctgctgcctagcggcagtctgttctttctgaggattgtgcacggcaggaaatcacggcccgacgagggagtgtacgtgtgtgtcgcgagaaactacctaggtgaggctgtctcccacaatgcgtcactcgaggtcgcgatactgcgcgatgacttccggcagaatccgagtgatgtgatggtcgcagtcggcgagcctgccgttatggaatgccagcctccgcggggacaccccgaacccacaatctcctggaagaaggatggctctcctctggatgacaaggatgagcgcataacaattcgtggtgggaagcttatgattacatatacaaggaaaagcgacgctggcaagtacgtatgtgtcggcactaatatggtcggggagagggagtcagaagtggctgagcttactgtgttagaacgcccgagttttgtgaagcgcccgtctaacctggcagttaccgttgatgattcagcagagtttaagtgtgaagcccgaggggaccccgttccgaccgtgaggtggagaaaagacgacggcgaactgccaaaatcccgctatgagatacgcgatgatcatacgctgaagatcaggaaagtaactgccggtgacatgggcagctatacgtgcgttgcagagaatatggttgggaaggcagaggctagtgctacactgactgtccaggaaccccctcacttcgtcgtaaagcccagagatcaggttgtcgccctggggagaaccgttacatttcagtgcgaagcaacaggtaatccccagcctgctatcttttggcggcgggaaggaagccagaatctgttgtttagctaccagcccccgcaatccagtagccggttctctgttagccagaccggcgatctcacgattaccaacgttcagcgaagcgacgttgggtactacatctgccagactttgaatgttgccggcagcataatcactaaggcctacctcgaggtcactgatgtgatcgccgatcggccccctcccgtgatccggcaaggacctgttaaccaaaccgtggcagttgacggaacttttgtgctgtcctgcgtggcaactggtagccctgtgcctacgatcctgtggcggaaggatggcgtgctggtgtcgactcaagatagtcggatcaagcagctcgaaaacggtgtgctgcagattcgatatgccaaactgggggacaccggaaggtacacttgtatagcctctaccccctctggagaagctacttggtcagcatacattgaggtccaagagtttggtgtgccagtacagccacctaggcctacagatccgaatttaattccaagcgctccttccaaacctgaggtgacagacgtatctcggaacacagttacattgagctggcagccgaacttgaattctggcgccactcccacttcctatattatcgaagcttttagccacgcttctgggagctcgtggcagaccgtggccgaaaacgtgaagacggagaccagtgcaattaaaggattgaaacctaacgcaatctatctgttcctcgtgagggctgctaatgcctacggtatctccgacccaagccagatctcagatccagttaagacacaagacgtgcttccaactagccagggggtggaccacaagcaagtccagagggagcttggaaacgccgttttgcacctgcacaaccccaccgttctgtcctccagttcgatcgaagtgcactggactgtggaccaacagtcacagtacatccaaggctataagattctgtataggccctccggggctaaccatggagaatctgactggctcgtgtttgaggttaggacacctgccaagaactccgtcgtaatacctgatctgcgcaagggtgtgaactacgaaataaaggcacgaccgttctttaacgagtttcagggagccgacagcgaaatcaagttcgcaaagacacttgaggaggcacccagcgccccccctcagggagtgaccgtgtccaaaaacgacggaaacggcactgccatcctcgtgtcatggcagccgccgcctgaggatactcagaacggaatggttcaagagtacaaggtctggtgtctgggtaacgagacccggtatcacatcaataagaccgtcgatggctctactttttccgtggttatcccattcctagtgcccggcattaggtattctgttgaagtagctgcatccactggcgcaggctccggtgtgaaatctgaaccacaattcatccagcttgacgcgcatgggaaccctgtgtcacccgaagaccaggtaagtctcgcgcagcagattagcgacgtggttaaacagcccgccttcatcgctggcattggggccgcctgctggatcattctgatggttttctccatctggctatatcgacaccggaagaagcggaatggccttacctctacatacgccggtattaggaaagtgccaagctttaccttcactcctactgtgacataccagaggggaggagaggctgtcagcagtggtggcaggcctggactcttgaatatctcggagcccgcagctcagccctggttggcagacacctggccgaatacagggaacaatcacaatgattgcagcatttcttgctgtacagccggaaatggtaatagcgactcaaacctgactacgtacagtcgacccgcagactgcatcgcgaattataataatcagctggacaataagcagaccaacctgatgcttcccgaaagcactgtgtatggtgacgtcgatctatctaataaaataaatgaaatgaaaacatttaactctcctaatctgaaggacgggcggtttgtcaacccatccggacagcctacaccttatgctactacacagctgatccagtccaacctgtcgaataacatgaataatggaagcggcgatagcggcgaaaaacattggaagcccctaggccagcaaaagcaggaagttgctccagtgcaatataatatcgtggaacagaataagcttaacaaagactacagagccaacgatactgtgccacctaccataccatataaccagtcctatgaccagaatacgggtggctcctacaactctagtgataggggtagctcaacctcagggtcccagggacacaaaaagggggccaggacccctaaggtgcccaagcaaggcggtatgaattgggctgacttactgcctcccccaccggctcatcctcccccacatagtaactcagaggagtacaacatcagtgtggacgagtcttacgatcaggaaatgccctgccctgtccctccggcccggatgtatttgcagcaggacgaactggaggaggaggaggacgaacggggcccaacgcctccagtcagaggcgccgccagctccccagccgctgttagttacagccaccagtcgactgctaccttaaccccctcccctcaagaggagctccaacctatgttacaagattgtcccgaggagactggtcacatgcaacaccagcctgacagaagaaggcagccagtgagtccaccgccacccccccgacctattagcccccctcatacatatgggtacatttccggtccactagtcagcgatatggacactgatgcacccgaggaggaggaagatgaggctgatatggaagtggcaaagatgcaaaccaggcggctgctcttacgcggtctggagcagacccccgccagctccgtgggggatttagaaagctctgtgacggggtcaatgattaatggctgggggtcagcctcagaagaggataatatttcttccgggcgatcctccgtttcaagctccgatgggtcatttttcacagatgccgatttcgcccaggcggttgcagctgcagccgagtacgctgggcttaaagttgcccgacggcagatgcaggacgctgcgggtagacgccacttccacgcatcacagtgtccccggccgaccagtcccgtgagcactgactccaacatgagcgccgccgtcatgcaaaagacccgtccggccaagaaactgaagcatcagcccggacacttgcgacgagagacgtacacagatgatctgccaccgccccctgtgccacctcctgccatcaagtcacccaccgcccagagcaaaacacagctcgaggttagacctgtcgtcgtacctaagctgccctctatggatgccagaacagataggtcaagcgatagaaagggctcctcctacaaaggacgggaggtgctcgatggccgacaggttgttgacatgaggacgaatcctggtgatccacgcgaagcccaagaacaacaaaacgacggtaagggtcgcgggaataaagcagccaagagagacctccctcctgcgaaaactcacctcatccaggaagatatcctcccttattgccggccgaccttcccgacaagtaataatccaagggacccttcatctagcagtagtatgagctccagaggatccggctctcggcaacgggagcaggccaacgttggaaggaggaacatcgccgagatgcaggtgttaggcgggtacgaacgcggagaggataataatgaggagttagaggagaccgagtcctag

SEQ ID NO: 204055 - DNA, 4956 bp, synthetic construct
  misc_feature 1..4956: note = Description of Artificial Sequence: Synthetic coding sequence
  source 1..4956: mol_type = other DNA
atgaagtggaagcacgtgcccttcctggtgatgatcagcctgctgtctctctccccgaaccatctatttctggcacagctcatccccgacccagaagacgttgagaggggaaacgaccacggaacaccaattccaacgtctgacaatgacgataattccctcggctacacaggctcaagactgagacaggaagactttccaccgcgcatcgtggagcacccaagcgacttaatcgtgagcaaaggcgaacctgctaccctcaattgtaaggcggagggccggccaactcctaccatcgagtggtacaaaggaggagaaagggtggaaactgacaaagacgatcctcggtcacaccgaatgttgttgccatccgggtcgctgttcttcctccgtatcgtgcacggacggaaatctcgcccggatgaaggtgtgtacgtttgcgtggctaggaattacctgggcgaggccgtgtcccataatgcttccttagaagtggctatcctcagagacgattttcgacaaaatccttctgatgtaatggtggcggtcggcgagccagctgtgatggaatgtcagcccccacgcggccatcccgaacccacaatctcctggaagaaggatgggagtccgcttgatgacaaggacgagcggattaccatcaggggcggtaaactgatgataacttacaccaggaagtctgacgctggcaagtacgtgtgtgtcggaacaaacatggtgggcgagcgtgaaagcgaggttgcagaactcactgtcctagaaagacccagttttgtcaaacggccatccaatctggcggtcactgtggatgattcagctgaatttaagtgtgaagcgcggggcgatccagttccaacggtgaggtggcgcaaggatgatggtgagttgccaaaaagcagatacgaaatccgcgacgaccatactctgaaaatccgtaaagtgactgcgggggacatgggctcatatacctgtgttgcagagaatatggtggggaaggcagaggccagtgccaccctgaccgtgcaggagcctccacactttgtcgtaaaaccccgcgaccaagtggtcgctctgggccgaacagtgacttttcaatgcgaggccactggcaacccccagccggcaatcttctggcgcagggagggatcccagaacctccttttcagctatcaaccaccacagagttcatctagattttctgtcagtcagaccggggacttgactattacgaatgtccaacgcagcgacgtggggtattacatttgccagacgctgaacgtggccggctctatcatcaccaaagcatacttggaggtgactgacgtcattgctgatcggcctcccccggtcatcaggcaaggacccgtgaatcagactgttgcagtggatggaacctttgtcctgtcatgcgtggcaaccggaagccctgtgcccaccatcctctggagaaaggacggagtcttagtcagtactcaagacagccgcatcaagcagttagaaaatggagtgctgcagataaggtacgccaaactgggcgacaccggtagatatacctgtatcgcgtctaccccgtcgggtgaagccacttggagcgcctacattgaggtacaggagttcggtgtgcctgtgcagccgcctcggcccaccgatccaaacctgatcccaagtgccccttcgaagcctgaggtgaccgacgtctcccgcaacactgttactctgagctggcagcctaatttgaattccggcgccactcccaccagctatatcatagaggccttttctcacgcaagcggctcatcatggcagacggtagcagaaaatgtgaagacggagaccagcgcaatcaaggggctgaagccgaacgctatatatttatttttagtgagagccgcgaacgcctacggtatcagcgatccatcccaaatcagcgacccagtcaagacccaggacgtcctcccaaccagccaaggggtcgaccacaaacaggtacagcgggagttggggaacgctgtgttacacctgcacaatcccacagtcctgtcttcctcttctatcgaggtccactggactgttgatcagcagtcacagtatatccagggatacaaaattctgtatcggccatccggtgcgaatcacggtgagtccgactggctcgtttttgaggttcggactcccgccaagaattccgtcgttatacccgacttacgaaagggcgtcaattatgagatcaaggccagaccatttttcaacgaattccagggtgccgattccgagatcaaattcgcaaagactttggaagaggctcccagcgcccctccccagggagtgacagttagcaaaaatgatggaaatggtactgccattcttgtgtcatggcaaccacctccagaagacactcagaatggcatggtgcaggagtataaggtatggtgcttgggaaacgaaacgaggtaccatatcaacaagaccgtggacgggtccacattctcagtcgttattccctttttggttcctggaatacggtactctgtggaggtggcagctagtactggtgctggctctggcgttaagagcgagccacaatttattcaactcgatgcccatgggaatcccgtatcgccagaggatcaagtttccctcgcccaacagatttccgacgttgtcaagcagccggcattcatagcaggcatcggggctgcctgttggatcattttgatggtgtttagtatctggttgtaccgacacagaaaaaagagaaacggactgacatcaacatatgcggggataaggaaagtgccgtcattcacgtttacccctaccgtgacataccagagaggcggggaagccgtgtctagtggtggtaggccaggcctgcttaacatcagcgaacctgcggcccaaccgtggctggccgatacctggccaaacaccgggaataaccataatgactgctctatctcctgctgtaccgccggtaacggcaacagtgacagtaacttgacaacatattcgcgtcctgctgactgtattgccaattataacaatcagcttgacaataagcagacgaacttgatgttacccgagagcaccgtatacggggacgtcgatctgtcaaacaagatcaacgagatgaaaacttttaactctcccaacctgaaggacggtaggttcgtgaatccttccggtcagcccactccatatgcaaccacacagctcattcagtcgaacctgtctaacaatatgaataatggaagcggagacagcggagagaagcattggaagccattaggacaacaaaaacaggaagtggccccagtgcaatataatatcgttgaacagaacaagctcaataaagactatcgcgctaatgatacagtcccacccactatcccctataatcagtcctatgaccagaacaccgggggttcctacaactcttccgaccgcgggtcttctacgagtgggtcccagggccacaagaaaggtgccaggacaccgaaggtgcccaagcagggcgggatgaattgggccgatctcctgccaccaccacccgctcatccgccaccccactcaaattctgaggagtataatatctccgtggacgaaagctatgaccaggagatgccctgcccggtgcctccggcacggatgtacctgcaacaggacgaacttgaagaggaagaggatgaaagaggcccgacacctccagtacgcggcgctgcatccagccctgctgcggtgtcttatagccaccagtcgaccgctacccttacaccctccccccaggaagagctccaaccaatgcttcaagactgccccgaggagacggggcacatgcagcaccagcccgataggcgcaggcaaccagtatctcctcccccgccacctcgacctatttcacccccacacacctacggatacatctccgggccccttgtgagcgatatggacacagatgccccggaggaggaggaggatgaagccgacatggaggtcgccaaaatgcaaacgagacggttactcttgagggggctcgagcaaactcccgcatccagcgtgggggatctggagtcctctgtgacggggtcgatgattaatgggtgggggagcgcaagcgaggaagataacatcagctctggtcgctcatcggtttcttcaagtgacgggtccttctttaccgacgcggattttgcccaagccgtcgcagccgctgcggagtacgctgggctcaaggtcgctcgccggcagatgcaagatgctgctgggcgccgccactttcacgcttcccaatgccctaggcctacctcaccagtgtcaactgatagcaacatgtcagccgcagtaatgcaaaagacaagaccagccaagaaactcaaacaccaaccgggtcaccttagacgggagacttataccgatgacctacccccacctccggtcccaccacccgcaatcaaatccccaactgctcagagtaaaacccagctcgaagtacggcccgtagtggtcccaaaactgccaagcatggacgctcgtaccgatcgatcttccgacaggaaggggtctagctataaaggtagagaggtgctggacggaagacaagtcgtggacatgcggaccaatcccggggatcctcgggaggcacaagagcagcagaatgatggtaaaggacgcggcaataaagctgcaaagcgcgacctgcccccggccaagacacacctcatccaggaggatatcttaccatactgtagacccacgtttccaacttctaataatccacgggatccgtcctctagttcaagcatgagctcgagggggagtggtagcaggcagagggaacaggctaacgtcgggcgccgtaatattgctgagatgcaggtcctgggcgggtatgagcgcggggaagataacaatgaggagctggaagaaaccgagagttag

SEQ ID NO: 204056 - DNA, 4656 bp, synthetic construct
  misc_feature 1..4656: note = Description of Artificial Sequence: Synthetic coding sequence
  source 1..4656: mol_type = other DNA
atgatcgccgagcccgcccacttctacctgttcggcctgatctgcctgtgttctggctcaaggttacggcaggaagactttccccccaggatagttgagcatccgtctgatctgattgtgtccaagggggaacccgccacactgaactgcaaagccgagggcagacctacccccaccattgaatggtataagggaggcgaacgagttgagactgataaggatgaccctaggtcccaccggatgttgttgcctagcgggagcctgtttttcctgaggattgtgcacggccggaaatcgagaccagacgaaggtgtatacgtatgcgtggctcgaaattacctcggggaggccgtttcccataatgcttcgctggaggtagccattctccgggacgactttcgccaaaacccctccgacgtaatggtcgcagtcggtgagcccgcagttatggaatgtcaaccgccacgggggcatcctgagccgactatttcttggaaaaaggatggtagtccattagacgacaaggacgagcgcataaccatccggggagggaagttgatgattacctatacgcgtaaaagcgatgcaggcaagtacgtgtgtgtgggcacaaatatggtgggggagcgggagagcgaagtcgccgaactgaccgtgcttgaacggccgtcctttgtgaaacgcccctcaaaccttgccgtgaccgttgatgactcagctgagttcaaatgtgaagctagaggcgatccggtgccaacagtccggtggcgaaaagacgacggtgaattgccaaaatcacggtatgaaatccgggatgatcatacactcaagattagaaaagtgaccgccggcgatatgggaagctacacatgtgttgcagaaaatatggtgggcaaagctgaggcctctgcaactctcacagtgcaagtgggtagtgagccgccccactttgttgtgaaaccgcgcgaccaggttgtggcccttgggcggacagtgacttttcagtgcgaggccactggtaacccccagccagccatcttttggaggagggaaggaagccagaacttactatttagttaccaacccccacagtcatcctctcggttttcagtctctcagactggggaccttacaattaccaacgtacagcgctcagacgtgggatactatatttgccaaaccctaaacgtggccgggtctataatcaccaaggcctatcttgaagtgactgatgtgattgccgacagacctcctcccgtcatccgccaaggacccgtgaatcagaccgtcgctgtggacggaacgttcgtactgtcgtgtgttgcaaccggctcccccgtccccaccatcttatggagaaaagacggtgtgctcgtttcaacacaagattcccgcattaagcaactggagaacggtgttctacaaatccgatatgctaagcttggcgacaccggtcgatacacttgtatcgcctccacgccgtccggggaagcaacttggagcgcctacatcgaggtccaggaatttggcgtgccggtgcagcccccacggccaacggaccccaatctgatcccatccgctccgagtaagccggaggtgactgatgtgagccgtaatactgttacactgtcctggcagccaaatctaaacagtggtgcaacgcccaccagttacataatcgaagcttttagtcacgcctcaggcagcagctggcagactgttgcagagaatgtgaagactgagacatccgccataaaaggcctcaagccaaacgccatctatctgttcctcgtaagagcagccaacgcatacggcatatctgacccgtcccagatcagcgatcctgtgaagactcaggatgttctgcccacaagccaaggcgtcgatcataaacaggtgcagagagaactgggaaatgcagtgctgcacttacataacccaaccgtgctctcctctagtagcattgaggtccactggactgtcgatcagcagagccagtacatacaggggtacaagattctataccggccaagcggtgctaaccacggtgagagcgattggctggtcttcgaggtccgcactccagcgaagaactccgtcgtaataccagatctgcggaaaggagttaattacgaaatcaaagcaaggccattctttaatgagttccaaggagctgactctgaaataaaattcgccaagacacttgaggaggcacctagcgcccctccccaaggagtcacagtgtcaaaaaatgacgggaacgggaccgcaatattggtttcttggcagccccctcccgaggacacccagaatggtatggtacaggaatacaaagtctggtgtctgggtaatgagacaagataccatattaacaagacagtggatggaagcacatttagcgttgttattccatttttggttcccggcatcagatattccgtcgaggtggcagcctccaccggagccggatcaggcgtgaagtctgaaccccaattcatccagttggacgcccatggcaatcctgttagtccggaggatcaggtgagtctggcgcagcaaatttctgatgtcgttaagcagcccgcctttatcgcagggattggcgcagcctgctggatcatcctgatggtcttctctatttggctttacagacacaggaagaagaggaacggcctgacctcgacgtatgctggtatcagaaaagttacataccagaggggcggcgaagcagtctctagcggtggacggcccgggcttttgaatatcagtgaacctgcggcacagccctggctggcggatacatggcccaatacgggcaacaatcataacgattgttccattagctgttgtactgctggcaatgggaactctgactcgaatctaaccacttattcacgccctggtcaaccaacaccctacgcgactacccaactcattcagtcaaatctgtccaataatatgaacaatggatcaggcgatagtggcgagaaacactggaagcccttaggccagcagaagcaagaagtcgccccagtgcagtacaatattgtggagcaaaacaaactcaacaaagattatcgggctaacgacaccgtgcccccaactattccatacaaccagagttacgatcagaatactggcggttcctacaactcgtcagacagaggttcgtctaccagcggaagtcaaggccacaaaaaaggagcacggacccctaaggtgcctaaacaaggcgggatgaactgggccgatctcctgcccccaccgcccgctcaccctcccccccactccaacagtgaggaatataatatcagtgtagatgaaagttatgaccaggagatgccatgcccggtcccaccggccaggatgtaccttcagcaagatgaacttgaggaggaggaggacgagcgggggcccaccccccctgtgagaggagcggcttcctcccccgctgcagtgagctactcacatcagtcaacagctacgctcactccctcaccacaggaggagcttcaacctatgttgcaggactgtcctgaggaaactggacacatgcagcaccagccagaccggcgccggcagccagtgtcgcctcccccaccccccaggccaatctcgccgccacacacctatggttacatctctggaccactcgtgagcgatatggataccgacgcaccggaggaggaagaagatgaggccgacatggaagtggccaagatgcagaccaggcgactcctgttgaggggtctggaacagaccccggcatcctctgtgggtgacctggagtccagcgttaccggtagtatgatcaatgggtggggcagcgctagcgaagaagacaacatttcttccgggagaagcagtgtatcctcatctgatggttctttttttacagatgcagactttgcccaggcggtcgctgctgccgctgagtatgctggccttaaagtagcgcggaggcaaatgcaggatgctgcagggaggcgccattttcatgcctcccagtgtcccaggcctaccagccccgtttccacagattctaacatgagtgccgcagtcatgcaaaaaacaaggcccgccaagaaactcaagcaccaacccggccacctgcgtcgagagacatacactgacgacctgccacctccaccggtgccaccgcccgccattaaatcccccaccgctcagagcaaaacccagctggaggttcgccccgtggtggtgccaaaattaccatcaatggacgctaggaccgacagatcaagtgatcggaaagggtctagttataaagggagggaggtattggacggccggcaggtcgtggatatgaggaccaaccctggcgacccaagggaggctcaggagcagcagaacgacggcaagggacgtgggaataaggctgccaaacgtgacctccccccagccaaaacccacctaatacaggaggatatcttaccatactgtcgtcctaccttccccaccagcaacaatccaagagacccttccagtagctcctccatgagcagcaggggttccgggagcagacagagagagcaggctaacgtaggcagaaggaacatcgctgagatgcaggtcctaggcggatacgaaagaggagaagataataatgaggaactcgaggagaccgagtcctag

SEQ ID NO: 204057 - DNA, 4821 bp, synthetic construct
  misc_feature 1..4821: note = Description of Artificial Sequence: Synthetic coding sequence
  source 1..4821: mol_type = other DNA
atgatcgccgagcccgcccacttctacctgttcggcctgatctgcctttgcagcggatctaggctgcgtcaggaggactttccgcctagaatcgtcgagcacccctccgatttaattgtttccaaaggggaaccggccaccttgaattgtaaggcggagggcaggcctactcccactatagagtggtacaaaggcggtgagagagtggagaccgacaaggatgatccaaggtcccatcgaatgctgctcccttcaggcagcttgttttttctcagaatagtgcatggccgtaaatccagacccgatgaaggggtctatgtttgcgtggcccgtaattacctcggtgaggcggtgtcacataacgcctctttggaagtggctattctgagagatgacttcagacagaacccttctgatgtaatggtagcagtcggggaacctgcagtgatggaatgccaaccacctcggggccatccagagcctacgatcagctggaagaaagacggctcacctctggacgacaaggatgagcgaattaccatccggggggggaaactgatgattacttacacaagaaaaagcgacgcaggtaaatatgtgtgcgtgggaacaaacatggtaggcgagagggagagtgaagtcgccgagctcacagtgctagaaagaccatcctttgtcaagagaccctctaacctggccgtgactgtcgacgacagtgcggagtttaagtgcgaagcaagaggggatcccgtgcccacggtgagatggcgcaaagacgacggagagttgccaaaaagcaggtacgagattagagacgatcacacccttaaaattagaaaagtcacagcaggggacatgggctcctacacttgtgtggcagaaaatatggtcggaaaggctgaggcatccgccacgttgacagtacaggtcgggagcgaacctcctcacttcgtggtcaagccacgggaccaagtggtggcgttaggccggaccgtaacattccagtgcgaggctactggcaacccgcagcctgcaatcttttggcgtagggaggggtcccaaaacctcctcttctcctaccagcccccgcagagctcatctcgtttcagcgtctcccagactggcgatctgaccatcacaaatgttcagaggagtgatgtgggttattacatctgccaaaccctcaacgttgccggctcaatcataaccaaagcctatctggaagtgacagatgtgatcgcggatcgaccccccccagttattaggcagggccccgtgaatcagacagtggctgtcgacggcactttcgtcctgtcttgtgtcgccacaggcagtcccgtacctaccatcctatggcgaaaggatggagtgctggttagtactcaagatagtcgtatcaagcagcttgagaatggcgtcctgcagattaggtacgctaaacttggggacacaggcaggtatacttgtatcgccagtacacctagcggagaggcaacctggtccgcctacattgaggtgcaagagttcggcgtgccagtgcagccgccgagacctaccgatcctaatctgataccctccgcgccaagtaagcccgaggtaaccgacgtgagtcgcaacaccgtcactctctcgtggcaacccaatcttaactccggcgctacacctacttcctatattattgaagccttcagtcatgcaagtgggagctcatggcaaacagtcgcagaaaacgtgaagactgagacttcagccatcaaggggctgaagccaaacgctatttacttgtttctggtcagggcagccaatgcatacggtatttccgatcctagccaaattagtgatccagtgaaaacacaggacgtgcttcctacctcccaaggggtcgatcacaagcaagtccaacgagagctgggaaacgcggtgctgcacttacataaccctacagtgctgtcttcgagttccatagaggtgcattggaccgtggaccagcagtcccaatatatacagggatataaaatcctctatcgccccagtggagctaaccatggtgaatcagactggctggtatttgaggtgcgcactccggcaaaaaacagtgtggtaatccctgacctaaggaagggcgtgaactatgaaatcaaagccagacccttcttcaatgagttccagggggccgatagtgaaattaagttcgcaaaaaccttagaagaagcaccgagcgccccaccgcagggtgtaactgtatctaaaaacgacggcaacggtacggctattttagtgagctggcagccccccccagaagatactcagaacggcatggtgcaggaatataaggtgtggtgtctcggaaatgagacaaggtaccacatcaacaagaccgtcgatggatcaaccttttcagtcgtgatcccttttcttgtgcctgggatacggtactctgtggaggtggccgcctctacgggcgcaggctccggggtcaagagcgaaccccagttcatccaactggacgctcacggcaacccagttagtcccgaggaccaggtcagtcttgcccaacagatttcggatgtggtaaaacagccagctttcatcgcaggaattggcgcggcttgttggatcatcttgatggtgttcagtatttggctctataggcaccggaagaagagaaatgggttgacctccacttatgccggtattaggaaagttacctatcagagaggcggcgaggccgtgtcttccggaggtcggcctggcctgctgaacatcagcgagccggccgctcagccctggctggctgacacttggcctaataccggcaataaccacaatgattgtagcatatcctgctgcaccgcggggaatggaaattccgattcgaatcttacaacttactcccggcccgccgactgtatcgcaaattacaataatcagctggacaacaagcagacaaatctcatgcttcctgagtcaactgtctacggcgacgtcgacttgtcgaataagatcaatgaaatgaagacattcaatagccccaatctgaaggatggacgctttgtcaaccccagtggccaacctaccccgtacgcgactactcagttgattcagagtaacctgtctaacaacatgaataatggatcaggtgattcaggagagaagcattggaagccactaggacagcagaaacaggaggtggctccagtccagtacaacatagtggagcaaaataagttaaacaaagactaccgggccaatgatacagttcctcctaccattccttacaaccagagctatgaccagaatacaggaggcagctacaattcctccgatcgcggtagtagtacctcaggctctcagggacataaaaagggagctcggacgccaaaggtgcccaagcaggggggcatgaactgggccgacctgcttcctccccccccagcacacccacccccccattccaactcggaagaatacaacatctcagtcgatgaatcctatgatcaagaaatgccctgccccgtgcccccggcccgcatgtacctgcagcaggatgagctggaggaagaagaagacgagcgcggccctacccctcctgtgagaggagccgctagtagtccagccgcagtgagctatagtcaccaaagtaccgctactcttaccccgagcccacaggaggaactgcagccgatgcttcaggactgcccggaagagacaggccatatgcagcatcagccagacaggaggcggcagcctgtatccccacccccccccccgaggccgattagccctccacatacatacggttatatcagcgggcctctggtgagtgacatggacaccgatgcccccgaagaggaagaggacgaagcagatatggaggtggccaagatgcagacacggcggctcctcctccggggtctggaacagactccagctagcagcgtaggggatctcgagtcatctgtgaccggtagtatgattaatggctggggcagtgcgagtgaggaggataatatcagttctggccggagcagcgtgtcttcttccgatggttcctttttcactgatgccgactttgcccaagcagtggccgctgccgccgagtacgctggcctgaaagtagcccggcgccagatgcaggacgctgccggcagacgccacttccacgccagtcaatgccccagacccacttctcccgtgtctactgactctaatatgtcggccgccgtaatgcagaagacaagaccagcgaaaaagttgaagcaccaaccaggtcatctgcgccgcgagacctacacagatgatctcccaccaccacctgtgcccccccccgcaattaagtcccccacagctcaaagtaaaactcagctcgaggttcgccctgtcgtcgttcctaaactccctagcatggacgcccggacggacaggagttcagatcgtaaaggaagctcctataagggacgggaggtgctggacggacgccaggtcgtggatatgagaactaacccgggtgatccaagagaggctcaggagcaacaaaatgatggtaaggggaggggcaacaaagccgctaaacgcgacctgccacccgccaaaacacatctgatccaagaggacatcctaccttactgcaggcctaccttcccaacctcaaataacccaagagatccaagtagttctagctcaatgtctagtcgggggtctggctctcggcagcgcgaacaggccaatgtcggtcgaaggaacattgcggagatgcaagtgctgggcggctatgaacgcggagaggacaacaacgaagagttggaggagactgaaagttag

SEQ ID NO: 204058 - DNA, 3213 bp, synthetic construct
  misc_feature 1..3213: note = Description of Artificial Sequence: Synthetic coding sequence
  source 1..3213: mol_type = other DNA
atggcccggcggcacgagcgggtgacccggcggatgtggacctgggctcctgggctcctgatgatgacagtggtcttttggggacaccaggggaacggacagggtcaggggagtcgactccgacaggaagattttccaccaagaatcgtcgaacacccctccgatgtcatcgtttccaaaggggagcctacaaccctgaactgtaaggcagaggggcggcctacccctacgattgagtggtataaggacggagaacgggttgagactgataaggacgacccgcggtcacacagaatgctactgccctccgggtctctgttcttcctacgaatagtccacgggcgtcgttctaagccagatgaaggcagttacgtgtgtgtcgcccggaattacctgggtgaagccgtctcccgtaacgcaagcctggaggtagctcttctgagggacgatttccgccaaaatccaaccgatgtggtggtagcagctggcgagccggcaatccttgagtgtcaaccccccaggggccacccagagcccaccatttattggaagaaggataaggtcagaatagacgacaaggaagaacgcatctccattcgcgggggaaagttaatgatatccaacacacgcaaaagtgacgcgggaatgtacacgtgcgtggggaccaacatggtgggcgagcgcgatagtgatccagccgagttgacggtgttcgaacgtccaacatttctgcggaggcccattaaccaagtcgtgttagaagaagaggccgtcgaatttcgctgtcaagtccaaggggacccgcagccaacagtcagatggaaaaaagatgatgccgatcttccccggggccgttatgatattaaagatgactacacacttaggattaaaaaaaccatgagtacggacgagggcacctatatgtgtatcgccgagaatagagtgggtaagatggaagccagcgcaactttgactgttcgtgggggcgtgattgcccccccccagttcgtcgtgaggccccgggaccagatcgtggcacaaggccggacagttactttcccttgcgaaaccaaaggcaatccccagccagccgtattctggcagaaagaaggctcacagaatctgttgttccctaaccaacctcaacaacccaactcccggtgctctgtttcacccaccggcgatctcactatcacaaatattcaacgtagcgatgctggctattacatttgccaggccttgacggtggcaggatccatactggccaaagctcagctggaggtaacagacgttttgactgacaggcctcctccaataatcctccaagggcctgccaaccagacattggccgtagacggaaccgcccttctgaaatgcaaagcgacgggtgatcccctgccggtcatctcttggctcaaggagggatttacattccccggacgggatcccagagctaccattcaggaacagggcaccttgcagattaagaacctgaggataagtgacaccggtacgtacacatgtgtcgcgacatcctctagcggcgagacgtcctggagtgctgtgctggacgtcactgaaagtggtgctacgatctccaagaactatgatttgagtgatttgccaggacccccctctaaacctcaggtgactgacgtgactaaaaactctgtgactctcagttggcagccaggcacccccgggacgctgcctgcatcagcctacatcatagaggccttctcacagagcgtcagtaattcttggcaaacagtcgccaaccatgttaagacaactctgtacaccgtcagaggcctgaggcccaataccatctacctgttcatggttcgcgccatcaacccgcagggtctttccgacccatccccgatgtcagacccagttaggactcaggatatctctccccctgcacagggggtggaccatcgacaggtgcagaaggagctgggcgacgtgttggttcggctgcataaccccgtcgttctaacccctacgacagtgcaggtaacctggacggtagacagacagccacagtttattcagggctacagggtaatgtatagacagacatctgggctacaagcgacatcaagctggcagaaccttgacgcaaaggtgcctacagaaaggagcgctgtgcttgtgaatcttaagaagggggtaacctacgaaatcaaggttaggccatactttaacgaatttcagggcatggatagcgagtcaaaaacggtcaggactactgaagaggccccatccgcgcctcctcagagcgtcaccgtactcacagtggggagttacaactccacgtccatcagtgtaagttgggatcctcctcctccagaccaccagaacggtatcattcaggagtacaagatttggtgtctcggcaacgagacccgattccatatcaacaagacagtcgatgctgccatcaggtccgtgattattggagggctgttccctggaatacagtaccgagtcgaagtagctgcctccacctcagcaggggtcggtgtcaaatccgaaccacaacccatcattataggacggcggaacgaggtggtcatcacagaaaataacaactcaattacagaacagatcaccgatgtggtgaagcagccagcctttattgccggtatcgggggcgcctgttgggtgatcctgatgggtttcagcatctggttgtactggcgacgtaagaaaagaaaaggattatccaactatgcagttacttttcagcgaggggatggcggtctgatgagcaacggatcaaggcctggtctgctaaatgctggggaccccagttacccctggctcgccgattcctggcctgccacttccctgcccgtgaataatagcaattccggccccaacgaaatcggcaattttgggcggggggacgtccttccaccggtgcctggccagggggacaaaaccgcaactatgctctcagacggagctatctacagcagcattgatttcacaaccaagactagctacaactcctcatcacagatcacccaagccactccttatgcaaccacacaaatcctgcactctaactcaattcatgaactagctgtggatttacccgatcctcagtggaaaagcagtattcagcagaaaactgacttgatgggctttggttactctttgcctgatcagaacaaagggaataacggagagtcgggtagctag

SEQ ID NO: 204059 - DNA, 1713 bp, synthetic construct
  misc_feature 1..1713: note = Description of Artificial Sequence: Synthetic coding sequence
  source 1..1713: mol_type = other DNA
atgagcaccgacgagggcacctacatgtgcatcgccgagaaccgggtgggtaaaatggaggcctccgctaccctaacggtgcgcggtggagtgatagctccacctcagttcgtggttcggcccagggatcagatagttgcacaagggaggaccgtgacattcccctgcgaaacgaagggcaatcctcagccagcagtattttggcagaaggaaggttcgcaaaacctgctgtttccgaatcagcctcagcagccgaacagccggtgctctgtatcccccacaggcgacctgactattaccaatatacagcggtcagacgccggctattacatatgtcaggcccttacagtcgctgggtcgattctcgccaaggcccagctggaagtaactgatgttctgaccgaccggcctcctccaatcatactacaggggccagctaaccagactctggccgttgacggaacagccctgctaaaatgtaaggccaccggcgaccctctgccggtgatttcctggctcaaggagggatttacattcccaggtagggaccccagagctacaatacaagaacagggcaccctgcagataaagaaccttcgtatctctgatacaggaacatatacatgtgtggcaacctcttcctcgggtgagacctcttggagcgccgtcttagatgtgacagagagcggggccacgatcagtaagaattatgatttaagcgatctgcccgggccaccctctaagccccaggtcaccgatgttactaaaaacagtgtgaccctaagctggcagcccggcacaccaggcacccttcctgccagcgcgtacatcatcgaggctttctcccagtcggtgagcaactcctggcagacagtggctaaccacgtcaagacaacactgtacaccgtacggggcttaagaccaaatactatatatctctttatggtgcgcgccatcaatccacagggcctgagtgacccctcccctatgtccgacccggtgcggacacaggacatcagccctccagcgcagggcgtagaccatcgccaagtgcaaaaagaactgggagacgtgctcgttcgcctgcacaatcccgtcgtgttgacgccaacgactgtgcaggtgacatggacagttgatagacagccccagtttatccagggttaccgtgtgatgtacagacagacgtcagggctgcaggccactagctcctggcagaatctcgacgccaaggtccccactgagcgatccgcggtgctggtcaatctaaagaaaggagttacttacgagatcaaggtccgcccctatttcaatgaattccagggaatggattctgaaagtaagacagtgcgtacaacagaggaggctcctagtgcaccgccgcaatcagtcaccgttctaacagtgggctcctacaactcgacatctatttccgtgagttgggatccgcctcctcccgaccaccaaaatggaatcattcaggaatataaaatctggtgtctgggcaacgaaactcgatttcatatcaataaaaccgttgacgccgcgatccggagtgtgataatcggggggctttttcctggtatccaatatcgagtggaggtggccgcaagcaccagtgcaggcgtgggcgtcaagtctgagcctcagcctaacaataccggctaccctatttgtcatgacaccgatcttgctttccagcagcacacatag

SEQ ID NO: 204060 - DNA, 4185 bp, synthetic construct
  misc_feature 1..4185: note = Description of Artificial Sequence: Synthetic coding sequence
  source 1..4185: mol_type = other DNA
atggcccggcggcacgagcgggtgacccggcggatgtggacctgggccccaggtctcctcatgatgaccgtcgtattttggggtcaccagggcaatggacagggtcagggcagtcggttgcgacaggaggactttccgccccggatcgttgaacatccttctgacgtgattgtttcgaaaggggagccgaccactcttaattgcaaagcagaagggcgacctacaccaacaatcgagtggtacaaagacggggagagggtggaaaccgataaggacgatccccgatcccacagaatgttgctcccttcagggtcgctcttcttcttgagaatcgtgcacggtcggaggagtaaaccagacgagggctcatacgtatgcgttgcacgtaactatctaggggaagcggtaagccggaatgcaagccttgaggtggccctcctgcgggatgacttccgacagaatccaacagacgtcgtcgttgcagccggagagccagcgatcctggagtgtcagccaccacgaggccacccagaacctacaatatactggaagaaagataaggtccggattgatgataaggaggagagaatatccatacgaggcggaaaactgatgatttccaatactagaaagtctgatgccggcatgtacacttgcgtggggactaacatggtgggcgaacgcgatagcgatccagcagagctgaccgtgttcgaaaggcctacgttcctaaggcgaccgattaaccaagtagtgctagaggaagaggctgtggagttcagatgccaagttcagggggacccccagcccactgtccggtggaagaaagacgacgcagacttgcccagaggccgatacgacatcaaggacgattacaccctgagaatcaagaagactatgagtacggatgagggtacctatatgtgtattgcagaaaatagagtaggcaaaatggaagcatccgccacactcaccgtgcgtgcccctccccagttcgtcgtgagaccacgagaccaaatcgtagcccaaggcaggacagtaacctttccctgtgagaccaaaggcaatcctcaaccggccgtcttctggcaaaaagaggggtctcagaatctgttgttcccaaatcagccacagcagcctaactctaggtgttctgtgtcacctaccggagatctgaccattacgaacatccagagatccgatgctggctactacatctgccaggcgctgacagttgccggtagcattcttgccaaagcccagctagaggtgactgacgtgctcacagatcgtcctccgcccatcattctgcagggaccagccaaccaaacattagctgtggatggtaccgcacttctgaagtgcaaggctacaggggatcccctgcctgtgatttcatggttgaaggagggtttcacattccctggaagagatccgcgcgccactatccaggagcaaggcactctgcagattaagaatctgagaatttcggatacaggcacctatacctgtgtggccactagctcctccggcgaaacttcttggtccgctgtgctggatgttactgaatccggggctactatttccaagaactacgatttaagtgacctgcctgggcctcccagtaagccacaggtgacggacgtgactaagaactcagttacgctctcctggcagcctggaactcccggcaccctccccgcatccgcttatataattgaggccttcagtcagtccgtgagtaattcctggcagacagtggcgaatcacgtgaaaactaccctgtatactgttcggggcttgagaccaaacactatttacctgttcatggtgcgggcaataaatccacagggactgtcagacccctcccctatgtctgaccctgtcaggactcaggacattagccctccagcacaaggggtggatcatcgtcaggtgcagaaggagttgggggatgttctggtgaggcttcataatcctgttgttctgaccccgacaacagtgcaggtcacatggactgtcgatcgtcaaccccagttcattcaagggtaccgcgtgatgtaccgccagacatctgggcttcaggctacgtcgtcatggcagaacctcgacgctaaggtgccgacagagcgctctgcagttctggtcaatttaaagaaaggcgtcacatacgaaattaaagtgagaccttacttcaacgagttccaaggaatggacagcgagtcaaaaacggtcaggacaaccgaggaggccccatcagcccccccacagagtgtcactgtcctcactgtggggtcctacaattctacttctatttctgtcagctgggacccccctccgccagaccaccaaaacggcataatccaggagtacaagatctggtgcttaggcaacgagaccagattccacattaacaagaccgttgatgctgctattcgaagcgttatcattggcgggttatttcccggcatccaataccgggtcgaggttgccgcctcaacgtcggcgggtgttggtgtgaagtctgagccccaacctataataatcggcagacgcaatgaggttgtgattactgaaaacaataactcgataaccgagcaaatcaccgatgtagtgaagcagcccgcgttcatcgcaggaatcggtggtgcgtgctgggttattttgatgggcttctcgatttggctgtactggcggcggaagaagcgcaaaggactgtcgaattatgctgtgacatttcagagaggtgatggtggtcttatgagcaacggtagtcggcctggactgctgaatgccggcgatccttcttacccttggctcgccgattcatggccggccacttctcttccagtcaataattccaattctggccccaatgaaattggtaactttggccgcggggacgtgcttccaccagtcccgggacaaggggataaaacagcgaccatgttatcagacggcgccatatatagcagcatcgacttcaccacaaagacatcttataactcttcatcacagattacccaagcaaccccttatgcaacaacacagatactccactccaatagtatccacgaactggcggtagaccttcccgatcctcaatggaagtcttccatccagcagaaaaccgatctgatgggttttggctacagtctgcccgaccaaaacaaaggcaataatggcggtaagggcggaaagaaaaaaaaaaacaagaattctagtaaacctcagaaaaacaatgggtccacctgggctaatgttcccctgcctccgccccctgtgcagccactgccgggaactgaactggagcattacgctgtggagcagcaagaaaacgggtatgatagcgatagttggtgcccccctctcccagtgcagacctacttgcaccaaggccttgaggacgagctcgaagaagacgatgatcgcgtccccacccctccggttagaggagtcgctagtagtcctgctatctccttcggccagcaaagcacagccactcttacaccatcacccagagaggagatgcagcccatgctccaggcacacctcgatgaactcacccgtgcctatcaattcgacatagccaaacagacatggcatatccagtccaataatcagcccccacagcctcccgtgcctcctctgggatatgtgtctggtgcactcataagcgatctcgaaaccgatgttgccgacgatgatgccgatgacgaggaggaagcactagagataccacggcctctgcgcgctctggaccaaacccctggctcttcaatggataatctggactcctcagtcactggaaaagcttttaccagcagccagcgccccagacccacttcacctttcagtaccgatagtaatactagcgcagccctgtcccagagtcagcgaccacgccctaccaagaaacataaaggcgggaggatggaccaacagcccgcactcccgcaccgtcgggagggcatgacagatgaagaagccctggtaccatacagcaagccctcatttccgagccccggcggtcattcatcttctggaacagcatcgagcaagggatcgaccgggccaaggaaaacagaggtgctccgcgcagggcaccagagaaatgccagcgacctcctagacattggctacatgggcagcaacagtcagggtcagttcacgggagagctctag

SEQ ID NO: 204061 - DNA, 4137 bp, synthetic construct
  misc_feature 1..4137: note = Description of Artificial Sequence: Synthetic coding sequence
  source 1..4137: mol_type = other DNA
atgagcctgctgatgttcacccagctgctgctgtgcggcttcctgtacgtgagagttgatggcagcagactccggcaggaagatttcccaccaaggattgtcgagcatccctcggacgtaatagtatccaagggtgagcccacgaccctcaactgcaaagcagagggtaggccaacccctacaatagagtggtacaaggatggggagagggtggaaacggataaagacgatccaaggtcgcacaggatgttgctgccctccggctccctgtttttcctccgcatcgtgcacggtaggaggtccaagccagatgagggatcctacgtgtgcgtggcaagaaattatctgggcgaggcggtgtctcgcaacgccagcctggaggttgccctgctgcgggacgactttcgtcaaaaccccaccgacgtggtggtcgctgccggagagccggcaattttagaatgccaacctccgaggggtcaccctgaacccacaatctactggaagaaggataaggtccggattgacgataaagaggaacgcataagcattagaggaggcaagttgatgatatctaacaccagaaagtccgacgctgggatgtacacctgcgtgggtactaacatggtgggcgagcgggattccgatccagctgagctaaccgtgttcgagcgccctacattcctgaggcgccctatcaaccaggtggtgctagaagaagaggcagtcgaattcaggtgtcaggtccagggcgatccacagcctacagtccggtggaaaaaggatgatgctgacctgcctagaggaagatatgacataaaagatgattatacattgaggataaagaaaacgatgagcactgacgaaggaacatacatgtgcatcgccgaaaatcgagtcggaaagatggaagccagcgccaccttgaccgttagagccccacctcaatttgtggttaggccaagagatcaaattgttgcacagggcagaactgttactttcccatgtgagacaaaggggaatccccagccagctgtcttctggcagaaggaaggcagtcagaatctgctgtttccaaatcaaccacagcagcctaattctagatgctcagtatcaccaacaggggatctgaccatcactaatattcaacgcagcgacgctggatactatatttgtcaggcccttacagttgccgggtctatcctcgcaaaggctcaattagaagtgactgacgtgctgaccgatcgaccgccaccaatcatactgcaggggcctgctaatcaaacacttgctgtggatgggactgccctgttgaaatgcaaagcaaccggtgaccccctccctgtgatatcctggctgaaggagggcttcacctttcccggacgggatcctcgggctactattcaggagcagggcacacttcagatcaagaaccttaggattagcgacaccgggacatatacctgcgttgccacctcctctagtggagaaaccagctggtctgccgtattagatgtgactgagtccggcgctactatctctaagaactacgacctgtccgaccttcctggacctccttccaagccccaggtcaccgacgtgaccaaaaactcagtgaccctgagttggcaaccgggcacccctggcaccctccccgcgtcagcctacatcatagaggctttctctcagtccgtgtcaaactcatggcagacagtagccaaccacgtgaagaccacgctttacaccgtcagaggcctgagacctaataccatttacctcttcatggtgagggcaatcaatccccaggggctctccgacccaagtcccatgtcggatcccgttcggactcaagacatttctcctccagcgcagggcgtggaccaccgtcaggtccagaaagagctcggcgacgtgttagtgcgtttacataatcctgtagtgctgacccccactacagttcaggtgacttggaccgtagacaggcaacctcagttcatccaaggttatcgcgtaatgtatcgtcagacatcaggactgcaggccactagttcctggcagaatctggacgcaaaggtgccaacggagcgttctgccgtgctcgttaacctgaaaaagggcgtcacctatgaaattaaggtccgcccctattttaatgagttccaaggcatggacagcgagtcaaaaactgtccggaccactgaagaggcaccttcagcgcctccacagtcagtgacggtactgaccgtgggaagttataactctacaagtatatcagtgagctgggatcccccaccaccagaccaccagaacggaattattcaggaatataaaatatggtgtctcggaaatgagaccagattccacattaataaaacagtggacgctgcaatacgaagcgtcatcataggtgggctgttccctggtatacagtatagagttgaggtcgctgcctccacttctgccggcgtgggtgtgaagtccgagcctcagccgattattatagggagacgtaatgaggtggtgattactgagaataataactccattacagaacagattacagatgttgtgaaacaaccggcttttatagcaggtattgggggggcgtgctgggtgatcctgatgggcttttccatctggctatactggaggagaaaaaagaggaaggggcttagtaattacgcggtcacattccaaagaggggatggtggactgatgtcaaacggttcgagaccgggcttgctgaatgccggcgaccccagctatccttggctggcggacagctggccagctacatcattaccagtcaacaattccaattctggccccaacgaaattgggaacttcggtcggggagatgtgctccctcccgttcccggtcagggcgacaagacagcaacaatgctctctgatggagccatctattcctccatcgacttcactactaagacgagttacaactctagctcgcagataacacaggccaccccctatgctacgacacagatcttgcactctaacagcattcatgagctggcggtggacctccccgacccacagtggaagtccagcatacagcagaaaaccgacctgatgggattcgggtactctctgcccgaccaaaataaggggaacaacggtggaaaaggagggaaaaagaagaagaataagaacagcagcaagccgcaaaaaaataatggaagtacttgggctaatgtacctctgccgcctcctccagtccaaccgcttccaggcaccgaactggaacattacgccgtcgagcagcaggaaaacggatacgacagtgactcttggtgtcccccattaccagtgcagacttacctacatcagggcctcgaggatgagctggaagaagatgatgacagagtgccaacacctccagtgaggggggtggcgtcttcgcccgctatttcttttgggcaacagagtacggcaaccttaaccccaagcccccgagaggaaatgcagccaatgttacaggcccatctcgatgagctcacccgagcctaccagtttgacattgccaagcagacatggcacattcagagcaacaatcagccacctcagcctccagtgcctccactgggctatgtctccggagcgcttatttcagacttagaaactgatgtagccgatgatgacgctgatgatgaagaagaagccttagaaatccctaggcccctccgggcgcttgaccagaccccgggatccagtatggataatctagatagtagcgtgaccgggaaagctttcactagctctcagagaccacgacctacatctcctttctccactgattccaatacatccgcagcgctgagccagagtcaacgtcctaggcccactaagaaacacaaaggaggtagaatggatcagcagcccgcactgcctcacaggcgagagggaatgacggacgaagaagccttggtcccctatagcaaaccgtcctttccgagtcctggcgggcactcttcttcaggaacggcttcgagcaaaggctctaccggtcctcgcaaaaccgaggtgctgcgagcgggacaccagcgaaatgcttccgatcttctcgatattgggtatatgggctccaattcgcaaggtcagttcacgggagaactctag

SEQ ID NO: 204062 - DNA, 4185 bp, synthetic construct
  misc_feature 1..4185: note = Description of Artificial Sequence: Synthetic coding sequence
  source 1..4185: mol_type = other DNA
atggcccggcggcacgagcgggtgacccggcggatgtggacctgggcaccaggcctactgatgatgaccgtagtcttctggggtcaccagggcaacgggcagggacaaggctccagactgaggcaggaagatttccctccgagaattgttgaacatccctccgacgtcatcgtgtccaagggcgagcctacaacactgaactgcaaggccgagggccgccctacccccacgattgagtggtacaaggatggtgaacgagttgagacagataaggacgaccccaggtctcatagaatgctgcttccctccggttcactgttcttcctacgaatcgtacacggtaggcgaagcaaacccgacgagggctcttacgtgtgtgtggctaggaactatctcggcgaagcggtgagtcgcaatgctagtcttgaagtcgccttactgagggacgatttccgccagaaccccaccgatgtggttgtcgccgctggtgagcccgctatcctagagtgccagcccccacggggacacccagaacccacaatatattggaagaaggacaaggtgcgcatcgatgataaggaagaaagaatctctatcagggggggtaagttgatgatatcaaatactaggaaatccgatgcaggtatgtatacctgcgtcggtaccaatatggtgggggaaagggactcagatcctgctgagttgacagtatttgagagacccaccttccttagacggcctattaatcaggtggtgctggaggaagaggcggtcgagttccgatgtcaggtacagggagatccacagcctacagtgcgctggaagaaggatgatgctgatttaccacgagggcggtatgatatcaaggacgattacactcttcggatcaaaaaaacaatgtcaacagatgaaggcacttacatgtgcatcgccgagaatagagtgggcaagatggaagcttccgcaactctcacagtcagggctcctccccagtttgtggtcagaccccgcgaccaaattgtcgcccaggggagaaccgtgacctttccttgcgaaaccaaagggaacccacaaccagccgtcttttggcagaaagagggctcacagaacctgttgtttccaaaccagcctcaacagccaaattctaggtgcagcgtcagtcctactggggacctcacaatcacgaatatacaacggtcagacgccgggtactatatttgccaagctctgaccgttgctggttcgatcctggctaaggcgcagctggaggtgactgatgtgcttacagacagaccgccccccattatcctgcagggacctgccaatcagaccctggccgtcgatggcaccgctctgcttaaatgtaaggcaacaggcgaccctctccctgtcatctcatggctgaaggagggcttcacatttccagggagggacccaagagccaccattcaggaacaaggtactcttcagattaaaaacttgcggatctccgacaccggcacctatacatgcgtggcaacaagcagtagcggtgagacctcttggagtgccgtccttgatgtcacagagagtggggctactatcagcaagaactacgatctctccgacctgcccgggccgccttcaaaaccccaggtcaccgatgttactaagaacagcgtaaccttgagttggcagcccggcacacccgggacgttgcccgctagtgcatacataatcgaagcgtttagccaatctgtctccaattcctggcaaaccgtcgctaatcatgtcaaaacaactctgtacacggtgagaggcttacggcctaatacaatctacctgttcatggtgagagcaatcaacccccaggggctaagtgatccgagccccatgtccgatccggttagaacacaggacatctctcccccagcccaaggcgtggatcacagacaggtccaaaaggaactgggagatgttctggtccgcctgcataatcccgtagttctgacgcccactacagttcaggtaacttggaccgttgatagacagccgcaattcatacaaggctaccgggtgatgtatagacagaccagtggcctgcaggccactagctcatggcagaatttggatgccaaggttcctactgaaagatctgccgtcctggtgaatctgaaaaagggagttacctatgagattaaggttcggccatacttcaatgagttccagggcatggatagcgagtctaaaacagtcagaaccaccgaggaggctccgtcggctcctccccagagcgtcacagtcctaacagttggaagctataactcaacaagcatttcagtaagctgggacccgccccctccagatcatcaaaatgggatcattcaggagtacaagatctggtgtttgggaaatgaaacccggttccacatcaacaagacagtcgacgctgcaatccgaagcgtgatcattggtggattgtttcccggtatacagtacagggtagaagtggcagcctccacatctgctggggtgggtgtgaagtccgaaccccaaccgatcatcattggaaggcgcaacgaggtggttataacagaaaacaacaattccatcactgagcagataaccgacgtggtgaagcagccggcgttcattgcgggaatcggcggagcttgctgggtgattttgatgggttttagtatctggctgtactggcgaagaaagaagaggaagggattaagtaattacgccgtgacctttcagcgcggagacgggggcctcatgtctaatgggagtcggccaggcctgttaaacgccggggacccatcatatccttggctcgccgactcctggcctgctacttccctgcctgtgaataacagtaacagcggtcccaacgaaattggaaattttggcagaggcgacgtgctgccgcccgtcccagggcagggcgataaaaccgcgaccatgcttagtgacggagcaatatatagtagtatcgatttcacgaccaagacaagctacaactcctcaagtcaaatcacgcaggcaacaccatatgccacaacacaaattttacactctaattccatccacgaactcgctgttgacctccctgatccacagtggaagagctctatccaacagaagactgaccttatgggctttggatactccttacctgaccagaataagggaaacaacggcgggaaaggaggaaagaagaagaagaataagaactcatccaagccacaaaagaacaacgggtctacatgggcaaatgttccgctgcccccccccccagttcagcctctgccaggaactgaattggaacactacgccgttgagcagcaggagaacgggtacgatagcgattcctggtgcccccctttgccagtccagacatatctgcaccaggggctggaggacgagctcgaggaggacgatgacagagttcccacacctcccgtgcgaggtgtcgcctctagccctgccatttccttcggccaacagtccacagccacactgacacccagtcctagggaggagatgcaacccatgctgcaggcccacctcgacgaactgacgcgggcctatcagttcgacatcgctaagcagacctggcatatccaaagtaacaaccagccaccacagcccccggtcccccccttgggatacgtgtctggtgcgcttatctctgatctagagactgacgtggcagacgacgatgcagatgacgaagaggaagctctggaaattcctcgccctcttagagctctggaccagacaccgggatctagcatggacaacctggacagttctgtgacagggaaggcttttaccagctcccagcgcccaagaccaaccagccctttcagtaccgattctaatacctcagccgctctctcccagagccagaggccgcgaccaacaaagaagcacaaaggggggaggatggatcaacagcctgccctgccacacaggcgggaggggatgactgatgaagaggctctcgtgccttatagtaagccctcttttccctcccctggaggacattcctcaagtgggacggctagttcaaagggatccactggcccacgtaagacggaggtgcttcgcgctggacatcagagaaacgcatctgacctgctggacattggctacatgggttcaaattcccagggccagtttacaggggagctctag

SEQ ID NO: 204063 - DNA, 4161 bp, synthetic construct
  misc_feature 1..4161: note = Description of Artificial Sequence: Synthetic coding sequence
  source 1..4161: mol_type = other DNA
atgctgcggtacctgctgaagaccctgctgcagatgaacctgttcgctgactcacttgccggtgacatttccaactcctcagagctgctgctaggtttcaacagcagcctagcagcgctgaaccacactctgctaccacctggcgatcccagtttgaatggcagtagggtagggccagaggacgccatgccccggatcgtggagcagcctccggacctactggtaagtcggggggagccggcgaccctcccttgcagggccgaaggccgtcctaggcccaacatcgaatggtataagaacggcgcaagggtagcgactgttagggaagatcctcgagctcatcggctactgctgccctcaggtgcactgttcttcccacgcatagtgcatgggcggagggccagacctgacgaaggggtgtacacctgtgtggccagaaactacctgggagcagctgcgtcacgtaatgcatccctggaggtcgcagtgctgcgagatgacttcagacaatctccgggtaatgtggtcgtcgcagttggggaacccgccgtccttgagtgcgtgccgccgcgaggccacccagaaccatcggtttcctggagaaaagatggtgctcggttaaaagaggaagagggccggatcactatcagaggagggaaacttatgatgtctcacacgctaaagtccgatgccggaatgtacgtgtgtgtggcttcgaatatggctggcgaacgcgaaagtgctgccgctgaagtcatggtcctcgaaaggccttcctttttgcgacggcccgtgaaccaggtggtactggccgatgcccctgttacatttctttgcgaagtaaagggtgaccctccgccaagattaaggtggagaaaggaagacggcgaattaccaaccggacggtatgagattagaagcgaccattccctgtggatcggtcatgtctcagcggaggatgaaggaacttatacctgtgttgccgaaaactctgtcggcagagccgaagcgtccggtagtctttcagtgcatgtgcccccgcagctggtgacgcaaccgcaggaccagatggctgccccgggggagtctgtggcctttcagtgcgaaaccaaaggaaatcctcctccagcaatcttttggcagaaggaggggtctcaagtcctgctttttccgtctcaatctctgcagccaaccggcaggttttctgtctcacccaggggccagctgaatataaccgccgtgcaaagaggcgacgccggctactacgtatgccaggccgttagcgtggcggggtccatactggcgaaggccctgctggaaatcaagggagccagtttggatggactgccgcctgtgatcctgcaggggcccgctaaccaaacgctcgtcctggggagttccgtgtggctgccctgcagggttaccgggaacccccagccctcagtgcggtggaaaaaagacgggcagtggctccagggagacgatctccagttcaagactatggctaacggcactctgtacattgcgaacgtgcaagagatggacatgggattctactcctgtgtcgccaaaagctctacgggtgaggccacttggtccggatggcttaagatgagggaggactggggtgtatctcccgatccaccaacggaaccctcttcgccacccggagcaccatcacagcccgtcgtcacagaaatcacgaagaactcaataactctgacctggaagcctaatccacaaaccggggctgccgtgacgtcctacgttattgaagcgtttagccccgccgcaggaaacacatggcggaccgtggccgacggcgtccagctagaaacccacaccgtgagcggccttcagcccaacacaatctacttgtttctggtgcgagccgtcggggcatggggactatctgaaccgtctcctgttagcgaacctgtccgaacacaggacagcagtccctctaggcccgttgaagatccatggcgtggccaacagggcctagcagaggtggcggtaaggctgcaggaacctattgtgctcggacccaggaccttgcaggtaagctggacggtggatggacccgtccaattggttcagggattcagggtgtcgtggcgcgtggctgggcctgaaggagggagctggaccatgctcgatctacagtccccatcccagcagagtaccgtgttgagaggattaccacctgggacgcaaatacagatcaaagtgcaggctcaagggcaagagggactcggtgcagaaagcctgtctgtcacgagaagcattcccgaggaggccccatcggggcccccacaaggagttgctgtggcactcgggggagacgggaatagctctatcacagtgtcctgggagcccccgcttccaagtcaacagaatggcgtcatcaccgaataccaaatttggtgtcttgggaatgagagccggttccatcttaaccgtagcgccgcagggtgggcaagaagcgctatgctccgcgggctagtgcccggactcctgtatcgcactcttgtcgcggctgccacgagtgccggagtgggtgtaccctccgcccccgttttagtgcaacttccatctcccccagatctcgagccagggcttgaggtcggcgccggactcgcagtccgtctagccagggtgctgcgcgaaccagccttcctcgcaggatccggagcggcgtgcggcgctctgctgctcggcctgtgcgccgctctctactggcggcgcaagcaacgcaaggagctgagtcattacactgccagtttcgcctatacccctgcagtatcttttccccactcagaaggcctttctggggctagtagcagaccaccaatgggacttgggcccgcaccctactcttggctagccgattcttggccccacccctctagatcaccttctgcccaggagcctagaggtagctgctgcccaagcaatcccgatccagacgatagatactataatgaggctggtatctccctgtacctggcgcagacagcccgcggtacggccgcgcccggcgaaggcccagtgtacagcacgatcgaccctgctggcgaggaacttcaaacgtttcacggcgggttcccacaacatccctctggagatctgggcccttggagtcagtacgcaccacccgagtggtctcaaggggacagtggagccaagggtggcaaggtgaaactgctcggcaagcctgtgcagatgccctcccttaattggcccgaagcactgcccccacctccaccctcctgcgaactgtcctgtctcgagggaccagaagaggagctggaggggtcctctgaacctgaggagtggtgcccaccaatgcccgagagatcccatcttacagagccatcaagttctggaggctgtttggtaacccctagccggagggagaccccctcccctactcccagctatggccagcagtctactgccactctaaccccgagtccccctgatcctccacagccccccaccgatatgcctcatctgcatcagatgccgcgcagagtgcccctgggcccgtcttctcccctctccgtctcccaaccaatgttaggtattagagaagcacggcctgctggcctcggagccggccccgccgcatctccccatctgagtccatcaccagctccgtcaacagcatcctctgcaccaggtcggacctggcagggtaacggtgagatgactcctcctctgcagggtcctcgggccagatttaggaagaagcctaaagcactgccgtataggcgcgagaattcacccggggaccttccaccgcctccactgccccccccagaggaggaggctagctgggctctggaattgcgggctgcaggctccatgtctagtttggagcgagagaggagcggtgagagaaaggccgtccaggcagtgccgctagcggcccaacgagtgctacatccagatgaggaggcatggttgccctacagtagaccgagtttcctaagcagaggacagggcaccagtacatgcagcacagcaggtagtaacagttcaagaggcagcagtagttcccgaggttctcgcggcccgggccgttcccggagtaggtcccagagtaggagtcagagtcaaagacccggtcagaaaagaagagaagaaccccgatag

SEQ ID NO: 204064 - DNA, 4095 bp, synthetic construct
  misc_feature 1..4095: note = Description of Artificial Sequence: Synthetic coding sequence
  source 1..4095: mol_type = other DNA
atggagcggcccgaggacagcctgagcctgtggagcctgaacctgtcgccccagttcccttgccttaacgccctgagacacccgctctcacctggctcaagagtcgggccagaagacgctatgccccgcattgtggagcagcctcctgatctattagtttctcgcggcgagcctgcaacactgccctgtcgagctgaaggtcggccccgtccaaatatcgagtggtacaagaatggggcccgggtggccactgtaagagaggacccaagagcccacaggctgctgctgccaagtggggctctcttctttcccaggatcgttcacgggaggcgggcacgacctgatgagggagtttacacttgcgtcgcacggaattatctaggtgccgccgcatctaggaacgcatccctggaggtggctgtacttagagatgacttcaggcaaagtcctggaaatgtggtggtggccgtgggggaaccggccgtgcttgaatgtgtcccccccagggggcatccagagccttcggttagttggcggaaggatggagctagactgaaggaagaggagggacggattacaattcggggcggaaaactgatgatgtcacacactctcaaaagcgatgccggcatgtacgtctgcgtggcatccaacatggccggtgaacgagagagtgccgcagcggaggtgatggtattggagcgaccttcatttcttcgcaggccggttaaccaggtggttctggcagatgcaccagttacctttctttgtgaggtgaagggggacccaccccctcgcctgcgctggcgaaaggaagatggtgagctgccaaccggacgctacgaaattcgctcggatcacagtttgtggataggtcacgtttcagccgaggatgagggaacttatacttgcgtggcggaaaactcggtgggccgcgcggaggcctctggcagccttagcgttcacgtgcctccacaactcgtgacgcagcctcaggaccaaatggccgcccccggagagtctgtcgcttttcaatgcgagactaagggcaatccaccacccgcgatcttttggcaaaaggaggggtcccaggtgctgctgtttccatctcagagccttcagccgaccggacgctttagcgtaagcccgcggggccagctaaacattaccgccgttcagcgcggggacgctggctactacgtctgccaggcggtgtctgttgccgggtcaatattggccaaagccctgctagaaattaagggggccagtctcgacggactgcccccagtgatcctgcagggccctgcaaatcagacactggtactcggcagcagcgtgtggctcccatgcagggttactggcaacccacaaccatctgtacgctggaaaaaagacgggcagtggcttcagggcgatgacctgcagtttaagaccatggccaacgggaccctttatattgccaatgtgcaggagatggacatgggattctactcttgtgtcgctaagagttctacaggcgaagcgacatggtctggatggctgaagatgagggaggactggggggtatcgcccgaccctcccactgagccatcaagtccccccggtgccccctctcaacctgttgtgaccgaaatcacaaaaaactctatcaccctaacctggaaacctaatccccagacgggagctgccgtgaccagttacgttattgaagccttctcccctgccgccgggaatacttggcgaaccgttgccgacggggtccagctggaaacgcatacagtgagcggtctccagcctaatactatctatctgtttcttgtccgcgccgtcggcgcgtggggtctgtcagaaccttcgcctgtgtccgagccggtccgtacacaggactcaagcccctcccgtcccgtcgaggacccgtggagggggcagcagggactggctgaggtcgctgtccgattgcaggaaccaatcgttctgggacccagaacactgcaggtcagctggaccgtagacggtcctgtgcagctagtgcaggggttcagagtgagttggcgggtggccgggcctgaggggggaagttggaccatgctggacctccagtcaccatctcaacagtctacggtgctgcgcggcctgcctccaggcactcagatccagataaaagtacaggcacagggccaagagggcttgggggctgagtccctgtctgtgacccggtcaattcctgaagaggcaccaagtggaccacctcagggagtcgccgtcgctttgggcggcgacggaaacagttctattacagtgtcatgggagcccccattaccttcccagcagaacggcgttatcactgagtatcagatctggtgtctgggaaacgaatcgaggtttcatctgaaccgatccgccgctggttgggcgcgctccgcaatgttaagaggtctcgtgccgggattgctgtaccgcactctggtggctgcagccacctctgctggggtgggggttccaagcgctccggtactggtgcagctgccgtctccacctgacctggagccagggctggaagtgggagctgggttggcagtccgcctggcccgagtgttgagggaaccagccttcttggcagggtcaggggcagcctgcggcgcacttctgctgggtctgtgcgccgccctgtactggagaaggaaacagcggaaagagctaagccactacacagcaagtttcgcgtacacacctgcagtcagtttcccccactccgaagggctgtcgggagccagctcccgcccaccgatgggcttgggaccggccccatactcctggctggctgactcctggccacatccatcacgttccccatctgcacaggagcccaggggctcttgctgcccttcaaaccccgatccagacgacagatactacaatgaagcaggaatctcattgtatttggctcaaacagctaggggtaccgctgcccccggagaaggcccggtgtattcaacaatcgatcctgccggagaggagctccagacattccatggtgggtttccccagcacccgtcaggggacctgggcccctggagtcagtatgcccctccagagtggagccagggggacagcggggctaaaggtgggaaggtcaagttgcttggcaaacccgtccagatgccctcacttaattggcccgaggcactgccgcctcctccaccgagctgtgagctgtcttgcctagagggaccagaggaggagcttgaggggtccagtgagccagaggagtggtgtccaccaatgcctgagaggagccacctcactgaaccctctagtagtggcgggtgcctggtcacgccatctagaagagaaacaccctcaccaaccccatcatatggacagcagagtaccgccacactgacacctagtcctcctgacccgcctcagccccctacggatatgcctcatctgcaccagatgccccggagagtaccccttggcccctcctctccactcagcgtgtcgcagcctatgttgggcattcgagaagctcgccccgctggcctaggcgcgggccccgcggcaagtccacatctgtcgccaagccctgcaccaagtacggcctcaagtgctcccggcaggacctggcaaggaaatggagagatgacgcccccactccagggaccgcgggcccgcttccgcaagaagccgaaagccctgccctatcgccgagagaactcgccaggagacctgcccccaccccccctccctccacccgaagaggaagctagctgggcactggagctcagagcggccgggtccatgtcctcgctggaacgagagcgaagtggggaaaggaaagcagtccaagcagttcctctagcggcccagcgggtgctccaccccgacgaagaggcgtggttgccctatagtagaccaagttttctgagtcggggacagggcacttccacttgctcaactgctggttcaaatagtagccgcgggagcagttctagccgaggaagtcgcggcccgggccgtagcagatcgcgcagtcagtcacgcagccaatcacagagaccaggacagaagaggcgagaggagccccgttag

SEQ ID NO: 204065 - DNA, 450 bp, synthetic construct
  misc_feature 1..450: note = Description of Artificial Sequence: Synthetic coding sequence
  source 1..450: mol_type = other DNA
atgaccccccccctgcagggcccccgggcccggttccggaagaagcccaaagccttgccatacaggagggaaaacagcccgggtgacctgcctcccccacctctccctccgcctgaagaggaggcgagctgggcactggaacttcgcgccgcgggctctatgagtagtctcgagcgagagcgaagtggagagagaaaagctgttcaggccgttcccctggcagcccagagagttttgcatcccgatgaggaggcgtggttaccttattcgcggcccagcttcctgagtcggggccagggcacctctacctgctccacggctgggagtaactcaagcagagggtcctcgtccagcagagggtcacgtggtccgggtaggtcacgtagcagatctcagagtcgatctcagtcacagcgccctggccagaagcgtagggaagagccacgctag

SEQ ID NO: 204066 - DNA, 3024 bp, synthetic construct
  misc_feature 1..3024: note = Description of Artificial Sequence: Synthetic coding sequence
  source 1..3024: mol_type = other DNA
atgggcagcggcggcgacagcctgctgggcggccggggcagcctgccgctactgctgctattgatcatgggggggatggctcaggactcaccccctcaaatcctggtgcatccccaggaccagctgttccagggccctgggccagcacgcatgagctgccaagcatcaggtcagcctccaccaacgatcaggtggcttctgaacggtcaacccctgtcgatggtgccaccagatcctcatcacctgctccccgacggtaccctactgctgctacaaccccccgccaggggtcacgcccatgacggccaagcacttagcactgatctaggagtgtacacttgcgaagcctctaatcgactaggcactgctgtaagccgcggtgctcggctctccgtagccgtgctgagagaggacttccaaattcaacctcgggacatggtcgctgtggtcggtgaacagttcacactggaatgtggccctccttgggggcacccagaacctaccgtgtcctggtggaaggatggaaaacctttggctctgcagcccggccggcataccgtgtccggcgggagcctgctgatggcccgggccgaaaagtcagatgagggcacatacatgtgtgtcgcaaccaattctgcagggcatcgggagtcgcgcgcggcccgggtatctatacaggaacctcaggactataccgaacccgttgagctactcgccgttcgaattcaactggagaatgtgacactgttgaacccagaccctgctgagggtcccaagccacggcctgcagtgtggctgagctggaaagtgagcgggcccgctgcacccgctcaaagctataccgccctgttcagaactcagactgcacccggtgggcaaggagctccctgggccgaggagttactcgctggatggcagtctgcagagctgggggggttacattggggacaggactatgagtttaaggtgagacccagcagtgggcgggccaggggccccgattcaaacgtgctcttgctgcgcctgcctgagaaagtccccagtgcccccccacaggaagtgaccctgaaacctggaaacggaacagtgttcgttagctgggtcccaccacccgcagagaatcacaatggaattatccgcggctaccaggtatggtctcttggcaacacctccctgcccccagccaactggaccgttgtaggtgaacagactcagctggagatcgccacgcatatgcctggatcatactgtgtccaggtggccgcagtgacaggtgcaggggccggggaaccatctaggcctgtttgcctactccttgagcaggcaatggagcgtgcaacccaggagcccagtgagcatggcccatggacactggagcaacttcgcgcgaccctcaagaggccagaagtcattgccacgtgcggtgtcgcattatggctcttgctgctgggaacagccgtctgcattcacaggaggcgaagagcccgagtccacctgggtcctggcttgtacaggtataccagcgaggatgccatccttaaacatcggatggatcactcggactcacagtggttagccgatacatggaggtctaccagcgggtcccgcgatttgagctcctcttcttctctgagtagtaggcttggtgccgatgctagggatccactggactgtcgtcggtccctgctgagctgggatagtcgttcacccggggttcccctcttgcccgacacaagcacattctacggatctcttattgccgaactgccctcaagtactccggcgcggccctcccctcaggtccccgcagttaggcggttacctcctcaactcgcccaactctcatctccctgttcatcctccgattctttgtgttcgagacgagggctaagttctccgcgtttatccctcgcacccgcagaagcttggaaagcgaaaaagaaacaggagctccagcacgctaattcaagcccactcctcagggggagccacagtctggaattgcgcgcatgcgagcttggcaatagaggatctaaaaatctcagccagtcccccggcgcagttcctcaggcgctggtagcatggcgagcactgggtcctaaacttcttagcagctcaaatgagctggtgaccaggcatctgccgccggcgcccttgtttccccatgagacccctccgacccagagtcagcagacccagcctcccgtggccccccaagcgcctagtagcatccttctacctgccgctcctatccccatcctctccccctgtagcccaccgtccccccaggccagcagtctttctggcccgtcacctgccagttcaagattgtctagctcaagtctgagcagcctcggagaggatcaggactcagttctcacacccgaagaggtggctttgtgtctcgagctatctgaaggcgaggaaacaccccgaaattccgtcagtccaatgcccagagccccatcccctccaaccacatatgggtacatctctgttcccactgcctccgaattcaccgacatgggcaggacaggcgggggcgtgggccccaaggggggggtcctcctgtgccctccccggccgtgtctaacacccacacccagcgaaggcagcctagcgaacggctggggaagcgcatccgaagataacgcagcaagtgcccgagcgtcactggtaagctcctctgacggttctttcttggcagacgcccactttgcgagggccctggcagtagccgtggacagcttcgggttcggtctggagcccagagaagccgattgtgtgtttattgacgcctcaagccccccttcacccagagacgaaatctttttaacaccaaacttatcccttcccctctgggagtggcgtcctgattggctagaagatatggaagtaagccatacgcagagacttggtagggggatgcctccttggcctcctgactcacagatttcctctcagcggtcacagctccactgtcgcatgcctaaagctggtgcaagtccggtggattatagctag

SEQ ID NO: 204067 - DNA, 2106 bp, synthetic construct
  misc_feature 1..2106: note = Description of Artificial Sequence: Synthetic coding sequence
  source 1..2106: mol_type = other DNA
atgggcagcggcggcgacagcctgctgggcggccggggcagcctgccccttctgttgttgttgatcatggtgctgagagaggatttccaaatccagccaagggatatggttgccgtggtgggagaacagttcaccctggaatgcggtcccccgtggggacatcctgagcccactgtgagttggtggaaagatggcaaacctctggcgctgcagcctggtcgccacaccgtgtcggggggctccttgttgatggctagagccgagaagagcgacgaaggcacctacatgtgtgtggccaccaactcagctggtcatagggagagccgggccgcccgagtgagcatacaggaaccccaagattataccgaacccgtggaattattggctgttcgcattcagttggagaatgttacgttgctgaaccccgaccccgccgagggcccgaagccgaggcccgcagtgtggctaagctggaaagtgtccggtcctgctgctccagctcagtcatacactgctctgtttcgaacacagacagcacccggcggtcaaggagccccctgggcagaggaacttctggctggctggcagtccgccgaacttggcggcctgcactggggacaggattatgagttcaaggtgcgcccttcaagcgggcgggcacgggggcctgactccaacgtcctcttgctcagacttcctgagaaagttccatcagcccctccacaggaggtgacactcaagcccgggaacgggaccgttttcgtcagttgggtgccaccacctgctgagaatcataacggaatcatccgcggatatcaggtgtggtccctcggtaacactagcttacctccggctaactggaccgtagtcggcgagcagacccaactcgaaattgctacccacatgcctgggtcttattgtgtgcaggtcgcggcggtcaccggggccggggcaggggagccatcacggccggtgtgcctcctcctcgaacaggccatggagagagctacccaggaaccaagcgaacacggtccatggaccctagagcaacttcgagccactctgaaaagaccagaggtgatcgccacttgcggagtcgctctgtggcttctcctcctcggcaccgccgtatgcatccaccggcggcgccgggcacgcgtgcacctaggaccagggctttacaggtatacctcagaagacgccatattaaagcatcgaatggatcatagcgacagccaatggctcgcagatacatggcgcagtactagcggttctcgcgacttatctagcagctcttccttgtccagcagactgggtgcagacgctcgcgaccccctggattgcagacgctcgctgctatcctgggactcaagatcaccaggagtacccctgctcccagatacttccaccttttatggatccctcatagcggagcttccatccagtacccccgcacgcccatccccccaggtcccagcggtccggcgcctgcccccacagctggcacagctatcatcaccctgtagttccagcgactccctctgttcaagacgtggtctgagtagtccgcgtctaagccttgcccccgctgaggcttggaaggccaagaaaaagcaggaactgcagcacgccaactcctctccgttgctccgaggaagtcattcccttgaactgagagcctgtgagctcggcaatcgcggttccaaaaatctctctcagagcccgggtgcggttccacaagccctggtagcatggcgggcgcttggtccgaaacttctgagtagcagcaatgagctagtgacccggcacttgccccccgcacctctgttcccccatgaaacccctcctactcagtcgcaacagacacaacctcccgttgccccccaggccccaagcagcatcctgctgcccgctgcgcccataccaattctgagtccatgtagccctcccagcccccaagctagctccctcagcggccctagtcccgccagcagccggctgtccagctctagcctatcatctctaggagaagaccaggacagcgtgctgacaccagaggaggttgctctttgcttggaactgagcgaaggagaggaaaccccctag

SEQ ID NO: 204068 - DNA, 2589 bp, synthetic construct
  misc_feature 1..2589: note = Description of Artificial Sequence: Synthetic coding sequence
  source 1..2589: mol_type = other DNA
atggtggccgtggtgggcgagcagttcaccctggagtgcggccccccatggggtcacccagagcctacagtgtcatggtggaaggatggaaagcccctagctctccagcccggccgccataccgtctccggcggcagtctgcttatggcacgagctgaaaaatctgatgagggcacctatatgtgtgtggcaacaaattctgccgggcaccgggaatcccgcgcagccagagtgtccatccaagagccacaggactacacagagcccgtcgagctgcttgccgtgcgtatccagctggaaaatgtgaccctgctcaatccggatcctgcagagggtcctaagccacggcccgctgtatggctgagttggaaggtttcaggtcctgcagcgcctgcacagagttatacggcccttttcaggactcagacagctcccgggggacagggggccccctgggcagaagaactccttgccgggtggcaatcagctgaactgggaggattacactggggacaggattacgagttcaaagtgcgacccagcagcggaagggcccgtgggccagatagcaatgtccttctgctgcgattgcccgaaaaggtgccttccgctcctcctcaggaggtgaccttgaaacccgggaatggcacggtcttcgtgtcctgggtgcctcccccagccgaaaatcataacggcatcataaggggctaccaagtctggagcttaggcaacactagtctgccaccagcaaactggactgtggtcggcgaacagacgcagctcgaaattgccacccacatgcctggaagttactgcgtgcaagttgctgccgtgactggggccggcgcgggagaacccagcaggcctgtgtgtctgctcttggagcaagctatggaaagggccactcaagagcctagtgagcacgggccttggactttggaacagttacgggctaccctgaagcggccagaagtgatcgcgacttgtggcgtggccttgtggttgctgctgctcggaaccgccgtctgcatacacaggagacgacgagcacgagtgcatctggggcctggactatataggtacacaagcgaggatgctatcctcaaacataggatggatcactccgacagccagtggttggctgatacatggcgctcaaccagtgggtctcgggatctctcctcgagtagcagcctgagctcccggcttggcgcagatgcgcgcgaccccctggactgtaggaggtccttgctcagctgggactcaaggtctcccggagtgcctctgttgcccgacacttccactttctacggttctcttatagccgaactcccttcctctaccccagcacgccccagtcctcaggtccctgctgtgaggcgtttgccacctcagctggcccaactttcatctccctgttccagcagcgactccctttgcagtcggaggggtctatcatccccgcgcttgagtctagctccagccgaagcatggaaggcaaagaaaaagcaggagttgcagcatgccaactcttctccactccttaggggcagccacagcttggagctgcgcgcctgcgagctggggaatagaggttctaaaaatctctctcaatctcccggggcagtaccccaggctctggtggcatggcgcgcacttgggcctaaactgctgagttctagcaacgagctggtcaccaggcatctgcctcccgcccccctctttccacacgagacccccccaacccagtcacagcaaactcaaccaccagtggcccctcaggcaccctcctctattctattaccggcagccccaattcctattctgtcaccatgctctcccccatctccccaggccagcagcctttctggaccgtcacccgcctcatccagactttcttcgtcttcactgtcttcattgggcgaagaccaggatagcgtgcttaccccagaggaggttgcactgtgcttagagctgagcgagggggaggaaacacctagaaattcagtgtctcccatgccacgtgcgccctcccctcctacaacctacgggtacatttcagtgccaacagcctccgagtttacagatatgggcaggaccgggggcggtgtgggacccaaagggggggttctcctttgccctcccaggccctgcctgaccccaacccccagtgagggatcgctggccaacggctggggttctgcgtctgaagataatgccgcttcagcccgcgcatcactggtgagctcatcggacggcagttttcttgctgatgctcattttgctcgggccttagctgttgcagtggacagttttgggtttggtctggagcccagagaggccgattgcgtcttcattgacgcgtcatctccccctagcccgagggacgagatcttcttgactcccaacctaagcctgcctttgtgggagtggaggcctgattggctggaagacatggaggtgtctcacacgcagagattgggtaggggaatgccaccttggcctcccgacagccagatctcttcacagagatcccagctgcactgcaggatgcccaaggccggagcctcccccgtggactactcctag

SEQ ID NO: 204069 - DNA, 3708 bp, synthetic construct
  misc_feature 1..3708: note = Description of Artificial Sequence: Synthetic coding sequence
  source 1..3708: mol_type = other DNA
atgagcggccccaccgacgagaccgccggcgacctgcccgtgaaggacacaggactgaatctttttggaatgggaggcttgcaggagacttccactaccaggacaatgaaaagtcgtcaggccgttagtagggtgtcccgtgaggagttggaagaccgatttttacgcctacacgatgaaaacatcttgctgaaacagcacgccaggaagcaggaagacaaaatcaagaggatggccacaaagctcataaggctcgttaacgataaaaagaggtacgagcgagttggaggaggcccaaaaaggctgggtcgagacgttgaaatggaggagatgatcgagcagctacaggagaaggtgcatgaactcgagaaacagaacgagactcttaaaaaccgcttaatctcagccaaacagcaactgcagacccaaggctaccggcagactccatataacaacgtacagtcaaggattaatacaggaagacgcaaagctaatgaaaatgctggtctgcaggagtgtcccaggaagggaataaagtttcaggacgctgatgtcgccgaaacgccacacccaatgtttaccaagtatggaaattctcttctggaagaggccaggggagagattcgtaatctcgaaaatgtgatccagtctcaacgggggcagattgaggaattggagcatttggctgagattctgaaaacccaactgcgtagaaaggagaacgagatcgagctctcactgctgcagcttagggagcagcaggcaaccgatcagcggagcaatattcgtgacaacgttgaaatgatcaagctgcataaacaactcgtggaaaaatcaaatgccttaagcgctatggaaggaaaattcatccagctacaagagaaacagcgaacacttagaatcagccatgacgctctgatggccaacggcgatgaactgaatatgcagttgaaagagcagaggctcaaatgttgcagccttgagaagcagctgcattccatgaagttctcagaaaggcggatcgaagagttgcaggatcgcatcaacgaccttgagaaagaacgcgaactcctcaaggagaactacgataagctgtatgactcagccttctctgccgctcatgaagagcaatggaagctcaaagagcaacaactgaaagttcagatcgcgcagctggagaccgcgctgaaatccgatcttaccgacaagactgaaatcctggaccggcttaagacagagagggaccagaatgagaaattagttcaggaaaacagggagcttcagctgcaatacctcgagcagaaacagcagctggatgagctgaaaaaacgaatcaagctatacaaccaggaaaacgatattaatgccgatgaactgtctgaagctctcctccttatcaaagcccagaaagagcagaaaaatggagacctgtcctttctggtgaaagtggattccgaaataaacaaagatctggagcgatccatgagggaactccaagctactcacgcagaaaccgtccaggagctggagaaaacacggaacatgttgattatgcagcacaagataaataaggattatcagatggaagttgaagccgtgactcggaagatggagaatctgcagcaggactacgaacttaaggtggaacaatatgtgcatctcctggacatcagagccgcacgaattcacaagctagaggcgcagctcaaagatattgcttatgggacgaaacagtacaagtttaaacccgaaattatgcccgacgacagtgttgacgagttcgacgagaccatacacctggaaagaggcgagaatctttttgaaattcatattaataaggtgacattctcttccgaggtgctgcaggcaagtggcgacaaagaacccgtcacattttgtacgtacgcattctacgacttcgagctgcaaaccacaccagtcgttcgcggcttgcaccctgagtataactttacgagccagtatctggtgcatgtgaatgacctgttccttcagtatatccagaagaacaccattacgctggaggtgcatcaagcatactccactgaatacgagacaattgccgcctgccagctgaagtttcatgagattctggagaagagtggtaggattttctgcactgcttctctcattgggactaaaggagatatacctaattttggcaccgtggaatattggttccggctgcgcgtgcctatggatcaggccatcagactgtatcgagaacgggccaaagctctcggatacattaccagtaacttcaagggaccagaacacatgcagtccctgagtcaacaggcgccaaaaactgcgcaacttagtagcactgactccacagacggtaacttaaatgagttacacatcacaatccgatgctgcaaccatctgcagagcagggcttcccacctacagcctcacccatacgttgtttataagtttttcgattttgcggaccacgataccgccattattccctcatcgaacgaccctcagtttgatgatcacatgtatttccctgtcccaatgaacatggacctggatcgctacctgaagagtgaatccctgagcttctatgtgttcgacgacagtgacactcaggagaacatttatataggcaaagttaacgtgcctttaatctctctggcccacgatcgttgtattagcggtatttttgaactgacagatcaccagaagcatcccgctggtaccatccatgtaattctcaaatggaaatttgcttacctacctccaagcgggtcaattacaacagaggacctgggcaacttcattcgctctgaggagccggaagtggtacagcgactccctcccgcctcttccgtttccaccctagtcttggccccgcgcccgaaacctagacaaaggctgacgcccgtcgataagaaagtgagcttcgtcgacataatgccccatcagtcagacgtctcccaggagggttccgtggatgaggttaaggagaacaccgagaagatgcagcagggaaaggacgacgtctccctgctcagtgaaggccagctggcagagcagtctcttgcgtcttccgaagacgagacggagattactgaagacctggaacccgaagtcgaggaagatatgagcgcttccgactcagatgactgcataatccccggtccaatctcaaagaacataaagcagccttccgaaaaaatcaggattgagattatagctttaagcttgaatgactctcaagtcaccatggatgacactatccagagactgtttgtcgaatgcaggttttatagtttgcctgctgaggagacacctgtcagcctacccaaacccaaaagcgggcagtgggtttattacaattactcaaacgtgatatacgtggataaggagaacaataaagccaagcgcgacatactgaaagctatactgcaaaagcaggagatgccgaatagaagcttacgcttcactgtcgtctccgatccccctgaggatgagcaagatttagaatgcgaagacatcggggtggctcacgtggacctggcagatatgtttcaagagggcagagacttaatcgagcagaatattgacgtgttcgacgcacgggcagatggcgaaggcatcggtaagctgagagtgactgttgaggcactccacgcacttcaaagcgtttacaagcagtacagggacgacctggaggcatag

SEQ ID NO: 204070 - DNA, 3948 bp, synthetic construct
  misc_feature 1..3948: note = Description of Artificial Sequence: Synthetic coding sequence
  source 1..3948: mol_type = other DNA
atgagcggccccaccgacgagaccgccggcgacctgcccgtgaaggatactgggcttaatttgttcggtatggggggcctgcaagagacaagtactacaaggacaatgaaaagccgccaggctgtgtctcgggtctcaagagaggaacttgaagacagattccttagactgcacgacgagaacattctgctgaagcagcacgcgcgcaaacaggaagataaaattaaaaggatggcaactaagctgatcaggctggtcaacgacaaaaagcgctacgagagggtgggggggggcccaaaaagacttgggcgggacgttgagatggaggaaatgatagagcaactgcaggaaaaggtgcacgagcttgaaaaacagaacgagacgctgaagaatcgcctgatatctgccaagcaacagttacagactcagggatacagacagaccccatacaacaatgtacagtctcgcatcaacaccggccgcagaaaagctaacgaaaatgctggcttacaggaatgcccccgaaaggggatcaagttccaggatgccgatgttgcggaaacccctcatcctatgttcaccaaatacggcaactcgttacttgaagaagcaaggggcgaaatcagaaatctggagaatgtgatccagagccagcgggggcagatcgaggagctggagcacctcgctgaaatactgaagactcaactgcgccgcaaggaaaacgagatcgagctcagcctgctgcagctccgggagcagcaggccaccgaccaacgctctaacatccgggataatgtggaaatgatcaaattgcacaaacagctggtggagaaatccaacgcactgtcggcaatggagggtaaatttattcagctgcaggagaaacagaggactttgaggatatcccatgacgccctgatggctaacggcgacgaactgaacatgcaactgaaggagcagcggctgaagtgttgcagtttggaaaaacagcttcattccatgaaattctccgagcggagaatcgaggaactacaggatcgaatcaacgacctagaaaaggagcgagaattacttaaggagaactacgataagctctatgatagcgcattttctgctgcccacgaggaacagtggaaactaaaggagcagcagctcaaggtgcagatcgctcagttggaaactgctttaaagtcagatcttaccgacaagactgagattctcgaccgattgaagactgagcgggaccagaacgagaagctggtacaggagaacagggaactgcagctgcaatatctcgagcaaaaacaacaattagacgagttgaaaaagcgcatcaagctttataaccaggagaatgacatcaatgccgacgagctttcggaggcacttctgctgattaaggcccagaaagagcagaagaatggagacctaagttttctcgtgaaggtggactccgagatcaataaggatctcgaacggtctatgcgcgagttacaggctacacacgccgaaactgtgcaggagctggagaaaactcggaacatgctgattatgcaacacaagatcaataaagactatcagatggaagtggaggcagtgacccgtaagatggaaaatctccagcaggactacgaactaaaagtggaacagtacgtccacctgctggacattcgcgctgcccggatacataagcttgaggctcagctgaaagacatagcctatggaaccaaacagtataaattcaagccagagatcatgccagatgattccgtggatgaatttgatgagacgatacaccttgagcgtggcgaaaatctattcgaaattcacatcaacaaggtaacattctctagtgaagtgctgcaagctagtggggacaaagagcccgttacattttgcacatacgccttttacgactttgaattgcagactacgcctgtagtgaggggtctgcatcccgaatacaacttcacctcccagtatctggtgcacgtgaatgatctctttcttcagtatattcagaaaaatacaattactctggaggtccatcaggcctacagcactgagtatgaaactattgccgcttgccagctgaagttccacgagatcttagagaagtctgggagaatcttctgcactgctagcctaatcggaacaaaaggagacatccctaattttggcacagtggagtattggttccgacttagagtgccaatggaccaggctatccggctctaccgcgaaagggccaaggctctgggatacattacatccaacttcaaagggccggaacatatgcagtctcttagccagcaggctcctaaaactgcccagctgtcgagcacagacagtaccgatggaaatcttaacgagctccacataactatcaggtgttgtaaccaccttcaatctagggcttctcacctgcagccacacccttacgtggtctacaagttcttcgactttgcggatcacgataccgcaattataccaagctctaatgatcctcagttcgacgatcacatgtacttcccggttcctatgaatatggatctcgatcggtaccttaagtctgagagcctaagcttttacgtattcgatgactcggacactcaggaaaacatatacattgggaaggtaaatgtgcccctcataagtcttgcccatgaccggtgtattagcgggatttttgagctcacagaccaccagaaacacccagctggaactattcacgtgatattaaaatggaaatttgcgtaccttccacccagtggatcaatcacaaccgaagatctgggtaacttcatccgttccgaggaaccagaggtagtccagaggctgccaccagcatcatccgttagcacacttgttctggctccccgccctaagccgagacaacgactgaccccagttgacaaaaaggtgagctttgtcgatattatgcctcatcagtctgacgagacttcaccacctcctgaggatcgaaaagaaatatctcccgaagtagagcacattcccgagattgaaatcaacatgttgacagtcccgcatgtgcctaaagtgtctcaggagggctcagtggacgaagtgaaggaaaacaccgaaaaaatgcagcaggggaaggacgatgtctcgcttttatctgagggccaactcgccgagcaaagcttggcatcttcagaagatgaaaccgaaataaccgaggaccttgaacccgaggtggaagaggacatgtcagcctctgacagcgacgattgtatcattccaggcccgatctccaaaaatatcaagcaaagcctggctttatcccccggcttgggctgcagcagtgccattagcgctcactgcaattttcgccttccaggctcaagtgacttccctgcctcagcctcccaggtcgacggcataaccggggcatgccaccacacccaaccatctgaaaagattcgaattgagattattgctctctcacttaacgatagccaggtgacaatggatgataccatccaacggctttttgttgagtgtagattttattctctgcctgctgaagagacacccgttagcctgccgaagcctaaatcaggccagtgggtgtactacaattatagcaatgtcatctatgtggacaaggagaataataaagctaagcgagacatcctaaaagccattctgcagaaacaggaaatgcccaataggtccctaagattcacagtcgtgtccgaccctccggaggatgagcaggacctcgagtgcgaagatatcggtgtggcacacgtggaccttgcagacatgtttcaggaggggcgagaccttattgaacagaacattgatgttttcgacgccagagccgacggtgaaggaattgggaaactgagggtgacggtcgaggcactccacgcactccagtcagtgtataagcagtatcgggacgacctggaagcttag

SEQ ID NO: 204071 - DNA, 1956 bp, synthetic construct
  misc_feature 1..1956: note = Description of Artificial Sequence: Synthetic coding sequence
  source 1..1956: mol_type = other DNA
atggccgcccccctgctgcacacccggctgcccggcgacgccgccgcatcatcaagcgctgtgaagaaattgggagccagccgcaccgggatttcaaatatgcgcgcattggagaacgacttctttaatagtccccccagaaagactgtgaggtttggggggaccgtcacggaggtgctccttaagtataaaaagggtgagacaaacgattttgagctgctgaagaatcagttacttgatccagacatcaaggacgaccagatcataaactggttgttggaattccggtcatctatcatgtatctaaccaaagattttgaacaactgatctctatcatcctaaggctgccgtggctcaataggtcccagaccgtagtggaggagtacttagcatttctggggaatttggtctccgcacagaccgtcttcttgcggccgtgtttgtccatgatcgcctcccacttcgtccctcccagagtgatcatcaaggaaggcgatgtcgacgtgagtgattccgatgacgaagacgacaatctgcccgcgaactttgatacctgccatcgcgccctgcaaattatagcacgctatgtgccgagtactccctggtttcttatgccaatattggtggaaaagttccctttcgtgcggaagtcggagcgcacgctggaatgctacgtgcacaacttactgaggatctcagtgtacttccccacattaagacacgaaatccttgagctgatcatcgaaaagctgttgaagctcgacgtcaacgcaagcagacagggcatagaagacgccgaagaaacggctacgcagacctgtgggggtaccgatagcactgaaggtctgtttaatatggatgaggatgaggagacagagcatgaaaccaaggctggccctgaaaggctggaccagatggtgcaccccgtcgctgagcggctagatattctgatgtcactggtgctgtcttatatgaaagatgtctgttatgttgacgggaaagttgacaacgggaagaccaaagacttgtacagagacctgattaacatattcgacaaattgctgcttcctacacacgcctcctgccatgtccagtttttcatgttctatttgtgctcatttaagttgggatttgctgaagcttttctggagcacctgtggaaaaaactgcaggatccttctaatcccgccatcatccgacaggcagcaggaaactacattggttcatttttagctagagctaagtttattcctctgattactgttaaatcttgtctggacctactggtgaactggctgcatatctatctgaacaatcaagactctgggactaaggctttctgcgacgttgccctccatggtcccttctattcagcgtgtcaagcggtcttctacacgtttgtattcaggcacaagcagttgctgagtggtaatctgaaggagggactgcaatatctgcagagcctgaatttcgagaggattgtcatgtcgcagcttaaccctttgaaaatctgtctgccctcagtggtaaatttcttcgcagcgataaccaacaaataccaactggtcttctgttatacaatcatagagcggaacaaccggcagatgctccctgtgataagatccacggcaggaggtgattctgtgcagatctgtactaaccccctggatacctttttccctttcgacccatgcgtgctaaagcgaagcaagaagtttatcgacccaatttatcaggtctgggaggacatgtctgccgaagaattacaggaatttaaaaagccaatgaaaaaggacatcgtggaagacgaggacgacgactttcttaagggggaagtgcctcagaatgacacggtgatagggatcacaccgtcctcattcgatactcactttcgctccccttcaagctccgtgggctccccaccagtgttgtacatgcagccctccccattgtag

SEQ ID NO: 204072 - DNA, 1857 bp, synthetic construct
  misc_feature 1..1857: note = Description of Artificial Sequence: Synthetic coding sequence
  source 1..1857: mol_type = other DNA
atgcgggccctggagaacgacttcttcaacagccccccccggaagaccgtacgttttggcggaacggtcacggaagttctgctgaagtacaaaaagggagagactaatgatttcgaactactgaagaatcagttgctggatccagatattaaagatgaccagatcataaactggctcctggaattccggtctagcatcatgtatcttacgaaagactttgaacagctgatctcaataattttaagactcccttggctaaaccgcagccaaacagtggtcgaggagtacctggctttcctcggtaatctggtttctgcccagaccgtttttctacgcccctgccttagtatgatcgcttctcacttcgttccccctcgggtgatcatcaaggagggagacgtcgatgtgtctgattcagatgacgaggacgacaacctgccggcaaactttgacacctgccaccgcgcgttgcagatcatagcccgatacgtgccaagcaccccatggttccttatgccaatcctcgtggaaaagttcccctttgtccgaaaatctgagagaaccctagagtgttacgtgcacaatctgttgcgaatctccgtgtatttccctacccttaggcatgagattctggaattaattattgagaaacttttaaaactggatgtgaatgccagcagacagggcattgaggatgctgaggagacagcgacccagacatgcggtgggacagactctactgagggtctgttcaatatggatgaggatgaggagaccgaacatgagaccaaggcaggcccagaaagattagatcagatggtccatcctgtggccgaacgcctagatatcttaatgtccctagtgctgagttacatgaaagatgtttgctatgtcgatggtaaagtggataacggtaaaacaaaagatctgtaccgggacctcatcaatattttcgacaaactgcttctccctacccacgcttcctgccacgttcagttctttatgttctacctttgttcttttaaactgggttttgccgaagctttccttgaacacttgtggaagaagctacaggacccttctaatcctgctataattcgtcaagcagccggcaattatataggcagcttcctggctcgggcaaaattcatcccacttatcactgtgaaaagttgtctcgatctcctggtcaactggctgcacatctacctcaacaatcaggatagtggaactaaggcgttctgcgacgtcgcattgcatggccccttttacagtgcatgtcaggccgtgttctacacttttgtgttccggcataaacagctgctgtctggtaatctgaaggagggcctgcagtacttgcagagcctgaacttcgagcggattgtgatgagccagctcaacccgctaaaaatctgccttccatcagtggtgaacttcttcgcagcaataacaaataagtatcagcttgttttttgttacaccattattgagcgcaataaccggcagatgttaccagtcattaggtctacagccggcggcgactctgtgcaaatctgcactaaccctctcgacacctttttcccattcgacccatgcgtgctgaaaagatcaaagaagtttatcgatcccatctaccaggtatgggaagacatgtccgcagaagagctgcaggagtttaagaaacccatgaagaaagatatagtcgaagatgaagatgacgacttcctgaagggagaagttccccagaatgacaccgtgatcggcattactcccagtagttttgacacacacttccgctccccctccagttcagtgggatctccacctgtgctgtatatgcaaccctccccactctag

SEQ ID NO: 204073 - DNA, 1866 bp, synthetic construct
  misc_feature 1..1866: note = Description of Artificial Sequence: Synthetic coding sequence
  source 1..1866: mol_type = other DNA
atggccgcccccctgctgcacacccggctgcccggcgacgccgccgcctcttcgtctgccgttaaaaaactgggcgcttctaggaccggcatttccaacatgcgcgccctcgaaaacgactttttcaactcacccccacggaaaactgtgcgatttggagggaccgtgaccgaggttctgctaaaatacaaaaaaggagaaactaatgattttgaacttttaaaaaatcagctccttgaccccgacatcaaacgtctgccctggttgaacagatcccagactgtcgtcgaagaatatctcgccttcctggggaatctagtatccgcccagacagtgttcttgaggccatgtctgtccatgattgcttcccacttcgtgcccccccgggtcatcataaaagaaggcgacgttgatgtgtccgattccgacgacgaggacgacaaccttcccgctaacttcgacacttgtcatagagccttgcagattatcgccaggtacgtgcccagtaccccctggtttctgatgcccatcctggtggagaagttccccttcgttcgaaaatcagaacggacacttgaatgctacgtacacaacctcctgaggatcagcgtgtattttccaacactcagacacgagatcctggaactcatcatagaaaagttgctgaaactggacgtgaacgcatccagacagggcatcgaggatgccgaggaaacagctacgcagacctgcgggggtaccgacagcaccgaggggctgtttaatatggacgaagatgaagaaacagaacatgaaactaaggcaggccctgagagattggaccagatggtgcaccccgtggccgagcgccttgacattctaatgtctctggttctttcttatatgaaggacgtttgctatgtggatggcaaagtggataatgggaagaccaaagatctatatagagacctgattaacatatttgacaagctgctgctccccacgcacgcctcctgccacgtgcagttttttatgttctacctgtgcagttttaagttgggcttcgccgaggcatttttagaacacctatggaagaaactgcaggatccaagcaatccggccatcatccgccaagcggcaggcaactatattggctcatttctggcgcgggccaaattcatacccttgatcactgtgaagtcgtgtttggatctacttgtgaattggttacacatatacctaaataaccaggattcaggcactaaagccttctgcgacgttgccctgcacggaccgttttacagcgcttgccaggcagtcttctatacattcgttttccgacataagcagctgctgtccgggaacctgaaagagggcctccaatatctccagtcgcttaacttcgagcggatagtgatgagccaactgaaccccctgaaaatttgtctcccaagtgttgtgaacttctttgctgccataacaaacaagtatcaactcgtgttctgctacacaatcatcgagcggaataaccggcagatgctgcccgttatccgcagcacagccggcggagatagcgtgcagatttgcaccaaccctctcgatacatttttccctttcgatccctgtgtcctaaagcgtagtaagaaattcatcgatcctatctatcaggtatgggaagacatgtcagctgaagaactgcaggagtttaagaagccaatgaaaaaagacattgtcgaagacgaggatgacgacttcttaaagggcgaggtcccccagaacgatacggtgattggtatcacacctagtagctttgatacacactttcgatctccgagtagcagcgtcggatcacctcccgttctctatatgcagccctcacctctgtag

SEQ ID NO: 204074 - DNA, 1410 bp, synthetic construct
  misc_feature 1..1410: note = Description of Artificial Sequence: Synthetic coding sequence
  source 1..1410: mol_type = other DNA
atgatcgccagccacttcgtgcccccccgggtgatcatcaaggagggggacgtggacgtaagtgatagtgacgacgaagacgataacctccctgcgaattttgacacctgccaccgcgctctgcagatcatcgctaggtatgtaccttcaactccatggtttctgatgcctatcctggtcgaaaagttcccattcgtcaggaagtcggaaaggacactcgttaatgcatctaggcagggaattgaggacgctgaagaaacggccacacaaacttgcggagggaccgacagtacagagggcttgttcaacatggatgaggacgaggaaaccgaacacgagaccaaggctgggcccgaacgactggaccaaatggtacatcccgtggcggagagactggacatcctgatgagtctcgtgctgtcatatatgaaagatgtctgctacgtggatggtaaagtcgacaatggaaaaacgaaggatctctacagagatctgataaatattttcgataagctcctgcttcccacacacgcctcttgtcatgtgcaatttttcatgttttacctgtgttcattcaaattaggcttcgcagaggcttttctggagcacctttggaagaagttgcaggatccatccaaccctgcgattatcaggcaggcagctggaaactatatcgggtcatttctcgcccgagccaagtttattccgctcatcactgtaaagtcctgtttggacctgttggtcaactggctgcacatctacctaaacaatcaagactcaggcaccaaggctttctgtgatgttgctcttcatggacccttttactctgcttgccaggccgtgttctacacctttgtcttcagacacaaacagctcctctcaggaaatttgaaagaagggcttcagtacctgcagagcctaaatttcgagagaattgtaatgagtcagctcaatcctctcaaaatttgtttgccctcagtggtaaatttttttgctgctataacaaacaagtaccagctcgttttctgctatacaatcatagagcgcaataatcggcagatgctccctgtcatacgatcaacagctgggggcgattctgtccaaatctgtactaatcccttggacacattttttccctttgacccatgcgtccttaagagatccaaaaagtttatcgaccccatctaccaggtatgggaagacatgagtgctgaagagctgcaggagttcaaaaagcctatgaaaaaagacatagtggaagacgaagatgatgatttcctcaagggcgaagtgccacagaatgacacggtcattggaatcacccctagctctttcgacactcattttaggagtcctagcagttcagtaggaagtccaccggtgctttacatgcagccgtctcctctatag

SEQ ID NO: 204075 - DNA, 792 bp, synthetic construct
  misc_feature 1..792: note = Description of Artificial Sequence: Synthetic coding sequence
  source 1..792: mol_type = other DNA
atgcggctgggcctgtgcgtggtggccctggtgctgagctggacccatctcaccatttcgagccgcggtatcaagggtaaaaggcaaaggaggattagtgcggaaggctcccaggcttgcgccaagggatgtgagctgtgctctgaagtcaacggatgcctcaaatgtagcccgaagctgtttatccttctggagcggaatgacattaggcaagtgggagtttgtttaccctcttgccccccaggttattttgacgctcgaaaccccgacatgaataagtgcatcaaatgtaaaattgaacactgtgaggcctgttttagccacaatttctgcaccaagtgtaaagaaggcctgtacctccacaaaggccggtgttaccccgcatgtccagagggttcatctgccgccaatggtactatggagtgctccagccccgcccaatgcgaaatgtccgagtggagcccatggggcccttgctcaaagaaacagcagctctgtggttttagacgcggaagcgaggaacggacccggcgggtcctccatgcacccgtcggagatcacgccgcttgtagcgacactaaggagacacggagatgcacggtgcgacgggtgccatgtccggaaggacagaaaagacgtaagggcggccaggggaggcgggaaaacgctaaccgaaacctggcacggaaagaaagtaaagaagccggagccggatccagacgcaggaagggacagcaacagcaacagcaacaaggtacagtgggcccgcttacctccgcaggccccgcatag

SEQ ID NO: 204076 - DNA, 792 bp, synthetic construct
  misc_feature 1..792: note = Description of Artificial Sequence: Synthetic coding sequence
  source 1..792: mol_type = other DNA
atgcggctgggcctgtgcgtggtggccctggtgctgagctggacccacttaaccatttcatcccggggcatcaagggtaaacggcagcggcgcatttccgcagaagggagtcaagcttgcgcgaaagggtgtgagctgtgtagtgaagtcaatggatgcctcaagtgttctccaaagctgttcatcctccttgaaagaaatgacattcgacaagtgggggtatgcctgcctagctgccccccagggtacttcgacgcccgaaacccagacatgaataaatgcataaagtgcaagatcgaacattgtgaggcctgttttagtcacaatttctgtactaagtgtaaggaaggactgtacctacacaaggggagatgctaccctgcctgcccagagggttcatccgccgctaacgggaccatggaatgttctagtcctgcccagtgcgagatgtccgaatggtccccatgggggccctgcagtaagaagcagcagttatgtggtttcaggcgcggatccgaagagagaacacggagagtgcttcatgcgcccgtgggagaccacgctgcctgtagcgacactaaagagacgcgtcgatgcaccgtgaggagggtgccttgtcccgaaggccagaagcgccgtaagggtggacagggccggagagaaaatgcaaacagaaatctcgcccgtaaggaaagcaaggaggctggggctggctcccggagaaggaagggccagcagcagcagcagcagcagggtacagttggccctctgacgagtgccggaccggcctag

SEQ ID NO: 204077 - DNA, 792 bp, synthetic construct
  misc_feature 1..792: note = Description of Artificial Sequence: Synthetic coding sequence
  source 1..792: mol_type = other DNA
atgcggctgggcctgtgcgtggtggccctggtgctgagctggacccacctgacaatatcctctaggggaattaaaggaaagagacaaaggcgcataagcgctgaaggttcccaggcctgtgctaaaggctgcgagctttgttccgaagtcaatgggtgtctgaagtgttcccccaaactattcatcctcctggaacgtaatgacatcagacaggttggcgtctgcctcccttcttgccctccgggatactttgatgccaggaaccctgatatgaataagtgcatcaagtgcaaaatcgaacactgtgaggcttgcttctcacataatttttgtaccaaatgtaaagaagggctgtaccttcacaaaggcaggtgttatcccgcctgccccgaagggtcatctgccgctaacgggacaatggagtgcagcagcccggcacagtgcgaaatgtcagagtggtctccctggggcccttgcagcaaaaagcagcaattgtgcggcttccggaggggaagcgaagaaagaacccgtcgcgtgttgcatgccccagtgggtgaccacgccgcgtgcagcgatacaaaggagacacgaagatgcaccgtcagaagggtaccatgtcctgaggggcagaagaggcggaaaggcgggcagggtaggcgagagaacgccaacaggaatctggctcgtaaggagtcaaaggaggctggtgccggatcacggcggcggaagggccaacagcagcagcagcaacagggaaccgtcgggccgttgacatccgcggggccagcctag

SEQ ID NO: 204078 - DNA, 603 bp, synthetic construct
  misc_feature 1..603: note = Description of Artificial Sequence: Synthetic coding sequence
  source 1..603: mol_type = other DNA
atgcggctgggcctgtgcgtggtggccctggtgctgagctggacccacttaaccattagcagtagagggatcaaagggaagaggcagcggcggattagtgcagagggcagccaggcttgcgcaaaaggatgcgagctttgctcagaagtcaacgggtgcttaaaatgttctcccaaactcttcatcctgctagagaggaacgatatccgacaggtcggagtctgcctgccaagttgtccccccggatacttcgatgcgcggaatcctgacatgaataaatgcatcaagtgtaagatcgaacactgcgaggcatgtttttcacataatttttgtactaaatgcaaggaaggattgtacctccataagggtaggtgttatcctgcttgtcctgaaggatcttccgccgcaaatggaaccatggagtgttcgtctcccggccagaagcgacggaagggcggtcagggcaggcgggaaaacgcaaaccgtaacctggcgcgaaaagagtccaaagaggctggagcaggttcccggcgcaggaaaggccagcagcagcagcagcagcagggaaccgtagggccactgacatccgcaggccccgcctag

SEQ ID NO: 204079 - DNA, 711 bp, synthetic construct
  misc_feature 1..711: note = Description of Artificial Sequence: Synthetic coding sequence
  source 1..711: mol_type = other DNA
atgatcttccgggtgagcgccgagggcagccaggcctgcgccaaggggtgtgagctttgttccgaggttaacggatgcctcaaatgttctcccaaactgttcatattgttagagcgcaacgatatccgccaggtaggtgtttgcctgcccagctgccctccaggttactttgatgctagaaacccagatatgaataagtgcatcaaatgtaagattgagcactgtgaggcctgtttctcgcataacttttgtaccaaatgcaaggagggactgtatctacacaagggccggtgttatcccgcatgtcctgagggatcttccgctgctaacggaaccatggaatgcagttcacccgcgcagtgcgagatgtcagaatggagcccctgggggccttgttcaaaaaagcagcagctctgtggtttccgaaggggctccgaggagcgcacaaggagggtactgcatgcccccgttggggatcacgccgcttgctctgataccaaagagacccggcggtgtactgtgcgaagagtgccctgccccgagggtcagaagagacgcaaaggcggccagggtaggagggaaaacgccaatagaaacctggctcgcaaggagtctaaagaggccggtgcggggagtcggcgaaggaagggtcaacagcagcagcaacagcagggtactgtggggcccctgacgagcgcaggaccagcctag

SEQ ID NO: 204080 - DNA, 732 bp, synthetic construct
  misc_feature 1..732: note = Description of Artificial Sequence: Synthetic coding sequence
  source 1..732: mol_type = other DNA
atgcagttccggctgttcagcttcgccctgatcatcctgaactgcatggattactcgcactgtcagggaaataggtggcgccgcagtaagcgagcctcatacgtttccaatcccatatgtaagggatgtctgtcctgttctaaagacaacggctgtagcagatgccaacagaagctgttctttttcctgagaagagaaggaatgcgtcagtacggagaatgcctgcactcttgtcctagcggctattatggccacagagccccagacatgaatcggtgcgctcgttgtagaattgagaattgcgacagctgtttctcaaaggacttctgcacgaagtgtaaggtcggtttctatctccataggggcaggtgctttgatgaatgtcccgacgggtttgcaccgcttgaggaaacaatggagtgtgtggaaggttgcgaggttggccattggagcgagtggggtacctgctctcggaacaataggacatgtggatttaaatggggattagagacccgtacccggcagatagtgaaaaaacctgtgaaggataccattttatgtccaaccattgctgagagccgtcgttgcaagatgactatgcgccactgccctggtggcaagaggacacccaaggcaaaggagaagcgcaacaagaaaaaaaaacggaaactaatagagagagcccaggagcagcattcagtgtttctggcaactgatcgcgcaaaccagtag

SEQ ID NO: 204081 - DNA, 540 bp, synthetic construct
  misc_feature 1..540: note = Description of Artificial Sequence: Synthetic coding sequence
  source 1..540: mol_type = other DNA
atgcagttccggctgttcagcttcgccctgatcatcctgaactgcatggactattcacactgtcagggaaaccgatggcgtagatcgaaacgaggttgtcgaatcgaaaattgtgattcatgctttagcaaagatttttgtactaagtgtaaagtggggttctacctgcacagagggagatgctttgatgaatgcccagatggttttgcacctttggaagagaccatggagtgcgtaggctgtgaggttgggcattggagtgagtgggggacctgctctcgaaacaatcggacgtgtgggtttaagtggggattagaaacccggacacggcagatagtaaaaaagcccgtgaaggatactatcctgtgtccaacgattgcagaatctcgacggtgcaaaatgacaatgcgccattgcccaggagggaagagaactcctaaagccaaagagaagcgaaacaagaaaaaaaaaagaaagctgatcgagagggcacaggagcagcactcagtctttcttgccactgatagggcaaaccagtag

SEQ ID NO: 204082 - DNA, 540 bp, synthetic construct
  misc_feature 1..540: note = Description of Artificial Sequence: Synthetic coding sequence
  source 1..540: mol_type = other DNA
atgcagttccggctgttcagcttcgccctgatcatcctgaactgcatggactactctcactgccagggcaaccgctggcgccgaagcaaaagaggttgccgcatcgaaaactgcgacagctgtttttcaaaagatttttgcactaagtgcaaagtgggtttctatctccatcgaggaaggtgctttgatgagtgcccagatgggttcgccccactcgaagaaactatggaatgcgtaggttgtgaagttggacactggagtgagtgggggacatgctcaaggaataaccggacatgcgggtttaaatggggactcgaaactcggaccaggcaaatcgtgaagaagcctgtgaaagataccattctgtgccccacaatcgccgaatcaaggaggtgcaaaatgactatgcggcattgtccagggggcaaacgcacccccaaggctaaggagaaacgtaataaaaaaaaaaagcgaaaactgatcgaaagagcacaagaacagcactcggtgttcctagctaccgacagagccaaccaatag

SEQ ID NO: 204083 - DNA, 531 bp, synthetic construct
  misc_feature 1..531: note = Description of Artificial Sequence: Synthetic coding sequence
  source 1..531: mol_type = other DNA
atgcggcagtacggcgagtgcctgcacagctgccccagcggctactatggacatcgtgccccagacatgaatcggtgtgccaggtgtcgcatcgaaaactgcgacagctgcttctccaaggatttttgtacaaaatgcaaagtgggcttctatcttcatcgcggaaggtgctttgacgaatgcccggacggtttcgctccgctcgaagaaactatggaatgcgtagaaggatgtgaggtgggacattggagcgagtggggtacatgttctagaaacaacagaacttgtgggttcaagtggggtctggaaacccgaaccagacaaatcgtgaagaagccggtgaaggatacaatcctgtgtccaaccatagccgaatccagaagatgtaaaatgaccatgaggcactgcccgggtggaaaacgaaccccaaaagccaaggagaaacgcaacaagaagaagaaacggaagctcattgagagagctcaggagcagcatagtgtgtttctcgccaccgacagagcaaatcagtag

SEQ ID NO: 204084 - DNA, 507 bp, synthetic construct
  misc_feature 1..507: note = Description of Artificial Sequence: Synthetic coding sequence
  source 1..507: mol_type = other DNA
atgcggcagtacggcgagtgcctgcacagctgccccagcggctactatggccatcgcgcaccagacatgaacagatgtgcaagatgccggattgagaattgtgacagctgtttttctaaggatttttgtacaaagtgtaaggtggggttctatctacatcgtggtagatgtttcgacgaatgccctgacggtttcgcccctctggaggaaacaatggaatgcgtcgagggctgtgaagtagggcattggtccgaatggggcacatgctccagaaacaacagaacttgcggatttaaatgggggcttgagaccagaactcgacagattgtcaagaagccagtaaaggacaccattctttgtcctaccattgctgagtcccggaggtgtaaaatgactatgcgacactgtcccggtgggaagcggacccccaaagccaaagaaaagcgcaacaaaaagaagaagagaaaattaatcgaacgagctcaggaacagcattccgttttttag

SEQ ID NO: 204085 - DNA, 270 bp, synthetic construct
  misc_feature 1..270: note = Description of Artificial Sequence: Synthetic coding sequence
  source 1..270: mol_type = other DNA
atgcggcagtacggcgagtgcctgcacagctgccccagcggctactatggtcatcgtgcaccggatatgaatcgttgtgccaggtgccggatcgagaattgtgatagttgctttagcaaggacttttgcacaaagtgcaaagttggattctatctgcacagagggagatgctttgacgaatgtcccgacggatttgccccattggaagaaaccatggagtgcgttgaagggtgcgaggtaggacactggtccgaatgggggacgtgctag

SEQ ID NO: 204086 - DNA, 366 bp, synthetic construct
  misc_feature 1..366: note = Description of Artificial Sequence: Synthetic coding sequence
  source 1..366: mol_type = other DNA
atgcagttccggctgttcagcttcgccctgatcatcctgaactgcatggattattctcattgtcaaggcaacaggtggagacggagtaaaagagcctcctacgtcagcaatcccatatgtaagggatgcttgtcttgcagcaaggacaatggctgctctcggtgtcagcaaaagctattctttttcttgaggcgcgagggaatgagacagtacggggagtgtctgcattcttgtccttctgggtattacggtcacagagcacctgacatgaaccgctgcgctagatgtaggattgaaaactgcgactcctgcttttcaaaagacttttgcacaaagtgtaaagtgggattctacctccataggtag

SEQ ID NO: 204087 - DNA, 234 bp, synthetic construct
  misc_feature 1..234: note = Description of Artificial Sequence: Synthetic coding sequence
  source 1..234: mol_type = other DNA
atgcagttccggctgttcagcttcgccctgatcatcctgaactgcatggactattcgcactgtcagggtaacaggtggagacggagcaaaagggcatcttacgtcagcaacccaatctgtaaggggtgcttatcttgtagcaaggataacggatgctctaggtgtcagcaaaaactgtttttcttcctgcgccgggagggcatgaggcagtatggcgaatgtctgcatagctag

SEQ ID NO: 204088 - DNA, 1410 bp, synthetic construct
  misc_feature 1..1410: note = Description of Artificial Sequence: Synthetic coding sequence
  source 1..1410: mol_type = other DNA
atggccttcctgatgcacctgctggtgtgcgtgttcggcatgggctcgtgggtcacgattaatggcctgtgggtcgagctgcccctcttggtgatggagctccccgaaggctggtacttgcccagttacctgacggtcgtaattcagctagccaacatagggccacttctagtaactctgctgcatcatttccggcctagttgcctgagtgaggtgcccatcatttttactctgctgggggttggtactgtgacttgtatcatcttcgctttcctgtggaatatgaccagttgggtcctggatgggcatcactctatcgccttcctggtcctgacatttttcctggccttggtggattgtacctctagcgttacgttcctccctttcatgtctcgactccctacctactacctgacaacatttttcgtgggggagggccttagtggcctgctgccagctcttgtggccttagcccaaggtagcgggttaacaacatgcgttaatgtaaccgaaatttctgacagcgtgcccagcccagtgcccactcgagaaacagatatcgcccagggagtacctagggccctagtgagtgcactcccaggcatggaagctcccctcagtcacttggagagccgctatttgccagcccacttctcacccttggtgttctttctgcttctctccattatgatggcgtgctgcctggtggccttttttgtgttacagcggcagccaaggtgttgggaggcctctgttgaagatctgcttaacgaccaggtgactttgcatagtattcgacccagagaggagaatgacctgggccctgcaggcacggtagacagcagccagggccagggatatctggaggagaaggccgcaccctgctgtccagctcatcttgcctttatctataccctagtggccttcgtcaacgccctgacaaacggaatgctgccaagtgtgcaaacctattcctgcctgtcatacggtccagtggcttaccacctcgccgccacactgtctatcgtcgctaatcctctggcttccctcgtgtcaatgttcctgccgaacaggtccctgctgttcctcggagttcttagtgtcctggggacctgcttcggtggctataatatggccatggccgtcatgtccccctgccccctcctgcagggccactggggcggggaggtgttgattgtggcttcgtgggtgctgttctctggctgtctgtcttacgtgaaggtcatgctcggcgtcgttcttcgggacctgtctaggtctgccctcctctggtgtggtgccgctgtgcagttgggtagcctgttgggtgctttgttaatgtttccactcgttaatgtgctgcgcttgttttcatctgctgatttttgtaatttacactgtcccgcatag

SEQ ID NO: 204089 - DNA, 519 bp, synthetic construct
  misc_feature 1..519: note = Description of Artificial Sequence: Synthetic coding sequence
  source 1..519: mol_type = other DNA
atgcgggcccccctgtgcctgctgctgctggtggcccacgccgtggacatgcttgctctgaaccgacggaaaaagcaggtgggaacaggactcggtgggaactgtacgggctgcatcatttgctctgaggaaaacggctgttccacctgccaacaaaggctcttcttgttcatccgtagggaagggattagacagtatgggaaatgcttgcatgattgccccccgggctatttcggtatccgaggtcaggaggtaaaccgttgtaagaaatgcggcgccacatgtgaatcctgtttctcacaggacttctgcatacgttgtaagaggcagttctacctctataaggggaaatgtctgcccacttgtccacccggaactctggctcatcagaacactagagagtgtcaggagagaagccctggacagaaaaaagggagaaaagatcgcagaccacggaaagaccgcaagctcgataggaggcttgacgtgcgccctagacagcctggacttcaaccatag

SEQ ID NO: 204090 - DNA, 2133 bp, synthetic construct
  misc_feature 1..2133: note = Description of Artificial Sequence: Synthetic coding sequence
  source 1..2133: mol_type = other DNA
atgcggggccggctgtgcgtgggccgggccgccgccgccgccgccgctgtcgccgtccccctcgccggggggcaggaggggagcccgggcgggggacgacgtggctcaaggggaactactatggtgaagaaaagaaagggcagggtcgtaatcgactctgatacagaggatagtggcagcgatgaaaatctggatcaagaactactgtctcttgcgaaacggaaacggtccgactccgaagagaaagagccccctgttagccagcccgctgcaagttcagattccgagacgtccgactctgacgatgagtggaccttcggttcaaataagaataagaagaagggtaaggcaagaaagatcgagaagaagggcacaatgaagaagcaggccaataaaaccgcttcctccgggtctagcgacaaagactcaagtgccgagagcagcgcccccgaggagggcgaagtgtctgattctgacagcaattcaagtagcagcagctccgacagcgattctagctctgaggatgaggagttccatgatggctacggtgaagatctgatgggagatgaagaggacagggcccggttggagcaaatgacagagaaagaacgggaacaggagcttttcaatcgaattgaaaagcgagaagtgctgaaacggagatttgagattaaaaaaaaactaaagactgcaaagaaaaaagagaagaaagagaagaagaagaagcaggaagaggaacaggagaagaaaaagctgacacagatccaggagagccaggtgacctcccataataaggaacgcaggagcaagcgagacgaaaagttagataagaagtcccaagccatggaagagctaaaagctgagcgcgagaaaaggaaaaacaggactgccgagcttctggctaagaaacagccacttaagacaagtgaggtgtactccgacgatgaggaagaagaagaagatgacaagtcgagcgagaagtccgatcggagcagccggactagctcctcagacgaagaggaagagaaagaggagatacctcccaaatctcagcctgtaagtctgcctgaagaactcaacagagtgcggctgtcaagacataagttggagcggtggtgtcacatgcccttcttcgccaagacagtcaccggttgcttcgtgcgcatcgggataggcaaccacaactccaagccagtgtatagggtagctgagatcaccggtgtcgtggaaacggcaaaagtgtatcagttgggtgggactagaaccaataaaggcctccagctgcgtcatggtaatgaccagcgggtgtttcgactggagtttgtgagcaatcaagaattcactgagagcgaatttatgaagtggaaggaggccatgttttcagccggcatgcagcttcccacccttgatgaaattaataaaaaggaattatctatcaaggaggccttaaattataagttcaacgaccaggatatagaggaaatagtgaaggagaaggaaaggttccgaaaagctccgccgaactacgcaatgaaaaagactcagctgctaaaagaaaaggcaatggctgaggacctgggagaccaggataaagccaaacagattcaggaccaattgaacgaactggaggagcgagccgaggcactggatcgccagcgaacaaagaatatttccgctatttcatatattaaccagcgcaatcgtgaatggaatatcgtagagagcgaaaaagccctcgtagcagaatctcacaacatgaaaaatcagcagatggatccttttacacggaggcagtgcaagccgacaatcgtctctaactcccgggacccagcagtgcaggctgctatcttggcacagctgaacgctaagtacggttccggcgtcctccctgacgcacccaaagagatgtcaaaaggacaggggaaagataaggacctgaactctaaaagcgcttcagatctgagtgaggatttgttcaaagtgcacgacttcgatgtcaagatcgatctccaggtgcccagcagtgagtccaaggctctagcgattacatctaaggccccaccagcaaaggatggtgctcctcgtaggtcattgaatctcgaggactacaagaaacggcgggggctcatttag

SEQ ID NO: 204091 - DNA, 4551 bp, synthetic construct
  misc_feature 1..4551: note = Description of Artificial Sequence: Synthetic coding sequence
  source 1..4551: mol_type = other DNA
atggacagcccccccaagctgaccggcgagaccctgatcgtgcaccatattccgctggttcactgccaagtacccgatcgacaatgttgtggcggtgccggaggcggaggcggtagcacgcgacctaatcctttttgtcctcccgagctggggattacccaacccgatcaagacctgggccaggccgacagcctgctattttccagtctgcattccaccccggggggcacagcccgcagcatcgattctactaagagtcgctcccgagatggcagagggcccggggccccaaagcgacataatccctttcttctgcaggagggagtgggcgaaccgggactcggagatctgtatgatgacagcattggagactctgccactcagcaaagttttcacttgcatgggacgggccaacccaacttccacctgagctcctttcaacttccgcctagcggccccagggtagggcggccctggggtactaccaggagccgggccggtgttgttgagggacaggagcaggagccagtgatgaccctcgacacccagcaatgcgggacaagtcattgctgtaggcccgagttggaggccgaaacaatggagctggatgagtgcggaggtccaggcggtagtggttccggcggcggagcctccgatacgagcgggttttcctttgatcaggagtggaagctgtcttctgatgaaagccctagaaatccagggtgttccgggtcaggtgatcaacactgtcgatgttcaagcacctcgtcccagtcagaagccgctgatcaatcaatggggtacgtgagcgattcatcctgcaactcttccgacggagtgctggtgacttttagtacgctttacaacaagatgcatggtacccccagagcaaacttaaactccgccccccaaagttgttccgattctagtttctgcagccactccgatcctggagccttttacttggacctgcagcctagcccctttgaaagcaagatgtcctacgagtcccaccacccagaatccggcgggcgcgaaggcgggtacggttgccctcatgcgtctagcccagagctggacgcaaattgtaactcctatcgcccgcattgtgagccctgtcctgctgtggctgacctaacagcctgttttcaaagtcaggcacgcctcgtggtcgctacccaaaattattataagttggtgacatgtgatctgagttcccagtcctccccaagccctgcaggatccagcatcactagctgctctgaagaacataccaagattagccctccccctggtcctggccccgatcccggcccatcacagccgagcgagtattacctcttccagaagccggaggtgcagccagaagagcaggaggctgtaagtagctctacccaagctgctgccgctgtgggccccaccgttttagagggccaggtgtacacgaacaccagtccccccaacctgtcgacaggccgccagagatccagatcctacgatcggtccctacaaaggtcccctcctgtgcgattaggaagcctcgagcgcatgttgtcctgcccggtgaggctaagcgagggaccggcagctatggcgggaccgggctcccccccccggcgagtgacaagctttgctgagcttgccaaagggcgcaaaaagaccgggggtagcgggtctccaccactgagagtgtccgtcggggacagctcccaggaatttagcccaatccaggaagcacagcaggaccgtggtgccccactggacgaagggacttgttgcagccattcgttgccaccgatgcctctgggacccggaatggacctgctgggacccgatccttcccctccttggtcaactcaggtgtgtcagggcccccacagttcagagatgcccccggcaggcttgcgagccacgggacagggccctctggcccagctgatggaccccggccctgctctgccggggagtccagccaactcccacactcaaagggacgcccgcgccagagcggatggaggcggtacagagtctagacccgtcctcagatactctaaagagcagcgccccacaacccttccgattcagcccttcgttttccaacatcacttccctaaacagttggctaaagcaagggccctgcattcacttagccagttatactctctgtcaggctgtagcaggactcaacagcctgccccacttgctgcaccagctgctcaggtgtctgtgccggccccttcaggtgagccacaggctagcacgccccgcgcaacgggtcggggcgcacgaaaggctggatcagagccggaaacctcacgtcccagtcccctgggctcctatagccccatcaggtcagtgggcccctttgggccctcaactgactctagcgcttctaccagctgcagtcccccccctgaacagcctactgctaccgagtctctacccccttggtcacactcctgccccagcgccgtccgccccgctacaagtcaacaaccccagaaggaagatcagaagatcttgacattgacagagtatcggctgcatggcactggctcactgcctcctctggggagttggcgatctggactgtctagagcagagtctctagcgagggggggtggagaaggtagcatggctacaagaccttccaatgctaatcatctgtctccccaggccctcaaatggcgcgaataccgcaggaaaaatcccttaggacctccggggctgagcggatcactcgatcgacgctctcaggaggcgagattagcgagaaggaatcccattttcgaattccctggatcactgtcagcggcgagtcatctgaattgccgattgaacggccaggccgtaaagcctctaccgttgacctgccccgatttccaggatccctttagcctgaccgaaaaacctccggctgaattctgtctttcccctgacggcagctcggaagctatctccattgatctccttcaaaagaagggtttagttaaagcagtcaacatcgccgtggacctaatcgtagcacatttcggcaccagcagggacccaggcgttaaagccaaactcggtaattcctctgtcagccctaatgtgggccatctggtgcttaagtacctgtgtcctgccgtgagggcagtcctggaggacgggcttaaagcctttgtgcttgatgtcattatcggacaacgaaagaatatgccgtggtccgtggtggaggcatctacacaactgggcccgagcaccaaggtcctgcatgggctgtataataaagtgagccaattccctgaattaacttctcacactatgaggtttaatgcattcattcttgggctgctgaatatcaggtccctggaattctggtttaatcacctgtataatcacgaagacataatccagacccactaccagccatgggggttcctgtcagctgcacacactgtatgtcctggcttattcgaggagctgctcctgctcctgcagcccctggcccttttgcccttttctctcgatctgcttttccagcatagactgctgcaaagtgggcaacagcagagacagcataaagagctactgcgagtgtcgcaggacctgctactttcagcccacagcacactgcaactggctcgcgcgcgaggccaggagggccctggggatgtggacagagccgcacagggggaacgcgttaagggggtaggtgcctctgagggaggagaagaggaagaggaggaggaagaaacagaggaggtggccgaggccgcaggaggatcaggaagagcccggtgggccagggggggccaagctggctggtggtaccagttgatgcagagcagccaagtatacattgatggaagcatagagggttctaggtttccacggggatcctctaacagcagctccgagaagaagaagggcgcgggcggaggcggaccaccccaagcccctcctccccgtgaaggagtcgtcgagggggccgaagcttgtcctgcatccgaggaggcgttaggccgggaacgggggtggccattctggatgggatctccacctgatagtgttcttgccgaactgcggagatcaagggaaagagaaggccccgccgcctctccagccgagaatgaggaaggtgcttcggaacccagtcctggagggattaagtggggacacttgtttggtagcagaaaggcacagagagaggcacggccgaccaatagactgccttctgactggctgagcctggacaagtccatgtttcagctggtggcgcaaacggtggggtctcgccgggaaccagaacccaaggaaagtttgcaggagccacacagcccggcgctcccctcaagccccccttgcgaagtacaggctctctgccatcatctggctacaggacctggacagctctcctttcacaagggcgatatccttcgcgtccttggccgtgctggcggtgattggctaagatgctcaaggggacccgacagcggacttgtccctctcgcctacgtgaccctgacccctaccccctctccaactcctggctcctctcaaaattag

SEQ ID NO: 204092 - DNA, 4551 bp, synthetic construct
  misc_feature 1..4551: note = Description of Artificial Sequence: Synthetic coding sequence
  source 1..4551: mol_type = other DNA
atggacagcccccccaagctgaccggcgagaccctgatcgtgcaccacattccattggtccattgtcaggttcctgaccgccagtgttgcggcggggcgggtggcggaggcgggtccacgagacctaatccattttgtccaccagagcttggcataacacagcctgaccaggatctggggcaggcagattcactgttattctcgagcctgcacagtacacccggaggaactgcccgaagtatcgatagtaccaagagccgcagtcgtgacggcagaggccctggcgcccccaagcggcacaacccatttttgcttcaggaaggggtaggcgagccggggctaggagacctctatgacgacagcattggtgatagcgccacgcagcaatctttccatttgcatggcacagggcagcctaacttccatctctccagtttccagcttccaccttccggccctcgagttggaagaccctgggggactacaagatcacgggcgggcgtcgtggagggccaggagcaggaacctgtgatgactctagacactcaacagtgcggcacaagccattgctgccgtcctgaactcgaggcagaaacaatggagctcgacgagtgcggcggccctggtgggagcggatctggcgggggggcgagcgacacgagcgggttttccttcgaccaggagtggaaactcagcagcgacgagtcacctagaaacccaggctgctctggctccggtgatcagcactgtcgatgtagttccacttcgagtcagagcgaggcagccgatcagagtatgggatatgtgtctgattccagctgtaattcatctgatggcgttctggttaccttttctaccctgtacaacaaaatgcacggaacacctagagccaatctaaattctgccccgcagtcctgcagcgatagctcattctgttcacactcagatcccggcgcattctatctcgatcttcagccctctcccttcgagtctaaaatgagttatgagagccaccaccccgaaagcggaggccgagaaggtggatacgggtgtcctcacgcctcatcaccagaattagacgccaactgtaattcataccgtcctcattgcgaaccatgtcctgcagtggctgatctgacagcgtgcttccaatcccaggcgcgactcgtcgttgccacacagaactattataagctggttacatgcgacctgagctcacagtcttcaccttcccccgctggatcctcaatcacatcttgcagtgaggagcataccaagatttctcccccaccgggaccagggccagacccaggtccatcccagccatccgagtactatttatttcagaaacctgaggtgcagcccgaggaacaggaggcagtttcctcctccacccaagcggccgcagctgtcgggccaaccgtattggaaggacaagtttatacaaacacctcccccccaaacttaagtacgggccgccagaggtcccgctcctacgatcggagccttcaacggagcccaccagtgcggttaggctccctggagaggatgctgtcgtgtcctgtgaggctgagcgagggtccagctgctatggccggtcctggttccccacctaggagagttacttccttcgctgagctcgcaaagggccgaaagaagaccggtggatcaggtagtccaccattgcgggttagcgtgggggactcttcgcaagagtttagcccaatacaagaggcccaacaggatcggggcgccccgctcgacgaaggtacatgttgtagccattcactgccgccaatgcctctgggtcctggcatggatctcctgggaccagacccctcgcccccatggagcacacaggtatgtcagggccctcactccagcgaaatgccccccgctggcttgcgtgccaccggccaggggcccctggcgcaattgatggatccggggccagcactgcccggctctccagccaactcacatactcagcgggatgcgagagcgcgagcagatggtggcggtacagagagtagaccagtgctgcgatactccaaagagcagagacccactactctgcctatccagccgtttgtgtttcagcaccacttcccaaagcaactggcgaaagcacgggccctgcactccttatctcaattgtacagcctatccggctgctcaaggacacagcaaccagcaccccttgctgcacccgccgcacaagtgagcgttccggccccttccggggagccccaggcgtccacaccaagagccactggccgcggggcgagaaaagcaggctctgaaccagagacatccaggccatctcccctaggatcatactcccccataagatcggtgggaccattcggcccctcgaccgactctagcgcttctacctcttgttccccccctcccgagcagcccacggctactgaatccctccccccatggagccatagttgtccaagcgccgtgcgtcccgctactagccagcaacctcagaaggaggatcaaaaaattttaaccctgacagagtataggctccatggtaccggcagcctgccacctctagggtcttggaggtccggtcttagcagagccgaaagtctggccagaggaggcggggaaggctccatggcaactcggccgtctaacgcgaaccacctgtctcctcaggcactcaaatggcgggaatatcggaggaaaaacccattaggtccccccgggctgtccggatctctcgaccggcggtctcaggaggctcgactagccagacggaaccctatctttgaattccccggtagcctgagcgcagcttcccatcttaactgtaggctgaacggtcaggccgtaaaaccactgccgttgacctgtccggacttccaagacccttttagtctaacagagaagccacctgcggaattttgtctctccccagatgggtcgagcgaggccattagcattgacctcctacagaaaaaaggcctggttaaggcagtgaacatcgctgttgacctgatcgtggcccattttggcacctcacgcgatcctggggtcaaagcaaagctgggtaattcttctgtgagtccaaatgtgggacacttagttctgaaatacttgtgtcctgccgtgagagcagttcttgaggatggattaaaggcattcgtgttggatgttataatagggcagcgcaaaaacatgccttggtctgttgtggaagcctcaacccagctcggcccttctacaaaggttctccatgggctctataacaaggtgtctcagttccccgaacttacctcccatacaatgcggtttaacgcatttattctgggcttgctgaatattcgctcactggagttctggttcaaccatttgtacaatcatgaagatattatccagactcattatcagccctggggtttccttagcgctgcccacacagtgtgtcccggtctgttcgaggaactcttactactgctccagccactggcgttattgcccttttcattagatctactgtttcagcacaggttattgcagtctggtcagcagcagcggcagcataaagagctgttgagggtgtcgcaggatctccttttgtcggcccatagcaccctacagctcgccagagcccggggccaggaaggtccgggcgacgtcgatcgcgccgctcagggggagcgtgtaaagggggtcggcgctagcgaaggcggtgaggaggaggaggaagaggaggaaactgaggaggttgccgaagcagcagggggctcaggaagggcccgctgggccaggggcggtcaggccggttggtggtaccagttaatgcaatctagccaggtttacattgatggcagcatcgaaggttcacgatttccaagaggaagcagcaactctagctctgaaaagaaaaaaggagccggaggcggcggtccccctcaggcccccccacccagggaaggcgttgtggagggagccgaagcgtgccctgcaagcgaggaggcccttgggcgggaacgtggatggcctttttggatgggtagccccccagattctgttctggctgagctacggaggtcgcgagaaagggagggcccagccgcgagcccagccgagaacgaggagggcgccagcgagccctcacctggaggaattaaatgggggcatcttttcggatcacggaaggcgcagcgcgaagcacgacctaccaataggttacccagcgactggttgagtctggataaatcaatgtttcagctggtcgcccagacagtaggcagccggcgcgagccagaacccaaagagagcctccaggagccccactcccctgctctccccagtagtcctccttgtgaggtacaggccctgtgccaccatttggccaccggcccagggcagctgagtttccacaaaggcgatatcctgcgggtcctcggccgggccgggggagattggctccgttgtagtcggggcccagactcagggctcgttcctttggcatatgtgaccctcaccccaacccctagccctacgccaggtagctcccagaactag

SEQ ID NO: 204093 - DNA, 2775 bp, synthetic construct
  misc_feature 1..2775: note = Description of Artificial Sequence: Synthetic coding sequence
  source 1..2775: mol_type = other DNA
atggacagcccccccaagctgaccggcgagaccctgatcgtgcaccatatccccctggttcactgccaggtccccgatcggcaatgctgtggtggtgccggaggtggcggcggtagcaccagacccaaccccttctgccccccggagctggggataacccagcccgatcaggatcttggccaggcagatagcctgctattctcaagcctgcattcaacccctggagggactgctagatcaattgatagtaccaaatccaggagccgcgacgggaggggcccgggtgctccaaagcgccataaccccttccttttgcaagagggagtaggcgagcccggacttggtgacctctacgatgacagcatcggggactctgcgacccagcagtccttccacctccatggcactggccagccaaatttccatctgagcagtttccagctacctccgagcgggcctagagttggtcgaccatggggtaccacaagatcgcgcgccggcgttgtggaagggcaggaacaggagccggtgatgactttggacactcagcagtgcggcacctcacactgctgtagacctgagctggaagctgagacgatggagcttgatgaatgtgggggccctggcggtagcgggtctggcggtggagcgtctgacacttctggcttttcattcgaccaagaatggaaattaagctctgacgaatctccacgcaacccaggatgttctgggtctggtgatcagcactgtagatgttcatccacttcgagccaatctgaagctgctgaccagtccatgggttatgtgtctgatagttcttgtaactctagtgacggcgtcctggttacatttagcacactgtacaataaaatgcacggaacaccaagagcaaatctcaattcagccccacagtcttgttcagattctagtttctgcagccacagcgacccaggcgctttctatctggatttgcagcccagtccgttcgagtctaaaatgagttacgagagtcatcacccggagtctgggggtcgtgagggaggttacggctgcccacacgcttcttcacccgaactggacgccaattgtaattcctaccgcccacattgcgagccatgcccagctgtggcggatctgactgcttgctttcagagccaagcaagactggtcgtggcgacccaaaattactacaagcttgtcacctgcgacctgtccagccaaagtagcccaagtccggccggcagctccataacctcatgctcagaggagcacacaaaaatatctcccccccccggacccgggcccgaccctggccctagtcagcccagtgagtattatctcttccagaagcctgaggtgcagccggaggaacaggaggcagtgtcgtccagcacacaagccgccgccgcggtaggcccaacagtgcttgagggccaggtatatacgaacacctcgccgccaaatttgtccacaggtcgacaacgctctcggtcttacgaccgctctttacaacggtcaccgcctgtacgactgggctcccttgagcgaatgctgagctgtcctgtgcggttaagcgagggaccagccgccatggctggccccggatcccccccgcgtcgcgtaaccagcttcgccgagctggctaaagggcgaaagaagacgggaggctctggaagccctccacttcgcgtttcagtcggagatagctcccaggagttttcccctatacaggaggcccagcaggatcgtggagcgcccctagatgagggcacttgttgtagtcatagtttacctccgatgcccctggggcctggaatggatctgttgggtcccgaccctagccccccgtggagcacacaggtgtgccaaggcccccattctagcgagatgccaccagcaggcctgcgcgcaactgggcaaggaccactagcccaactcatggatcctggccctgccctgcctgggagtccagccaattcccacactcagcgtgatgcccgggcccgagcggatgggggcgggactgagagtcgacctgtgctcagatattcaaaagaacaacgccctacaaccctccccatccaacccttcgtgttccagcatcactttcctaagcaattggccaaggcccgcgccttacacagcctttctcagttgtacagtctgtcaggctgttcacggactcagcaacctgcacctttagccgctccagccgcccaggtgtccgtccccgctccctccggcgaacctcaggcatctacacctagagctacggggcggggggcccggaaggcagggagcgaaccagagacgtcacgcccgagtcctttagggtcttatagcccgattcggagtgtgggtcctttcggaccgtctaccgattcaagtgcgagcacttcctgtagtcctccccccgagcagcccaccgcgactgaatctctccccccttggagtcactcctgcccctccgccgtgagaccagcgacctctcagcagcctcagaaggaggatcagaagattttgacgctgacagagtaccgactccatggtacaggtagcctccctcccctaggatcatggcgttccgggctgtcaagggccgaatcgttggcccgcgggggaggagagggaagtatggctacccgaccgtccaatgctaatcatctgtcaccgcaagccctgaagtggcgcgagtacagaagaaagaaccccttgggtccccccgggcttagcgggtctctcgatcgtaggagtcaggaagcaaggacagggtag

SEQ ID NO: 204094 - DNA, 591 bp, synthetic construct
  misc_feature 1..591: note = Description of Artificial Sequence: Synthetic coding sequence
  source 1..591: mol_type = other DNA
atgagcatgctgcggctgcagaagcggctggccagcagcgtgctgagatgcggcaaaaagaaggtgtggctggatccgaatgagactaacgagattgccaacgcgaatagccggcagcagatccgtaaactgatcaaggacggcctgattatcagaaagcccgtgaccgttcacagccgggcccgctgtcgcaaaaacacactcgcacgccgcaagggccgtcatatgggtattggaaagaggaaaggaaccgcaaatgcccgcatgccagaaaaggtgacctggatgcgcagaatgcggatacttaggcgtctcttacggaggtacagggagtcaaaaaaaattgaccggcatatgtaccactccctgtatctcaaggtgaaggggaacgtttttaaaaacaaaaggatccttatggaacatatccataagctcaaggcagacaaggcacgtaagaaactgttggccgaccaggctgaggccaggcggtcaaagactaaagaggcgcggaagaggagggaggagagactccaggcaaagaaagaggaaataatcaaaacactcagcaaggaagaggagacaaaaaaatag

SEQ ID NO: 204095 - DNA, 1341 bp, synthetic construct
  misc_feature 1..1341: note = Description of Artificial Sequence: Synthetic coding sequence
  source 1..1341: mol_type = other DNA
atggaggccagcttcgtgcagaccaccatggccctgggcctgagcagcaagaaagcttcaagtaggaacgtcgccgtggaacgcaaaaacctaattacggtctgtcgcttttccgttaaaactttactggagaagtacaccgccgagccaatagacgacagcagtgaggaattcgtgaatttcgctgccatcctcgaacagattttaagccatcggttcaaggcatgtgcccctgccggccccgtgagttggttttcttcggatggtcaaagaggattttgggactatattcgtctggcctgctcaaaggtgccaaacaattgcgtatcctcaattgagaacatggagaatattagtacagctcgtgcaaaaggcagggcgtggatacgagtagctttgatggaaaaaaggatgtccgagtatatcaccacggccttgcgggatacccgcactacccgcagattttatgattccggcgccatcatgctgcgtgatgaagcaactattctgaccggtatgcttattggcctgagcgccatagacttctcattttgcttaaaaggtgaggtactggatgggaaaacgcccgttgtgatcgattataccccctacctcaagttcacacagtcgtacgattacctaacagacgaagaggaacggcattcagctgagtccagcacaagtgaggacaattctccagagcatccctacttgcccctggttaccgatgaagattcgtggtattccaagtggcataagatggaacagaagtttcgtattgtgtacgcccagaaggggtacttagaggaactggtacgtctgcgtgagagccagttgaaggatttggaagccgagaatcgtcgcctccaactgcagctggaagaggcagcggcacaaaatcagagagagaagagggagctggagggcgtaattctagagctgcaagaacagctgaccggactcatcccttcagaccacgcccccttagcccaaggtagtaaagaactcacaacaccgttggttaatcagtggcccagcttgggaaccctgaatggcgcggagggggcttcaaattctaaactctaccgcagacacagcttcatgtccaccgagcccctcagcgcggaagcatctttaagttccgactctcagcgcctaggggaaggcacccgagacgaagagccttggggcccaatcggtaaagaccccacccctagtatgcttggcttatgtgggagtctcgctagcataccatcttgcaaatccctggcttcttttaaatccaacgagtgtttggtctccgactccccagagggtagcccagctctttctcccagctag

SEQ ID NO: 204096 - DNA, 1371 bp, synthetic construct
  misc_feature 1..1371: note = Description of Artificial Sequence: Synthetic coding sequence
  source 1..1371: mol_type = other DNA
atgaagatcgaggaggtgaagagcaccaccaagacccagcggatcgcttcccatagccacgttaagggcttaggcttggacgagtctggactggccaagcaggcagcatcaggactcgtagggcaggagaatgcccgggaggcttgtggggtcattgtggaattaatcaagagtaaaaagatggccggccgtgccgtgttgctcgccgggcctcctggcaccggaaagacagcccttgccctagcaattgcccaagagctgggcagtaaagttcctttctgccccatggtgggctctgaggtgtacagcaccgaaatcaagaagactgaggtgcttatggagaacttccggcgagccataggcctcaggatcaaggagactaaagaagtctatgaaggggaagtcaccgaactgacaccctgtgaaaccgagaatcctatgggcggttatggcaaaacaatttcccatgtcataatcggcttgaagacagctaagggcacgaaacagctcaagttagatcccagtattttcgagtcgctgcagaaagaaagggtagaagccggcgacgtaatttacatagaggccaactccggcgcagtcaaacgtcaaggccggtgcgacacgtacgccacagagttcgatctggaggctgaggaatacgtgccattacccaagggagatgttcacaaaaaaaaggagatcatccaggacgtgactttgcatgatctggacgtggccaacgccagaccacaggggggtcaagacatcctgtctatgatggggcaactgatgaaacctaagaagaccgaaatcacagacaaactgcgcggggagatcaataaagtcgtcaataaatacattgaccaaggtatcgctgaacttgtgcccggagtgctgttcgtcgatgaagttcacatgttagacatcgagtgtttcacttacctgcaccgcgccctagaatcctcaattgcgccgatagtcattttcgcatccaatcgtggcaattgcgttattcgcggcacggaggacatcacttctccacacggtatacccttagacctgctcgatagggtcatgatcattaggacaatgctgtacaccccacaggagatgaaacagataattaagatcagagcacagaccgagggtattaacatctctgaagaagctctgaatcacttgggcgagattgggaccaaaacaaccttgcgttacagtgtgcagctgctcacgcctgcgaatcttttagctaagataaatggaaaagattctatcgagaaggagcatgtagaggagatttctgaattgttctatgacgcaaaatcctctgcaaaaattttagctgatcagcaggataagtacatgaaatag

SEQ ID NO: 204097 - DNA, 1161 bp, synthetic construct
  misc_feature 1..1161: note = Description of Artificial Sequence: Synthetic coding sequence
  source 1..1161: mol_type = other DNA
atgaagatcgaggaggtgaagagcaccaccaagacccagcggatcgcttcccactcacacgttaaggggctcggcctagacgaatcaggtctcgccaaacaagcagcatctggactggtcgggcaagaaaacgcaagggaggcttgcggcgtcattgttgagctgattaagagcaaaaagatggcaggcagggcagtccttcttgctggaccaccaggaacaggcaagaccgccctcgccctagctatagctcaagagctgggcagcaaggtcccattctgtccgatggtgggttccgaggtctactccacagaaatcaaaaagaccgaggttctcatggagaatttccgaagggcaatcggtctccggatcaaggaaaccaaggaggtgtacgagggcgaggtgactgagttaaccccctgcgagacagagaacccaatgggcggatacggcaagacaatcagccacgtgatcattgggctgaagaccgctaagggcacaaaacagctaaagcttgacccttcaattttcgagtcccttcagaaggagcgagttgaggcgggcgatgtgatttacatcgaggccaactcaggagctgtcaaaaggcaggggcgctgcgatacctacgctaccgagttcgacctcgaagccgaggagtacgtacccctcccgaagggcgacgtgcacaaaaaaaaagaaatcattcaggacgtgacactgcacgatctggacgtggcaaacgctcgccctcagggggggcaggacatcctctccatgatggggcaattgatgaagcctaagaagacggagatcacggataagctacggggcgagatcaataaggtggtaaataaatacattgatcagggtatagccgaattggtccctggggtactgttcgtcgacgaggtgcatatgctggacatcgagtgctttacatatctgcaccgggccctggagtccagcatcgcccctattgttatcttcgcatcaaataggggtaactgtgtaatacgtgggaccgaagatataaccagtccacatggaatccccctggacttactggacagagttatgatcattagaacaatgctgtatactcctcaggagatgaaacaggtgctcagcgccgctgccgatccaggccagctcgcctgttag

SEQ ID NO: 204098 - DNA, 2502 bp, synthetic construct
  misc_feature 1..2502: note = Description of Artificial Sequence: Synthetic coding sequence
  source 1..2502: mol_type = other DNA
atggacgtggtggaccccgacatcttcaaccgggacccccgggaccactacgacctgcttcagagacttgggggcggaacttacggagaagtcttcaaggcccgcgacaaggtctctggcgacctagtggccctgaaaatggtgaaaatggaacccgacgatgatgtgagtactttacagaaagaaatcctgattttaaagacctgcagacatgcaaatatagtagcgtatcacggatcttatctgtggttacagaaactatggatatgtatggagttctgtggagccggatctctgcaggacatttaccaggtgaccggcagcctgtccgagcttcagatcagctacgtctgccgggaggtgttgcagggtctagcttacctacattcccaaaagaagatccatcgcgatattaaaggggccaacatactgatcaatgatgcaggagaggttcggctggcggattttgggatttctgcgcagattggcgccacactggccagaaggctctctttcatagggacgccatactggatggcaccagaagtggcggcggttgctctcaaggggggttataacgaactctgcgacatttggagtctgggtataacggccattgagttggcagaactccagccaccgctgtttgatgtccaccctcttagggttcttttcctgatgacaaagagtggctaccagccaccgcgactgaaggaaaagggtaagtggagtgcagccttccataactttatcaaggtcacgctgactaagtctccgaaaaagagacccagtgcgactaaaatgttgagtcatcaacttgtgagccagccaggtctgaacagagggcttattctggacctccttgacaaacttaaaaatcccgggaaaggccccagcatcggagatattgaggacgaggagccagagctccctcctgctattccaagacgaatccgatccacccaccgctcctcgagccttggtattccagacgctgactgctgcaggagacatatggagtttagaaagctgcgcggcatggagacaagaccccctgcgaacactgccaggctacagccccctagagatcttaggagctcaagccccaggaaacagctgtccgagtcatcagacgacgactatgacgatgtagatataccaacaccggcagaggatacacctccacccctaccccctaaaccaaagttcagatcacccagcgatgagggcccaggttccatgggggacgacggacaactgtcccccggcgtgctggtgaggtgcgccagcggacccccccccaattctccaagacccgggcctcctccgtccacctcaagcccccatctcaccgcccactctgagcctagcttatggaatcccccatcccgcgagctggataagccgccgttgctcccacccaagaaagaaaagatgaagaggaagggatgcgccctattggtgaaactctttaacggttgtccccttcgcattcacagcacagctgcctggactcatccctcgaccaaagaccaacatttgctgttgggagccgaggaaggaatatttatcctgaatcggaatgaccaggaagctacactggagatgcttttcccatccagaaccacctgggtgtactcaattaacaacgtgctgatgagtctgagcggcaagacccctcatctgtactctcactctattctggggctgctcgagagaaaggagactcgcgcgggcaatcctattgcgcacatctcacctcataggctactggcacgtaaaaatatggtgtccactaagatccaggatacaaaaggatgtagagcatgctgcgtggcagagggggcgtcttccggaggaccgttcctgtgtggggcactagaaacatcagtggtactgctgcaatggtaccagcctatgaacaagttccttttagtgagacaggtgttgttcccgctgcccacccccctgtctgtctttgcgttactgacgggcccaggctctgaacttcccgctgtttgcattggtgttagtcccggacgacctggcaagagcgtcctattccatactgtgagattcggtgctctgtcatgctggcttggggaaatgagcaccgaacatagaggtccggttcaggtgacccaggtggaggaagatatggtcatggtgctcatggatggcagcgtcaaactggtcacacctgagggctcgcccgtgcgggggctgaggactccagaaattccaatgaccgaggccgtcgaggccgtggctatggttgggggacaacttcaggcattctggaagcacggcgttcaggtttgggcgctgggatcagatcaactgttacaggagctaagagacccaacactaacctttcgcctgctcggcagcccgcgcctcgagtgctcgggaacaatcagtccccactgcaatctgctgctgcctggcagttctaattctccggcgtcagcctctcgagttgctggtattacgggcctatag

SEQ ID NO: 204099 - DNA, 1257 bp, synthetic construct
  misc_feature 1..1257: note = Description of Artificial Sequence: Synthetic coding sequence
  source 1..1257: mol_type = other DNA
atggtgggccagctggccgcccggcgggccgccggcgtggtgctggagatgatcagggagggaaaaatagccggaagagccgtgcttatagcgggacagccgggaactggaaaaaccgctatcgctatgggtatggcccaggccctggggcccgacaccccttttacagctattgccggaagcgagatcttttcactggaaatgtccaagacggaggccctgactcaggcatttcgcaggtctataggcgtcaggattaaagaagaaacagagattatcgaaggggaggtggtggaaattcagattgacagacctgcaaccggcacggggtccaaagtcggtaagttgacactgaaaacaactgagatggaaactatttacgatctaggaacaaaaatgatcgagagtctgaccaaggataaggtgcaggcaggagacgtgatcaccatcgataaagctaccggtaaaatatcgaaactagggcggagcttcactcgtgcgcgggactatgacgccatgggctctcaaacgaaatttgtccagtgccccgatggcgaactccaaaagaggaaagaggtcgtgcacactgtttccttgcacgagatcgatgtgatcaactcaaggacgcagggcttcctcgcgttattcagcggtgacaccggcgagattaaaagtgaggttagagagcagatcaacgcaaaggtagcagagtggcgggaggaaggaaaagcagaaatcattcccggcgttctcttcatcgacgaagttcacatgcttgatatcgagtcctttagtttccttaatcgtgccctggaatcagacatggcaccggtgctcataatggcaacgaacagaggcatcacacgcatcaggggcactagttatcagagtccccatggcattccgatcgacctgctggaccggcttctgatagtgagtaccactccttattctgagaaggacacgaaacaaattctgagaatccgctgtgaagaggaagacgtggaaatgagtgaggacgcttacactgtgttgacaagaatagggttggagactagtctccgctatgcaattcagttgatcacagcagcctctctggtgtgtcgaaagaggaaagggacagaggtccaggtcgatgacattaagcgagtctactcacttttcctggacgaatcccgctcgacacaatacatgaaggagtaccaggatgcattcctgtttaatgaactcaaaggagaaaccatggatacctcctag

SEQ ID NO: 204100 - DNA, 1392 bp, synthetic construct
  misc_feature 1..1392: note = Description of Artificial Sequence: Synthetic coding sequence
  source 1..1392: mol_type = other DNA
atggccaccgtgaccgccaccaccaaggtgcccgagatccgggacgtcactcgcatcgagaggatcggcgcccatagtcacatcagaggtttgggtctggacgatgccctggagccccggcaagcgagtcaggggatggttgggcagctagcggcccggcgcgccgctggggtcgtcctggaaatgatccgagagggaaagatagctggccgtgcagttttgatcgctggccagcccgggaccggcaaaaccgccattgctatgggtatggcccaggccttggggcctgacacgcctttcactgctatagcagggagcgaaatttttagtttggagatgagcaaaaccgaggcattgacccaggcctttaggaggtcgatcggggttcggattaaagaggaaactgaaataatcgagggcgaggtggtcgaaatccagatcgatcgacccgccaccgggaccgggagcaaagttgggaagttgacccttaaaactaccgagatggagacaatttatgatcttgggaccaaaatgattgagtctctaaccaaggataaggtgcaggcaggtgatgtcatcactatcgacaaggcgactggaaagatctcaaagttaggaaggagcttcacacgcgcacgagactatgacgccatgggatcccagacaaagtttgttcaatgccccgacggcgagctgcagaaaagaaaggaggttgttcatacggtaagtctccatgagatagacgtgattaacagccgcacacagggattcttggccctgttttccggggacactggtgaaatcaaatctgaagtcagagagcaaatcaacgctaaggtggccgagtggcgggaggagggcaaggccgaaataattccaggggtgctgtttatcgatgaggtccatatgttggacatcgagagcttttccttcctcaatagggcactggaaagtgatatggctccagtgctcatcatggccactaaccggggaataactagaatccggggcacctcctatcaaagtcctcacggtataccaatcgatctcttggacaggctgctgatagtctcgacgacaccatacagcgagaaagacacaaaacagatcctcaggatccgctgtgaggaggaagatgttgagatgagcgaagacgcctatactgtgttgacaagaattgggctagaaacgtcgctgcggtatgccatacagttgatcacagcagcgtcactagtctgccggaagcgaaagggtacagaagtgcaggtcgatgatataaagcgcgtatacagcctgtttctggacgagagcagaagcacccagtatatgaaggagtaccaggatgctttcttgttcaatgaactcaagggcgagaccatggacaccagctag

SEQ ID NO: 204101 - DNA, 15102 bp, synthetic construct
  misc_feature 1..15102: note = Description of Artificial Sequence: Synthetic coding sequence
  source 1..15102: mol_type = other DNA
atgggcgacgccgagggcgaggacgaggtgcagttcctgcggaccgacgatgaggtggtgctccaatgttccgctactgttttaaaagagcagctgaaactgtgtttggcagctgaaggcttcggtaatagactgtgtttcttggagcctacaagtaacgctcagaatgttcctcccgatttggcaatatgttgcttcgtgctggaacagtctctcagtgttagggcactacaggagatgctagctaacacggtggaggcaggcgtcgagagcagccagggtgggggacatcgtacgttactgtatggacacgctatcctgctgagacacgcccatagcagaatgtacttgagttgtctgacgacatcccgcagtatgactgataagctcgcttttgacgtgggtcttcaggaggacgctaccggtgaagcctgttggtggacaatgcaccctgccagtaagcagcgcagcgagggggagaaggtccgtgtgggcgatgacataatcctcgttagtgtgtcctcagagcggtacctgcatctcagtaccgcaagcggtgagttacaagtcgatgcaagctttatgcaaactctttggaacatgaatccaatttgttcacggtgtgaggagggtttcgtgactggggggcatgtgctgagactcttccatggacatatggatgaatgtctgactatctctccagcagattctgatgaccagcgacgcctggtttattacgagggaggcgccgtgtgtacccacgcccgaagcctgtggcggctggagcctctgcgcatctcttggtcaggaagtcatcttagatggggccagcctctcagggttcggcacgtgacaacgggccaatatcttgcacttacagaggatcagggtctggtggtggtcgacgcttctaaggctcataccaaagccacaagcttttgcttccggattagcaaggagaaactcgatgtggcccccaaaagagacgtcgagggaatgggacctcccgaaatcaagtacggagagtcactgtgtttcgtccaacacgtggcttctggtctctggctcacctatgctgcaccagaccccaaagccctgcgcctgggggtgcttaagaaaaaagcaatgctccaccaggagggccacatggacgacgctttatcattgacaaggtgccagcaggaggagagccaggccgctcggatgatccatagcaccaatgggctgtacaaccagtttattaaatccctggattctttttctggcaagcctcgaggcagcggcccaccagcaggcaccgccctgcccattgagggggttatactgtccctccaggacctgatcatttatttcgagcctccaagtgaggacctccagcacgaggagaaacaaagcaagctaagaagcctgaggaaccggcagtccctgtttcaggaagagggaatgctgagcatggtgctcaactgtatagacagactgaatgtgtacactaccgcagcccacttcgccgaattcgctggcgaggaggccgccgagagctggaaagagattgtgaacctgctttatgagctcttggctagcctaataagaggtaacagaagtaattgtgcgctgttctcgaccaacctcgactggctagtgtccaaactagatagactcgaagccagtagcgggattctcgaagtcctgtactgtgtgctcatagaatcgccagaagttctcaatatcattcaggaaaatcacataaagtctataatatcacttctggacaaacacgggcggaaccataaggtgctcgacgtcttatgcagtctgtgcgtttgtaacggcgttgccgtcagatcaaaccaagatcttatcaccgaaaatcttttgcccggtagggagctgctgcttcagacgaatctgatcaactatgtgaccagtatacgcccaaatatcttcgtcggtcgtgcagagggaactacccagtactctaagtggtactttgaggtgatggtggatgaggtgaccccgtttctcacggcccaggccacccatctcagggtcgggtgggctctgacggaaggttacacaccttacccgggagctggcgagggctggggaggcaacggcgttggcgacgatttatacagctacgggttcgatggcctccatctttggaccggtcacgtggcaaggcctgttacctcccccgggcagcatctgctggctccggaagatgtgatttcatgctgtcttgatctgtcagtcccctcaattagttttcgcattaatggctgcccagtccagggagtgttcgaatctttcaacctggatggcctttttttccccgttgtaagcttctccgccggggttaaggtgaggtttcttctgggaggccggcacggagagtttaagttccttcctccgcccggctacgcaccctgccacgaggcagtgctccctcgagagcgactgcatctggaacctatcaaggaataccggcgtgagggcccccgaggtcctcacctggtgggtccatcccgatgtttatcacacacagacttcgtgccatgtcccgtggacacggtgcagatagtcctgcctccacacctagagagaatacgggaaaaactcgcagagaatatccacgaactgtgggctctgaccagaatcgaacagggctggacctacggccccgtgagggacgataacaagcgtcttcacccatgcctggttgacttccattctttgcccgagccagagagaaactacaatctgcaaatgtcaggggagacgcttaaaactcttctcgcattaggctgccacgtagggatggccgatgagaaggccgaagacaatctcaaaaagactaagcttcccaagacatacatgatgtcaaatggttataagcccgctcccctggacctttcacacgtgcgtcttacccctgcgcagaccaccctggtggatcggctggctgaaaacgggcacaacgtttgggcacgagatagggtgggacaggggtggtcctatagtgccgtgcaggacatacctgcgaggcggaaccccagacttgtcccctatcgcctactcgacgaagcgacaaagcgaagcaaccgtgactcgctctgtcaggcggttcggacgctgctgggatatggttacaatatagagcctcctgatcaagagccctcacaagtggaaaaccagagtaggtgcgaccgtgtgcggatcttccgcgccgaaaaaagctatacagttcaaagcgggcgctggtacttcgagttcgaggcagtaacaactggagagatgcgggtggggtgggctcgtcctgagcttcgccctgacgtggagctgggcgccgacgaactggcttatgtgttcaacggacatcggggccagaggtggcacctgggtagtgagccattcggaagaccgtggcagccaggggacgtcgttgggtgcatgattgatctgacagagaataccatcatcttcaccctgaatggcgaagttctgatgtctgatagtggatctgaaactgcctttagggaaatagaaataggcgacggattcctgcccgtgtgttctctgggcccaggtcaggtcggtcacctgaacctggggcaagacgttagctctctgcgattcttcgctatctgtggactacaggaagggtttgagccttttgccattaatatgcagcgccccgtgactacttggttcagcaagggtttgccccagttcgaacccgtacccctcgagcatccccattatgaggtgtcgcgcgttgatggaactgttgacacacctccttgcttgagactcactcatcgaacttggggctcccagaacagccttgtcgagatgttgtttttaagacttagcctcccagtgcagttccatcaacacttccggtgcaccgccggggcaacgccattggcaccaccaggactgcagccccctgccgaagacgaagcgcgtgctgcagagcctgacccagactacgaaaatctgcggcgcagcgccggcgggtggtctgaggccgaaaatgggaaagagggcaccgctaaggagggtgcccccggcggaacaccccaggccgggggcgaggctcagccagcaagagctgagaatgagaaagacgccaccacggaaaaaaataaaaagcgaggtttcttatttaaggccaaaaaagtggcgatgatgacccaacctccagctacacccactctaccaaggctgccccacgatgttgtgcctgctgacaacagagacgaccccgaaatcatcctgaacaccactacatactattacagcgtgagggtgttcgccggacaggagccttcatgcgtctgggccggatgggtgacaccagactatcatcagcatgacatgagctttgacctgtctaaagttagagtggtgacagttactatgggggatgagcagggtaatgtacattcctctttgaaatgctctaactgctatatggtttggggtggcgattttgtctcgcctggccagcaggggagaatttcacatactgacctggtcatagggtgccttgtggacctggccactggcctcatgacgttcacagccaacggcaaggagtcaaacacattttttcaagtagagcctaatacaaaactttttccagctgtcttcgtgctccctacccatcagaacgttatacagtttgaacttggcaagcagaaaaacatcatgccactctctgcagccatgtttcagtctgaaaggaaaaatccggctccccagtgcccaccacggctggagatgcagatgctcatgcccgtttcttggtctcggatgcctaaccacttcctgcaagttgaaacacggagggcaggtgaacgtctgggctgggctgtgcagtgccaagagccactgacaatgatggctctgcacatcccagaggagaaccgctgcatggatatcctggagctctcagagcgtctggacctgcaacgctttcatagccacacactgcggttatatcgcgccgtgtgcgctctgggcaataatagggtagcccacgcgttatgctcgcacgttgatcaggcccaactgctccacgctcttgaggacgcgcaccttccaggtcctttaagggccggctattatgacctgctaatctccatccacctggagtccgcttgccgctcaaggcggtcgatgcttagtgagtacatcgtgccgttgactcccgaaactcgagcaattaccctgtttccccccggaaggtcaacagagaacggacacccgaggcacggtttgccgggagtgggcgtcacaactagcttacgtccgccacaccatttttctcctccctgcttcgtagctgctttgcctgctgcaggagcagctgaagccccagccagattgtcacctgcaataccccttgaagctctccgggacaaggcgctcagaatgctaggggaggccgttcgagatggaggtcagcacgccagggatccggtcggcggatcagttgagtttcagtttgtgccggtgctgaagctagtgtctacactcctggtgatgggcatcttcggtgatgaggacgtgaaacagatcctcaaaatgattgagcctgaggtgtttaccgaagaggaagaggaggaagacgaggaggaagaaggggaagaggaggacgaggaagagaaagaggaggatgaggaagaaacagcacaggagaaagaagatgaggaaaaggaggaggaagaagccgcagaaggagaaaaggaagaagggttggaagagggtctcctccagatgaagctgccagaatccgtgaagcttcagatgtgccacctgctagaatacttctgcgaccaggaactccaacacagggttgagtccctcgcagccttcgccgagagatacgtggataaacttcaggccaaccagcgctctaggtacggactgcttatcaaagcattttcaatgactgctgccgagaccgccaggcgcacacgcgagtttcgctcacccccgcaggaacaaataaacatgctcctgcaatttaaggatggtaccgatgaagaggactgccctctgcctgaggagatcaggcaggatctgttggatttccatcaggacctgctggcccactgcggcatccaactggacggtgaggaggaagaacccgaagaggaaacaacgctggggtcaaggcttatgagccttctggaaaaagttagattggtgaagaaaaaggaggagaaacctgaggaggagaggtctgcagaggagagtaagcccagatctctacaggagctcgtgagccatatggttgtcagatgggcccaagaggactttgttcagagtccagagctggtgcgggccatgttctctttgctgcatagacaatacgatggattgggggaacttctccgtgccctgcctcgagcctataccataagcccttcctcagtagaagacactatgagcctgctggagtgtcttggtcagatccgttctttattaatcgtccagatgggaccacaggaagagaacctgatgatacagtctatcggaaacattatgaataacaaggtgttttaccagcatcctaacctgatgcgtgcccttggaatgcatgagactgtgatggaggtgatggtcaacgttttgggtggtggggaatccaaagagatcagatttccaaaaatggttactagttgctgtcgctttctctgctacttttgcagaattagcaggcagaaccagcggagtatgttcgaccatctctcataccttctggagaattccgggatcggactcgggatgcaaggctccaccccactcgatgtagccgctgcatctgtaattgacaataacgaattagccctggctctgcaggagcaggacctggagaaggtggtctcatatctcgcaggctgtggactccaaagctgcccaatgctagtggccaagggttaccccgatatcgggtggaatccctgtggcggcgagagatacctcgatttcctgagattcgccgtgttcgtgaacggcgagtctgtcgaggaaaacgcaaacgtcgtggtgcgcctgcttatcaggaaacctgagtgtttcggtccagcactgcgtggagagggtgggtcaggcctgctggcagccatcgaagaagcgataaggattagtgaagatccagccagagacggcccgggaatccggagggataggagacgggagcactttggcgaagaacctccggaggaaaatcgggtgcatttgggccacgcgattatgtcgttttacgccgcactcattgaccttttgggcagatgtgcccctgagatgcatttgatccaagctgggaagggggaggcgctccgaatcagagcaatattacgatctctggtgcccttagaggacctggtgggtataatcagcttacccctgcagattcccacacttggaaaagacggcgcgttagtacagcctaagatgtcagcctcattcgtgcctgaccataaggcttcaatggtgctattcctagatagagtgtacggtattgagaaccaggattttctactgcacgtgctggacgtcgggttccttcccgatatgcgggccgctgcttctctggatacggccacattctctacgacagaaatggccttggcacttaaccgctacctctgtctcgcagtgctaccattgattaccaaatgtgccccgctgttcgctggaacggaacacagagccatcatggtcgactcgatgctgcacaccgtctataggctctctagggggagatcactaactaaggcccagcgtgatgtcatagaggactgtctgatgagtctgtgtcggtacatcaggccatccatgctgcagcatcttcttaggcggttggtttttgacgtgccaatccttaacgagttcgcgaaaatgccattaaaactgttgacaaatcactacgaaaggtgctggaaatactattgcttacctaccgggtgggccaattttggggttacctcagaagaagaacttcatcttacacgaaaactcttttggggtatatttgacagtctcgcgcacaaaaaatacgacccagagctttaccggatggccatgccttgcctatgtgcaatcgcaggagcccttcctcctgattacgttgatgctagctatagttccaaagccgaaaaaaaggcgactgtcgatgcagagggaaacttcgacccacgtccagttgagaccctgaatgtaattatccccgaaaagctcgatagcttcatcaacaagtttgccgaatacacacatgagaagtgggcatttgacaagatccagaacaattggtcatacggcgaaaatatagatgaggagctcaaaacgcacccgatgctgaggccctataagacattctccgaaaaggataaagaaatttataggtggccaattaaggagagcctaaaggcgatgatcgcttgggagtggaccatcgagaaggcccgggaaggagaggaagagaaaactgaaaagaagaagactcggaagatctcacagtctgcccagacatatgacccccgtgaaggatataaccctcagccaccggacctgtcagcagtgacactgtcaagagaactgcaggcaatggctgaacagctcgcagagaattaccataatacgtggggtagaaagaaaaagcaggaacttgaagctaaaggtggcggaacacatcccttacttgtaccctacgacactctgacagctaaagagaaagcccgcgatagagagaaggcacaggaacttttaaagttcttgcagatgaacgggtatgccgtgacccggggcctgaaagacatggagttagatagcagttcaatcgaaaagcgcttcgcgttcggcttcctgcagcagttactgcggtggatggatatcagtcaggaatttatcgcccacctggaggctgttgttagttccggccgggttgaaaaatccccgcacgagcaagagatcaagttctttgcaaaaattttactgcccctaataaatcagtacttcacaaaccactgcctgtacttcctgtccaccccagcaaaagtccttggatcggggggtcatgccagcaacaaagaaaaagaaatgatcacttcattattctgcaaattggctgccttggtgcggcaccgcgtctctctgttcgggactgatgctcctgcagtcgtgaactgcctgcacattttggccaggagcctggatgcacgcacggtgatgaaatctgggccagagatcgttaaggcagggctgcgatcgttttttgagagcgcgagcgaggatattgagaaaatggtggaaaacctcagactgggaaaagtatcacaggcacgaacccaggtgaagggagtgggacagaatctcacctacacaacagtggctctcctcccagtgttaaccactctcttccagcacattgcccagcatcagttcggggacgatgtaatcctggatgacgttcaagtgagctgctatagaactctgtgttcaatttattctctgggtactacaaagaacacatatgtggaaaagcttagaccggctctcggcgaatgtctggccaggctggccgcggctatgcctgtagcattcttggagccacaacttaatgagtacaatgcctgctcagtttacaccaccaagagcccccgtgaaagggcaatcctgggcctcccaaattcagtggaagagatgtgccctgatatccccgtgctcgaacggctcatggctgacatcggtgggctagccgagtcaggagctagatacaccgaaatgccacatgtgatagaaattacactgccgatgctttgctcctatctgcctcgttggtgggagaggggcccagaggcccctccatctgccctgccagccggtgcccccccaccttgcacagccgttacaagcgatcacctaaactctctgttggggaatattcttcgaatcatcgtgaataacttgggaatcgacgaagccagttggatgaaaaggctggcagtttttgcccaaccgattgtctctcgagcacgaccggagttgctgcagtctcacttcatcccgactatcggcaggcttaggaaaagggctggtaaggtggtctccgaagaagaacaactgaggctcgaagcaaaagcagaggcacaagagggtgagcttcttgtacgcgatgagttctcggtcctctgccgcgatctttacgccctgtatccactcctgattcggtatgtcgataacaaccgcgcacagtggctgacagagccaaacccaagtgccgaagagttgttccgcatggtaggcgagatttttatttactggtccaaatcccacaattttaaacgggaggaacaaaatttcgtggtgcaaaatgaaattaataatatgagctttctaactgcggataataagtctaaaatggccaagagcgggggttccgatcaagaacgcacaaagaaaaagcgccgcggtgatagatattccgtccaaaccagtctgattgttgctaccctcaagaagatgctgcctataggtctcaacatgtgcgcacccactgaccaggacctcatcactctggcgaaaacaagatacgcactcaaggacactgacgaagaggttagagaattccttcataataacttgcacctgcaggggaaagtagagggaagtcccagcctaagatggcaaatggccctctatcggggtgtgcccggcagagaagaggatgctgatgaccctgagaagattgtcaggagggtacaggaagtcagcgcagtcctgtactatttggaccagaccgaacatccctataagtctaaaaaggccgtctggcacaagcttcttagcaagcaaaggcgccgcgctgtcgtagcatgctttcgaatgacaccactatataatctccctacgcaccgggcctgcaacatgtttctggagagttacaaggcagcctggattcttacagaagaccattcatttgaagaccggatgatcgacgacctgtccaaggccggagaacaggaggaggaggaggaggaggtagaggagaagaaaccagaccctctccaccagctcgtgcttcattttagtcgtaccgctttgactgaaaagagcaaactagatgaagattacctctacatggcttatgctgacattatggcaaagtcctgccatctcgaggagggcggtgagaacggggaagctgaggaggaggtggaagtgagcttcgaggagaaacagatggagaagcagagactgctgtatcagcaagcccgcctgcacacaagaggagctgctgaaatggtcctgcaaatgatatcagcctgcaaaggagagacgggcgctatggtttctagcactctcaaactggggatcagtattctcaatggaggaaatgccgaggtccaacagaagatgctcgactaccttaaggataaaaaggaggtgggattttttcagtctatccaggccctgatgcagacttgtagcgtgcttgatttgaacgcatttgagaggcaaaataaagcagagggactgggaatggtgaatgaggacgggacagtgataaaccgccaaaacggagagaaagttatggccgacgacgaattcacccaagatctcttccgatttctacagctcctgtgtgagggccataataatgacttccagaattaccttcggactcagacaggcaacactactactataaatatcattatttgcactgtggattaccttctgagactgcaggaaagcatctcggacttttattggtactatagtggtaaagacgtgatcgaggagcagggaaagcgtaatttctccaaagctatgagcgtggccaaacaggtgttcaacagccttacagaatacattcagggaccttgcaccggcaaccagcagtccctggcacattcacgcctatgggacgccgttgtgggattcctccatgttttcgcccacatgatgatgaaactcgcccaggattcatcacagatagaactgcttaaggagctcctggaccttcagaaggacatggtagtgatgctacttagtttgctggaaggcaatgtagtgaacggaatgatcgcgcgccaaatggtggacatgttagttgaatcatcatctaacgtagagatgatcctgaaattcttcgatatgttcttaaaactgaaggacatagtgggtagcgaagcctttcaggattacgtaacagacccacgcggccttattagcaagaaagactttcagaaagcaatggactcccaaaagcagttcagtgggccagagatccaattcctgctgtcatgctctgaagcagatgaaaatgagatgatcaattgcgaagagttcgccaatcgtttccaggaacctgctcgtgatatcggtttcaacgtggccgtcctccttacaaacctatccgaacacgtgccgcatgacccacgcctgcataactttctcgagttagcagagagcatcctcgagtactttagaccatacctgggacggattgagattatgggggcatcccggcgtattgaacggatatattttgaaatttcagaaactaatcgggcccagtgggagatgccacaggtcaaagagagcaagcgccagtttatcttcgacgtagtgaatgaaggcggcgaggccgaaaaaatggaactttttgtgtccttctgtgaggacaccatattcgagatgcagattgccgcccagatctcagagcctgagggagagcccgagacagatgaggacgaaggtgccggcgcggccgaagcaggagctgagggtgctgaggaaggcgctgccggactggagggtaccgctgcaacagcagcagcaggcgcaacagccagggtcgtggcagccgcaggcagggctcttcggggcctatcataccggagcctccggcgccgtgtacgtcgcttacggcgcctcacagcaagggaggccgccacagcagtggcggccttgctctgggctgcagttaccagagccggcgccgcgggtgctggagcagcagctggcgcgctgggcctgttgtgggggagtctgttcggcgggggacttgtcgagggagctaagaaggtgaccgtcaccgagctgctggcaggcatgcccgatccaactagcgatgaggtgcacggggagcagcctgccgggcctgggggagatgccgacggtgaaggcgcatccgaaggggccggcgatgccgccgagggcgccggggatgaagaggaggccgtccacgaagccgggccaggaggggctgacggggctgtggctgtgactgatgggggacccttccgccctgaaggggccggcggcctcggagatatgggagatactacccccgccgaaccccccacccccgagggatcaccaatactaaaaaggaagctcggcgtggacggcgttgaggaggaattgcctcctgagcctgagcctgagcccgaacccgaactggagcctgagaaggccgacgcagaaaacggtgaaaaggaggaagtgcccgagcctacgcctgagccccccaagaagcaagcccccccatcaccaccccctaagaaggaggaagcaggtggagagttctggggagagcttgaggtacagcgggtgaagtttcttaactacctctccagaaatttttacaccctgaggttcctggcgctgttcctagctttcgccattaacttcattttattattctacaaggtgtccgactccccaccaggtgaggacgatatggaaggcagcgcagccggcgacgtgagcggcgcgggatccggcgggagtagtggctggggcttaggagcaggagaagaggcggagggggacgaggatgaaaatatggtatattactttctggaagagagcactggttacatggaaccagcattaaggtgtctgagtttgttgcacactctcgttgcgttcctctgcataatcggctacaactgtcttaaggtgcctctggtgatcttcaagcgcgaaaaagagctggcaagaaagcttgaattcgacggcctctatatcacggagcagcccgaggatgatgacgtcaagggccagtgggataggctggtgctgaataccccatcctttccaagcaattactgggacaaattcgttaagcggaaagtgctcgacaagcacggagatatttacggtcgggagcgcatcgctgagcttcttgggatggatcttgccacgttagagatcactgcccataacgaaaggaaaccaaaccctccacccggtttactcacctggttgatgagcatagatgtcaagtatcaaatttggaagtttggtgtcattttcacagataacagtttcctgtacctgggttggtacatggtcatgagcttactcggacactacaataatttttttttcgccgcgcacctgttggacattgcaatgggcgtgaagacattgagaactatcctttcgtctgtgacccacaatggtaaacagctggtgatgaccgttgggttactcgccgttgtcgtctacctttataccgtggtggcctttaacttcttccgtaaattttataataaatcggaagatgaagacgagccagatatgaagtgcgatgacatgatgacgtgttatcttttccatatgtatgtaggcgtgagagccggtgggggcattggggacgagatcgaggacccagcgggtgacgaatatgagttatatagggtcgtgtttgacattacttttttcttttttgtgatcgtgatcctgctggcaatcattcaaggactcattattgacgcgttcggagaacttcgcgatcagcaggaacaggtcaaggaggacatggaaactaagtgctttatctgtgggattgggtctgattacttcgacactacaccacatggcttcgagacacacacattggaagaacacaatcttgcaaactatatgtttttccttatgtatctcataaacaaggacgagactgagcataccggtcaagaaagctatgtgtggaagatgtatcaggagaggtgctgggattttttccctgccggtgactgctttcgcaagcagtacgaggaccagctgtcatag

SEQ ID NO: 204102 - DNA, 15117 bp, synthetic construct
  misc_feature 1..15117: note = Description of Artificial Sequence: Synthetic coding sequence
  source 1..15117: mol_type = other DNA
atgggcgacgccgagggcgaggacgaggtgcagttcctgcggaccgacgatgaggtggtgctccagtgcagcgcaactgttctgaaggaacaactcaaactttgcctggccgccgagggctttggcaacagactttgctttctggagccgacctccaatgcccagaatgttccgcctgacctcgcaatatgctgctttgttctggaacaatctctctccgtgagagccctccaagagatgctggcaaatacagtggaggcgggcgtggagtccagtcaggggggtggtcatcgcacgcttctctacgggcacgctattcttctgaggcatgctcactcaaggatgtacctgtcttgcctgaccacaagcagaagcatgacagataaactcgccttcgatgtaggcctacaggaggatgccactggggaagcatgctggtggactatgcaccccgcaagcaagcagcgatccgagggagaaaaagttagagttggagatgacattatcctggtttctgtgtccagcgaacgctatctccatctgtctaccgcgagcggcgaactgcaagtggatgccagctttatgcagacactttggaacatgaatcccatctgtagcaggtgtgaagaaggctttgtcactggcgggcatgtactgcgcttgttccacggccatatggatgagtgtttgactatctccccagccgactctgacgatcagcgaaggcttgtttactacgaggggggagcggtctgtacacacgcccgatcactctggcgcttggagccactcagaattagctggagtgggtctcacctgaggtggggccagccactacgggtgagacacgtgacaactggtcagtaccttgcacttacagaagaccaagggctagtcgtggtggatgcgagtaaagctcatacaaaagcgactagtttctgtttccgaatatcaaaggagaaattggacgttgcaccaaaaagggatgtggaaggcatgggccccccagaaattaagtatggcgagagcttatgcttcgttcaacacgtggcatccggactctggctgacttatgccgctcccgatcctaaagcactccgcttgggagtgctgaagaaaaaagctatgctacatcaggaagggcatatggatgatgctctgtctctaacccgatgtcagcaggaagagagtcaggccgcgcgcatgattcattctaccaacggactgtacaaccaattcattaaatccctggactccttttccggtaagcctagaggcagcgggccccctgctggcacagccttgcctatcgagggtgtaattttatctctccaagacctgatcatctattttgagccaccatcagaggacctgcagcatgaggagaagcaatcaaagctgcggtctctcaggaatagacagagtttattccaggaagaagggatgttgtccatggtgcttaactgtattgataggttaaacgtgtacacaaccgctgcccattttgcggaatttgccggagaagaggcagccgagagctggaaagagattgtgaatctattatatgaactcctagcatcactcatccgtggcaaccggtctaattgtgcgttattcagtacaaacctggactggttggtgtccaagcttgacaggcttgaggcctcttccggcatccttgaagtcctgtactgcgtgctgatcgaatctcccgaagtgctgaatatcatccaggaaaatcacatcaaatcaatcatttcgctgctggacaaacacggtcggaatcataaggtactagacgtcctgtgttcattgtgcgtctgtaatggtgttgcggtgcgaagcaaccaagatctgatcacagaaaatttgctgcctggacgcgaactgctgcttcagaccaacctgataaactatgttacatccatcaggccaaatatatttgttgggagggcagaggggacaacccaatactctaagtggtatttcgaagtgatggtggatgaggtgacacctttcctgacagcccaggccacacacctccgagtcggctgggccctaacggagggatacacgccctaccccggcgccggggaggggtggggcgggaacggcgtgggggacgacctctattcttatggattcgatgggctccacctttggactggccacgttgcaaggccagtcacaagccccgggcagcacttgttggcacccgaagatgtgattagctgctgccttgacctgagcgtgccatccattagcttcagaattaacggttgccctgtgcaaggagtgtttgagtcattcaatttggacgggcttttcttccctgttgtgtctttctccgccggcgtgaaggtcagattcttgctcggcgggcgccacggggaatttaagtttctgcccccaccaggatacgccccttgtcatgaagcagtgctaccaagggagcgcctacatctcgagccaatcaaggagtacagacgggagggacctcgaggccctcacttggtcggccctagtcgttgtctgtcacacacagatttcgtgccatgtcccgtcgacaccgtgcagatcgttcttccaccacacctcgagcgcatccgagagaagttagccgagaatatccacgagctgtgggcactgaccaggatcgaacagggctggacctatgggcccgtcagagacgataacaagcgcctccatccctgcctggtggactttcactcgttacccgagcccgagagaaactataacctccagatgtctggtgaaacactgaaaacgcttctcgcactgggctgccacgtcggcatggccgatgagaaagccgaagacaacttgaagaagactaagctcccaaaaacctacatgatgagtaacgggtataaaccggctccactggatttgagccacgtgcggctcacacccgcccagaccaccctggtggacagactggccgagaacggacacaatgtgtgggcacgggaccgcgtcggtcaagggtggagttatagcgctgtgcaggatatccccgcacgaaggaatccacgcctggtgccttatcgactgctggacgaagctaccaagagatctaacagggactcgctctgccaagcagtgagaactctgttaggctatggttataacatcgagcccccggaccaagaaccctcccaggtcgagaaccaatctcggtgtgatcgtgtaaggatctttcgcgccgagaaatcctacactgtgcagtctggacgctggtacttcgagttcgaagcggttacgacaggagaaatgcgggtgggttgggcaaggcctgagctgcgacccgacgtggagctgggagcagatgagttagcatatgtattcaatgggcacagaggccagaggtggcacttgggctctgagccttttgggaggccgtggcagcctggagatgtagttggatgtatgattgacctgactgaaaacaccattattttcaccctgaacggagaagtgctaatgtctgacagcggatcagagacagcattccgcgagatcgagattggcgatggtttcctgcccgtttgtagcttggggcccggccaggtgggccaccttaatctgggacaggatgtgagctctcttaggttttttgcgatctgcggcctacaagaaggcttcgaaccgttcgcaatcaatatgcagcgcccagttacaacgtggttctctaagggtctgcctcaatttgaaccggtgcctctcgaacatccacattacgaggtttctcgcgttgacggcacggttgacacacccccctgcctacggctgacccatagaacctggggatctcaaaacagtttggtagaaatgctgttcttaagactaagcttgcctgtgcagttccatcagcatttccggtgcaccgctggggctacccctctggcacccccaggcctgcagccccccgcagaagacgaggcgcgggccgccgagccagaccctgattatgagaacctcaggcgatcagccgggggatggtctgaggcggagaatggtaaggagggaactgcgaaggaaggggccccggggggaacacctcaggctgggggtgaagcccagcccgctcgcgctgagaatgagaaggatgctaccactgagaaaaataagaaacggggctttctcttcaaggccaaaaaggtcgccatgatgacacagccgccggcaacaccgacactgccacggctgcctcacgatgttgtgcccgccgataatcgtgacgatcccgaaatcatcctcaacaccacgacctattattactccgtgagagttttcgccggacaggagccaagttgtgtgtgggcaggctgggtaacacctgactaccaccagcacgacatgagctttgatctgagcaaggttcgggtcgtaaccgtgacgatgggagatgaacagggaaacgttcattcctcactgaagtgctcgaattgttacatggtttggggcggcgatttcgtgtcccccggacagcagggacggatcagtcacacagatctggtgattggctgcctggtagacctggccactggtctaatgacattcacagccaatggaaaggaaagcaatactttctttcaggtagaacccaatacaaagctgttccccgctgtcttcgtgttgccaacccaccagaacgtcatccagttcgagctgggtaaacaaaagaatatcatgcccctgagcgctgcaatgttccagagtgagagaaagaacccagctccccagtgtccccctaggctcgaaatgcagatgctgatgcctgtcagctggtctagaatgcctaatcatttcctgcaggtggaaacgaggcgggcaggagagaggctggggtgggccgttcagtgtcaggagcctctgactatgatggcccttcacattccagaagagaatagatgcatggatatcctggaactaagcgagcgcttggacctgcagcgatttcattcgcacaccttaaggttgtaccgggcggtatgcgccttaggaaacaatcgtgtggcccacgccctgtgcagtcatgttgaccaagctcagcttctgcacgcgctcgaggacgctcatttaccaggcccactgagggccggttactatgacctcctaatatctattcatctcgaatcagcctgcaggtccagacggtccatgctgtctgaatatatcgtgcctctgacaccggaaacgcgggccatcaccctttttcctccaggcagaagtactgaaaacggccacccacgccacggcctccccggcgtgggggtaacaacttctctgcgccccccacaccacttttcacccccttgtttcgtcgcagccttacctgccgctggagccgctgaagcaccagcacgactgagtccggccattccccttgaagctctccgcgacaaagccctgcgcatgctgggcgaagccgtcagagacggggggcagcatgcccgagatcccgttggcggatccgtggaatttcagttcgtgccggtgttgaagcttgtctctacgctgttagtcatgggcattttcggtgacgaagatgtgaaacaaattctcaagatgatagagcccgaggtcttcaccgaagaagaggaggaggaagacgaggaggaggaaggtgaagaggaagacgaggaggaaaaggaggaggatgaagaggagacagcccaggaaaaagaagacgaggaaaaggaggaagaagaggctgcggaaggcgagaaagaagaaggactggaggagggtttgttacaaatgaaactgccagagtccgtgaaacttcagatgtgccacctgttggaatatttctgcgaccaggaacttcagcacagggtggagagcctggccgccttcgcagaaagatacgtagacaagcttcaagccaaccagcgttccagatatggcttgctcataaaggctttctctatgaccgcagccgagactgctcggcgcacccgagagtttcgttcacctccacaggagcagataaatatgctgctccagttcaaggacggcacagacgaggaggactgtccattgcccgaggagatccgccaagacctactagactttcatcaagacctgcttgcacactgtggcatccagttagacggcgaggaggaggaacctgaagaagagacaacactgggctcgcgccttatgtccctcctggagaaggtgcgactggtaaagaaaaaagaagagaagcccgaagaagaaaggtctgccgaagagagcaagccccgctcacttcaggaacttgttagccacatggttgttcgctgggcacaggaagatttcgtccagagcccagagctagtgcgcgcgatgtttagcctgctccataggcagtatgatggtctcggcgaactgctgcgcgcgctacccagagcctatacgatcagcccctcttcagtggaggatacgatgagtctgctggaatgcctcggccagatccggtctctgcttatcgtccagatgggcccccaggaagagaacctgatgatacagagcatcggtaatataatgaacaacaaggtgttttaccagcaccctaatctgatgcgagccctgggtatgcacgagacagtcatggaagttatggttaacgtgctcgggggcggagaatccaaggagattagatttcctaagatggtcacctcttgctgtagattcttgtgctacttttgtagaatttcccggcagaaccagcgatccatgttcgaccaccttagctatctcttggaaaattccggcatcggcctgggaatgcagggtagtacacctttggatgtggcagccgcatccgttattgataacaacgaattagccctcgccctgcaggaacaggatctcgagaaggtggtcagctatcttgctggttgtggtctgcagagttgtccaatgctggtcgcaaaaggataccccgatattggctggaacccttgcggcggggagcgttatctcgacttcctccggttcgcggtatttgtgaatggggagagtgtcgaggagaacgccaatgtggtggttagattgcttatcagaaaacctgaatgtttcgggccggctcttagaggtgaaggcggtagcggcctacttgcagccatagaggaagcaattcgcatctccgaggaccccgcccgggatggcccgggaatccgaagagaccgccgccgggaacacttcggcgaggagcctccagaggagaatagagttcacttgggacacgcaatcatgtctttttatgccgctcttatagatttgttaggacgctgcgctcccgaaatgcatttaatacaagcagggaaaggcgaggctctacgcataagagctattctgagaagtctcgtgcccctcgaagacttggttggtattatctccttgcccttacaaatacctactctagggaaagacggcgcactggttcagccgaagatgtccgcctccttcgtgcctgatcacaaggctagcatggtgctgttcctggaccgcgtatatgggattgagaatcaggactttctgcttcatgttctggatgttggtttcctccccgatatgagggcagcggcctcgctcgataccgccacctttagtacaactgagatggccctggccttaaaccgatacctgtgcctagcagtcctgcccttgatcacgaagtgcgcaccgttgttcgctggtaccgagcatcgcgcaattatggtggacagtatgctgcacacagtatatcgcctgtcccgaggcagatctctcacaaaggcccagagggacgtgattgaagattgtctgatgagcctctgcagatacattcgaccttcaatgctgcagcatctactgcggaggctggtgttcgatgtgccaatcttgaacgagttcgctaaaatgcctttgaaattgctgaccaaccattatgaaagatgttggaagtactactgccttccaaccggatgggccaactttggagtgactagcgaggaggaactgcatttaacaagaaagctcttttgggggattttcgattcactggctcacaagaaatacgaccccgagctctatcggatggctatgccttgcttatgtgctattgctggggccctgcctcccgattacgtggacgccagctattcttccaaggcagaaaaaaaggctaccgtagatgccgaaggcaacttcgatccccgccccgtggaaaccctgaatgttataattccagaaaaactcgactcctttattaacaagtttgcggaatacactcacgagaagtgggcatttgataaaattcaaaacaattggagttacggggaaaatatcgatgaagagctcaagacccaccccatgctgagaccatacaaaacctttagtgaaaaagacaaagagatttatcgatggccaattaaggaaagcctgaaagcaatgatcgcctgggaatggaccatcgaaaaggcacgggagggggaggaagaaaagactgagaaaaagaaaacacgcaaaatctcgcagtccgcccaaacatacgaccccagagaggggtacaaccctcaaccccctgatcttagtgcagttacattgtctagagagctgcaagcaatggcggagcagctggctgaaaattaccacaacacgtggggacgcaagaagaaacaagagctggaggcaaaggggggaggtacccaccctctattggttccatacgatacacttaccgcaaaggagaaggccagggatagggagaaggcacaggaacttctgaagtttttacagatgaacggctatgctgttacacgaggcctgaaggacatggaactcgactcctcttccattgaaaagaggtttgcctttggtttcctgcagcagctgctgaggtggatggatatctcccaagaattcattgcacacttagaggctgtggtctccagcggtcgtgtggaaaaatcgccccatgaacaagaaatcaagttcttcgcgaaaattcttctgcctctgatcaaccagtatttcacaaaccactgtctgtatttcctctcaactcccgcgaaagtcctcgggagcggcggccatgccagtaataaagaaaaagagatgatcacctctctgttctgcaaactggccgcccttgtaagacatagagtgtcattgtttgggactgacgcacctgccgtggtgaactgtctgcacatcttggcccgaagcctcgacgctagaacggtcatgaagtccggcccggaaatcgtcaaggctggcctgcgaagctttttcgaatcagcctccgaggacattgagaagatggttgagaatctgaggctcggaaaagtcagtcaggcgagaacccaggtgaaaggagtgggccagaatctgacatacacaaccgtcgccctcttgccagtcctgaccaccttgtttcaacacatcgctcagcatcagttcggggacgacgtgatcttggacgacgtgcaggtgtcgtgctatcggacactgtgcagcatctattcattgggaaccaccaagaacacttatgtcgaaaaactgcgccccgcactaggggagtgcctggctcgcctcgctgctgcgatgccagtagccttcctggagccccagctgaatgagtacaacgcctgctccgtgtacactactaagagtcccagagagcgcgcaattcttgggctcccaaattccgtggaagagatgtgtccagatattcccgtgctcgagcgcctcatggcagacatagggggcctggccgagtccggggcccgctatacagaaatgccacatgtgatcgagatcacactgcccatgttgtgctcatatctgccccgttggtgggaacggggaccagaggcgccaccgagtgcgcttcccgcgggcgcccctcccccctgcactgccgttacatcagatcatctgaatagtctcttgggaaatatcctgcggatcatcgtaaacaacctgggcatcgatgaagcctcctggatgaagagattggctgtgtttgctcagcccattgtcagccgagcccgacctgaactgctgcaatcccattttataccaacaataggtaggctgcgtaagcgtgcaggcaaagtggtgtctgaagaagaacagttgaggttggaggcgaaggccgaagcacaagagggggaactccttgtaagagacgagttttccgtgctttgtcgtgatctgtacgctctctatccgctgttgattcgctacgttgacaataaccgcgcccaatggttgacagaacccaatccctctgctgaagaattgtttcgcatggtgggcgagatctttatctactggtctaagtcccacaacttcaagcgggaggaacagaactttgtggttcagaacgaaattaataatatgagtttcctgacggctgacaacaagtcaaagatggcaaaggccggggacatccaatccggaggtagcgaccaggaacggaccaaaaaaaaacgacggggcgatcgctactctgtgcagacctccctaatcgtagctaccctgaagaagatgctcccaatcgggttaaatatgtgcgcaccgacagaccaggacctgattactctggccaagactaggtacgcccttaaggacaccgacgaggaagtgcgagaattcctgcacaataatctccatctgcagggcaaggttgaggggtcaccgtccctgaggtggcaaatggccttataccgtggggtgcctgggcgagaggaggacgcggacgacccagaaaaaatcgttagacgcgttcaggaggtcagcgccgtactgtattacctcgatcaaactgaacacccatataaatccaaaaaagctgtgtggcataagctcctgtcaaaacagaggaggagagccgtcgtggcatgcttccgcatgacccccctgtataacctgcctacacaccgggcctgcaacatgtttctggagtcgtataaagctgcatggattcttactgaagatcactcgtttgaggatagaatgattgatgacctatcgaaagccggcgagcaggaagaagaggaggaggaagtagaggagaagaagcccgaccccctgcaccagctggtgctacacttttcacgaactgcgcttacggaaaagagcaagctggatgaggactatttgtacatggcgtacgctgacattatggccaagtcctgtcaccttgaggaggggggcgaaaacggggaggccgaagaggaagttgaagtctcatttgaagagaagcagatggaaaagcagcgcttgttgtaccagcaagctcggcttcacactagaggggccgccgaaatggtgttacagatgatttccgcctgtaagggagaaaccggcgccatggtgtctagtactctcaaactgggaatctcaattcttaatggcggcaacgctgaggtgcaacaaaagatgcttgattatttaaaagacaagaaagaggtcgggttctttcagagcattcaagcactgatgcaaacttgcagtgtgttagacctgaacgcctttgaacggcagaacaaggctgaaggcttaggtatggttaacgaagacggcactgtaattaaccgtcaaaacggggagaaagtgatggccgacgatgagttcactcaggatctgttccggtttcttcagttgctttgcgagggacataataacgatttccagaactacttgcgaacgcagactggcaatacaacaaccatcaatattataatctgcaccgtggattacctcctgcgcctacaggaaagcattagcgacttttattggtattatagcggcaaagacgttatagaagagcagggaaagaggaatttctccaaagctatgagtgttgctaaacaggtctttaacagtctcacggagtatatccaagggccctgcactggcaaccagcagtctctggcacatagccggctctgggacgctgtagtcggatttctgcatgttttcgctcacatgatgatgaaactggctcaagattcgtctcagatcgaactgctcaaagagctgctggacttgcaaaaggatatggtggtgatgctgctgagtctactggagggcaacgtggtgaacgggatgattgctcggcagatggtcgatatgcttgtcgagtcttccagcaacgttgaaatgatactgaagtttttcgatatgttcctgaaacttaaagacatcgtcggcagtgaggcgttccaggactatgtgaccgatcctcgggggctcatcagtaagaaggatttccagaaagctatggatagccagaagcagttcagcggacctgagatccagttcctgctgagttgttccgaggccgacgaaaatgaaatgatcaattgcgaagagtttgccaaccgttttcaagagccggcacgggacattgggttcaatgtggccgttctcttgaccaatctttcagagcatgtgccgcatgatccgcgtctgcataatttcctggagctggcagagagtattctggagtactttcgcccttatctgggtagaatcgagataatgggagcatcaaggcgcatagagagaatctatttcgagatttcagagaccaatagagctcaatgggaaatgccgcaagtaaaagaatccaagcgacagttcatttttgacgtcgtgaacgaaggcggggaagctgagaaaatggagttgttcgtgagtttttgtgaggacaccattttcgaaatgcaaatcgcggcccagatctctgaaccagaaggagagccagagacggacgaggatgagggcgcgggcgccgctgaagccggtgctgagggcgcagaggagggagctgcaggcctcgaggggacagccgccacagccgccgcaggtgcgaccgcccgagtcgttgcagcagcaggtcgggctttaagaggactcagctacagaagtctgaggcgacgcgttcgccggttaagacgcttgaccgctcgggaagccgccaccgccgtagccgctctgttatgggccgcggttaccagggccggggccgctggtgccggtgcagccgcaggtgcccttggtctgttatggggatcattgtttgggggggggcttgtggaaggcgccaaaaaggtgaccgtgacagagctgttggccgggatgcccgatccaacaagcgacgaagtacacggcgagcagcctgccggcccaggcggtgatgcagatggagagggcgctagtgagggggccggcgacgccgccgaaggagcaggagatgaggaggaggccgttcacgaggccggccctggaggtgctgatggcgccgtggccgtcacggatgggggaccttttcggccagagggagccggcggactgggcgacatgggggacactacaccggccgagccccctaccccagagggctccccgattttaaaacgaaaactgggggttgatggtgtcgaggaggagctcccacccgaacctgaaccagagcccgagccagagctggagcccgagaaggccgatgctgagaatggggaaaaggaggaagtgccagagcctacacccgagccgccgaagaagcaagcccctccaagccccccccccaaaaaggaggaagcaggcggcgagttttggggagaactggaggtgcagcgtgtgaagttcctgaactacctttccagaaatttctatacactgaggtttctcgctctgttcctggcctttgccatcaatttcattctgcttttctacaaagtaagtgattccccaccaggcgaggatgatatggagggatccgctgccggcgatgtttccggtgcaggatctggtggtagttcagggtggggtctgggcgccggcgaggaggccgagggcgacgaggacgagaacatggtttactactttctggaagaatccaccggctacatggagcccgctcttaggtgcttgagtctgctccataccctcgtcgcatttttatgtatcataggatacaattgcctgaaggtccccctcgtgatcttcaaacgggaaaaagagttggctagaaaactcgagttcgacggactttacatcacggaacagcccgaagatgatgatgtcaaaggacagtgggatagactggtgcttaacacgcctagcttcccctccaactattgggacaaattcgtgaagcggaaggtgctcgataagcacggtgatatttacggccgtgaaaggattgccgagctcctcggtatggacctggctactttagagatcaccgcccataatgagagaaagccaaacccgcctccaggcctgctgacgtggctgatgagcatagacgtgaaataccagatatggaagttcggtgtgatatttacggacaactcatttttatacctggggtggtacatggtcatgagccttctgggacactacaataacttcttttttgccgcccatctgctagacatcgccatgggcgtcaagactctccgtacaatcctgtccagcgtgacccataatggtaaacagctggttatgaccgtgggattactagctgtcgtggtttacttgtatactgtggtagcgttcaattttttcaggaaattttataacaagagcgaggatgaagatgagcctgacatgaaatgcgacgacatgatgacatgttacttgttccatatgtacgtaggcgtccgtgcagggggaggcataggcgacgagattgaggatcccgccggcgacgagtatgagttataccgcgtcgtgtttgacattaccttcttcttttttgtaattgtgatcctccttgcgatcatccagggacttatcattgatgctttcggcgagctacgtgaccagcaagaacaggtgaaagaggacatggagaccaagtgtttcatctgcggaatcggttctgactatttcgacacaactcctcatgggtttgagacccacaccctggaagagcacaacctggcaaactatatgttttttctaatgtacttaatcaataaagacgaaaccgaacacacgggccaggagagctatgtgtggaaaatgtatcaggaacgctgttgggattttttccccgccggcgactgcttcaggaagcaatacgaggatcagctcagttag

SEQ ID NO: 204103 - DNA, 15102 bp, synthetic construct
  misc_feature 1..15102: note = Description of Artificial Sequence: Synthetic coding sequence
  source 1..15102: mol_type = other DNA
atgggcgacgccgagggcgaggacgaggtgcagttcctgcggaccgatgatgaggttgtgcttcagtgctctgccaccgtgctcaaggagcagcttaagctctgcttagctgccgaaggatttgggaatcgactgtgtttccttgagcccactagcaacgcccagaacgtgccacccgacctggccatttgctgcttcgtgctagagcaaagcttatccgtcagagcactacaagaaatgctcgcaaatacagtcgaagccggcgtggaatcctctcaaggtggtggtcaccgtacactcctgtacggccatgcaattttacttcggcacgcccatagccggatgtatctgtcttgcctgacgacatcacgcagtatgaccgataaactggctttcgacgtggggctgcaggaagatgcaactggtgaagcctgctggtggactatgcaccccgcatctaaacagaggtcagagggcgagaaagtgcgggtgggggatgatatcatattagtctcagtgtctagcgagcggtacctccacttgagcaccgcaagtggagagttgcaggtagacgccagttttatgcagacattgtggaacatgaatccaatctgtagccgatgtgaggagggatttgtgaccgggggtcacgtactgcgcctttttcatggccacatggatgagtgcctcactatctctcccgcggacagcgacgaccagagaagactggtgtattatgagggcggcgcagtatgcactcacgcgagaagcctgtggcgccttgagccattgcgcatctcctggtctggatcccacttgcggtggggtcagcctctgagggtgcgccacgtcacaaccggtcagtatctagcactgaccgaggaccaaggactggtggtcgtagatgcctccaaggcgcacactaaggcaacgagcttttgttttcgtatctcaaaggagaaactggatgtcgctcccaagcgagatgtcgagggcatgggtccccccgagattaagtacggggagagcttgtgctttgttcagcacgtagcttccgggctatggctgacttacgccgcccccgacccgaaggccctgaggctcggcgtgcttaagaaaaaggcaatgctgcaccaggagggccatatggacgatgccctgagcctgactcggtgtcagcaggaagaatctcaggccgcgagaatgattcactctactaatggattgtataatcaattcatcaagtctctcgacagcttcagtggaaagccgcgcggaagcggcccaccagctggaaccgctctaccgattgagggcgtgattctgagcctccaagatttgatcatatacttcgaacctccttcagaagatttgcagcacgaagagaagcagtcaaagctgcgatcgcttaggaacaggcagagcttgttccaggaagaagggatgttgtctatggttctcaattgtatcgataggctcaatgtgtatacaaccgctgctcacttcgcggagttcgccggcgaggaagcagccgaaagctggaaggagatagtcaatctgctgtatgagctcctggcctctctcattagaggcaaccgctcaaactgcgccctcttctctacaaacctggactggctggtgagcaaactggaccggctagaggcatcctcggggatccttgaggtgctgtattgcgtcttaatagagtccccggaagtgcttaacattattcaggagaaccacatcaagagcataatttccttacttgataaacatggacgtaatcataaagtgttggacgtcctttgctccctgtgtgtatgtaacggcgtggccgtccggtccaaccaggacttgattacagaaaacttgctgcccggacgggaactgctgctccagacaaacctcataaactacgtgacttccatccgcccgaatatctttgtcggtcgcgctgaagggacaacacagtactctaagtggtattttgaagtcatggtagacgaagtcacacccttcctgactgctcaggcaacacatcttcgtgtaggatgggccctgaccgaaggctacaccccataccccggcgcgggggagggatgggggggaaatggggttggcgatgacctgtattcttacggtttcgacggcctacatctgtggacaggccatgtggcgagacctgttaccagcccaggccagcacctcttggctcctgaagatgtcataagctgttgtctggacctgtcggtcccttctatctccttcagaatcaacggttgccctgtgcaaggtgttttcgaatctttcaacctagatggcctgttctttccagttgtcagcttctccgcaggggtgaaggtccgcttcctcctgggcggacgtcacggcgagtttaaatttcttcctccgcccggctacgcaccatgtcatgaagccgtcctccccagggagaggcttcacttagaacccattaaggaatacagaagggagggcccacgagggccccacctggtcggccctagccgatgtttgtcacacacggacttcgtgccatgccctgtggatactgtgcagattgtgctgcccccgcatctcgagcgcatcagggagaagctggccgagaacattcacgaactctgggccttgaccagaatagagcaaggctggacctacggtcccgttagggacgataataagagactccacccctgcctagtggattttcacagcttgcctgagccagaaaggaattacaacctccaaatgagtggagagaccctcaaaactctgcttgcactcggctgccatgtcggaatggcggatgagaaggccgaagataacttaaagaagacgaagttacctaaaacgtatatgatgagtaacgggtataagcctgcccctctggacctgagccatgtgagactgactcccgcccagacaaccttggtggatcggttggccgagaacggtcacaacgtatgggccagggaccgggtcggccagggctggagctattccgccgtgcaggacatcccggccaggcgtaatccccgccttgtcccataccgtttactggacgaagccaccaaacgttctaatagagactccctctgccaggccgttcgaacgctgttgggctacggttacaatatcgaaccccccgatcaggagccctctcaggtcgagaatcaatctcggtgtgacagagttcgaatttttcgggctgaaaagtcctataccgtgcaatcaggcagatggtattttgaatttgaggctgtgaccacaggggaaatgagagtcggttgggctaggccggaattacgaccggacgtggagctcggggctgatgaattggcttacgtgttcaacggtcaccgtgggcagcgatggcatcttgggtccgaaccattcggaaggccatggcagccaggagatgttgtgggatgcatgattgatttgacagagaatacgatcattttcactttgaacggtgaagtgctcatgagcgattccggtagcgaaactgccttccgcgagatcgaaattggtgacggtttcctgccagtttgttccctgggcccaggacaagtagggcacctgaacctcgggcaagatgtgtcatcactgaggttttttgctatctgcggactgcaggagggctttgaaccattcgccataaatatgcagaggccagtgaccacctggtttagcaaaggactgcctcagttcgaaccagtgccactggagcatccgcattatgaggtatcacgggtggacggaaccgtagacactccgccgtgccttcgcctcacgcaccgcacgtgggggagtcagaacagtctggtggagatgctgtttctcagattgagtttacctgttcaattccaccaacatttccgatgcaccgccggcgccacccctcttgctcctcctggccttcagcctcctgctgaggacgaagcaagagccgcagagcctgacccagattatgagaacctgagaaggagcgccggcggatggagcgaagcagaaaatggcaaagagggcacggctaaagaaggggcccctggcggtactccccaggccggcggggaagcacagccagccagagctgagaacgaaaaggatgccactacagagaagaataagaaacgcggatttctgtttaaggctaaaaaggtcgctatgatgactcaaccacctgccactcctaccctgccacggctgccccacgatgtggtgcccgccgacaaccgcgatgacccagaaataattcttaacactaccacttattactactccgtccgggtcttcgcagggcaggagccgtcctgcgtctgggctggctgggtaacccccgattaccaccagcatgatatgtcatttgacctgagcaaggttcgggtcgtgaccgtaaccatgggggacgagcagggcaatgtgcacagtagcctaaagtgtagcaattgctatatggtgtggggcggggactttgtgtctcccggtcagcaaggccggatttctcacacagatctggtgatcggctgtcttgtcgacctcgccacaggactaatgacttttaccgccaacggtaaggaatccaatacgttcttccaggtcgaaccaaacacaaaactgttcccagccgtgtttgtccttccaacccaccagaacgttattcagttcgaactcggtaaacagaagaatatcatgcccctaagtgcagccatgttccaatcggagcggaagaacccagccccccaatgccccccaaggctggagatgcagatgctgatgcctgtgagctggagccggatgcccaatcacttcctccaagttgaaacacgtagggctggggagaggttgggctgggccgtgcaatgtcaggagcccctcactatgatggccctgcatattcctgaggagaaccgatgcatggacatcctggagctgtcagaacggcttgatcttcagagatttcattctcacactctgcggctgtatcgtgcagtctgcgcactgggcaataatcgcgtcgctcacgcgctgtgttctcacgtggaccaagcccagcttctacatgccctggaggatgcccatctacccggccctctgagagcgggctactacgatctactgatctccatacacctggagtccgcttgtcgctcgcgcaggagcatgctgagtgagtacatagtcccccttactcctgagacacgggctatcacactgtttcctcctggacggtccactgagaacggccacccacgccatgggctgcccggggtgggcgtaaccactagcctccgccctccacatcatttttcacctccctgttttgtagcagcacttcccgccgcgggcgctgccgaggcgcccgccaggctgagccctgcgatacctctcgaggcactgcgggacaaagctctgcgcatgctgggggaggcagtgagggacggggggcagcatgcaagagacccggtggggggctccgtggagttccagtttgtacccgtgttgaaactggtctccacgttgctggtcatgggtattttcggcgacgaggacgtcaagcagatccttaagatgatcgagccagaggtcttcactgaagaggaggaggaggaagatgaagaagaagagggggaagaggaggacgaagaagagaaagaagaagatgaggaggaaaccgcccaggaaaaggaggacgaagaaaaagaagaagaagaagctgctgaaggagagaaggaagaaggcttggaggagggtctgctccaaatgaagctgccagagagcgtgaagctgcagatgtgtcacctgctggagtacttctgtgaccaggagctgcagcacagagtcgagagtctagccgcttttgctgaacgatacgtggacaaactccaggccaaccagcgcagcaggtacggactattgatcaaggctttttccatgaccgccgcggagactgctcgcaggactagagaatttagatcaccacctcaagaacaaatcaatatgctgttgcagttcaaggacggcaccgatgaagaggactgtccactcccagaggagatacggcaggatctgctcgattttcatcaggatctactagctcattgtggcatccaactcgatggggaagaagaagaaccagaagaggaaactacactgggcagccggttgatgtcactgctcgaaaaagtgcgactcgtgaagaagaaagaagaaaagccagaagaagagcgctcagctgaagagtccaagccccgcagcctgcaggaattagtctcccacatggtagttcgttgggcccaggaggactttgtccagtctccggagttggtgcgtgctatgttcagcctgctgcaccgccagtatgatggactcggcgaactactccgagcactgccccgcgcttacaccatttccccatccagcgtggaagacactatgtccctgctggaatgcctgggccaaatcaggtcacttctgattgtacagatgggccctcaggaggaaaatcttatgatccagagtattgggaacatcatgaataataaggtattctatcagcatccgaacctgatgcgtgctctggggatgcatgaaaccgtcatggaggttatggtcaatgtgctggggggcggagagtccaaagagatcagatttccaaaaatggttactagttgttgcagattcctgtgttacttttgcagaatatcaagacagaatcagaggtcgatgttcgaccatctcagttaccttctggagaactcaggaatcggtctcggtatgcaaggctcaaccccacttgacgtggctgcggctagtgtgatcgataacaatgaacttgcactagctctccaggagcaagacctggagaaggttgtgtcatacttggccggatgcggcctgcagtcctgcccaatgctcgtcgctaagggttacccggatatcggctggaacccttgcggaggggagagatacttagatttcttacgtttcgcggttttcgtgaatggcgagtcggtcgaagagaacgcaaacgtagtagtgaggctccttatcaggaagcccgaatgcttcggtcctgccctcaggggagagggaggctctgggcttcttgccgccattgaggaagcaattcgaatttccgaggatcctgctagggatggaccaggtattagacgagaccggcgcagagagcatttcggagaggagccaccagaggagaacagggtacatttaggacacgctatcatgtcattttacgctgcactgatagacctactaggcaggtgtgcccccgagatgcaccttatccaggctgggaagggcgaggccctccgtatccgcgctatcttgaggtcactggtcccattagaagatttggtgggcattattagcttgcccctgcaaatccctactctaggtaaagacggcgccctggtgcagcctaaaatgagtgcaagtttcgtgccagaccataaggctagcatggtgctcttcctggatcgggtctatggaatcgaaaaccaagacttcttgctccatgtcctcgatgtggggtttctgccagatatgcgggcagctgcatcactcgacaccgctaccttctcaacgacagaaatggcgttggcgctgaatcgctacctgtgtctcgctgtgttgccactcatcaccaaatgtgcaccccttttcgctgggaccgagcatcgggctattatggtggactctatgctccacaccgtgtaccggctgtcccggggcaggtctctcacgaaagcccagcgggacgtgatcgaagattgcctgatgagcctgtgtcgctacattcgcccatcgatgctacagcatctgctccggcggctggtgttcgacgtgccaatactcaatgaattcgccaagatgcctctgaagctcctcactaatcattacgaacgctgttggaagtattattgtctccccaccggctgggccaatttcggagttactagcgaagaggagcttcacctgaccaggaagctgttctggggaatcttcgatagcctggcccacaagaagtatgatccagagctatatagaatggctatgccgtgcctgtgtgcaatcgccggcgccttacctcctgactacgtagatgcctcctactcaagcaaagccgaaaagaaagctacagtggatgccgagggcaatttcgacccaaggcctgtagagacacttaatgtgattattcctgagaaactggactcttttattaacaaatttgctgagtatactcacgaaaagtgggcttttgacaagatccagaataactggagttatggagagaacattgatgaggaacttaagactcaccccatgttacggccatacaaaacattttccgaaaaggacaaagagatttatcggtggcccattaaagagagcctgaaagccatgatagcgtgggagtggacaatcgagaaagctagagaaggcgaggaagaaaagaccgagaagaaaaagacaagaaagatcagccagagtgcgcagacctacgacccacgggagggatataatccccagccaccagacctgtcagcagtaacattgtctagggaattgcaagcgatggccgagcaactcgccgaaaactatcataatacctggggacggaagaagaagcaggaactggaagcaaagggaggaggaacacaccctctcctcgtaccatacgatacccttaccgctaaggagaaggcccgggacagggaaaaggcacaggaactgctaaagtttctacagatgaatggttatgctgttacccgagggttaaaagacatggagctcgattcctcctcaattgaaaaacgttttgcatttgggttcctacaacagctgcttcgctggatggacataagccaggagtttatcgcacatctggaggctgtggtgtctagcgggagggtcgagaagtcaccacatgaacaggagataaagttttttgcgaagatcctgctgccacttatcaaccagtattttactaatcattgtctgtacttcctgtcaacacccgccaaagtcctggggagtggcggtcacgcatcaaacaaagaaaaggagatgattacctcccttttttgcaagctggccgcgctggttcgtcacagagtctcgctgtttgggaccgatgctcccgctgtggttaattgtctgcatatactcgcccgatcactggatgcccggacagtcatgaagagcggccctgagatcgttaaagccggtttacgcagtttttttgagagtgcatccgaggacattgagaaaatggtggaaaacctgaggcttggcaaagtgtcacaggcccgcacccaggtgaagggagtcggacagaatctcacctatacaacagtggctctgctacctgtcctgacaactctgtttcagcacatcgctcagcatcaattcggagacgacgtgattcttgacgacgtgcaagtctcgtgttaccgcacgctttgctccatctattcactgggaaccaccaagaatacctatgtcgagaaacttcgcccggctctgggagagtgtctggcgaggctggccgctgcaatgcccgtagctttcttggagcctcaacttaatgaatacaacgcatgcagcgtttacacaacgaaatcacccagagaacgggctatacttgggcttcctaacagtgtcgaggagatgtgtccagatataccggtcctagagagacttatggccgacatcggtggcctggccgagtcaggcgcgcggtatactgaaatgccccacgtcattgaaattactctgcccatgctatgttcctacctgccgcgttggtgggaaagagggcctgaagccccaccctcggcactgcccgctggagcgcctcccccttgtacagcagtgacttccgaccatctcaatagcctgcttgggaatatcctccggattattgtgaataacctgggtatcgacgaggcttcctggatgaaacgcctagcagtcttcgcacagccaattgtgtcaagagcccgcccagaacttctgcaaagccattttattccaacaattggcaggttgcgcaagagggccgggaaggtggtgtctgaggaggaacagttaaggctggaggctaaggcagaggcccaggaaggcgaactccttgtcagagatgagtttagcgtcctgtgtagagatttatacgcgttatatcccttactgataaggtatgtcgacaacaatcgggcccagtggttgaccgaacccaacccctcggcagaagaacttttcaggatggtgggggaaatctttatatactggtcaaagagccacaacttcaagagagaagaacagaattttgtcgtccaaaatgagattaacaacatgagcttcctgaccgcagacaataagtctaagatggccaaagcaggtgacatccagagtggaggcagtgatcaggagcgcactaagaaaaaacgccgcggagataggtacagcgtccagactagtctcattgtcgctacattgaagaagatgctccctattggcctgaacatgtgtgcccctaccgaccaagatttaataactctggctaagacacgttacgccttgaaggacactgacgaggaggttagagagttcttgcacaataacttacaccttcagggcaaagttgaaggatccccttcactgcgctggcagatggccctctatagaggcgtgccaggacgcgaagaggacgccgacgatccggagaagatagtaaggagagtgcaggaggtatcggctgtgctttattacctggaccagacagagcacccttataaatcgaaaaaggctgtctggcataagctgttatcgaaacagagacgaagagccgtagttgcctgcttcagaatgacaccactctataatttaccgacccacagagcctgcaacatgttcttagaatcctacaaagctgcgtggatcctgaccgaagaccactcttttgaggacaggatgatcgatgacctctctaaggctggcgaacaggaggaagaggaggaagaagtcgaggagaaaaagcctgatccactgcatcagctagtgctgcatttctcgcgtactgcactcaccgagaaatctaagctggacgaagactatttatacatggcctatgcagatattatggccaaatcctgccatctggaagaggggggagaaaatggggaggctgaggaagaagtcgaggttagcttcgaagaaaagcaaatggagaaacagagactgctctatcaacaggcccggctgcatacacggggtgctgcggagatggtccttcagatgatctccgcctgtaagggggagacgggggccatggtgagttctaccctgaagctgggcatcagcattctaaacggcggtaacgcagaggttcaacaaaagatgttggattatctgaaggataagaaggaggtgggttttttccaatcgattcaggctctgatgcagacctgcagcgtgctggacctcaatgccttcgagcgtcagaacaaggccgaaggcctgggaatggttaacgaggatggcactgtaggagaaaaggtcatggccgacgacgaatttacccaggacctgtttaggtttcttcagctcctctgcgaaggccacaacaacgactttcagaattacctgagaactcagacgggaaatactacgacaataaacataatcatatgtacagtggattatttgcttaggttgcaagaatctatctctgacttctactggtattatagcggcaaagacgtgatcgaggaacagggaaagcggaatttttccaaggcaatgtccgtggctaagcaagtctttaactctctcacagaatatatccagggcccatgcacagggaaccagcagagccttgcacattcacggctctgggatgctgtggttgggtttcttcacgttttcgcccacatgatgatgaaactggcacaggacagttctcaaattgagcttctcaaggagctgctggatctgcagaaggatatggttgtcatgctcttgagcttactggaaggtaacgtggtgaatggcatgatagcgcgacagatggtagacatgctggtcgagtcaagtagcaacgtagagatgatcctgaagttttttgatatgttcttaaaactgaaggatatagtgggtagtgaggcctttcaggattatgtgacagatccacgcggcctcatttctaagaaagacttccaaaaggctatggatagtcagaagcagttctctgggcccgaaatccagttcctactcagctgctcagaggcggatgagaacgaaatgatcaactgtgaggaattcgcgaatagatttcaggaaccggctagagatattggttttaatgtcgccgtcttgctcacaaacctttctgagcacgtcccgcacgatccacgactccataattttctggagctggcggagtctatacttgaatatttcagaccttacctgggccgaattgagattatgggcgcgagtagaagaattgaacgcatttattttgaaatctctgagacaaatcgggcccagtgggagatgccccaggtgaaagagtccaagaggcaatttatttttgacgtggttaacgaggggggggaggccgaaaaaatggagctgttcgtgtccttctgtgaggataccattttcgagatgcagattgcagctcagatcagcgagccagagggagaacctgaaactgacgaagatgaaggagccggggcagccgaagcgggtgctgaaggggccgaagagggtgcggccggattagagggaaccgctgctactgcggccgccggagctacggcacgggtggtagctgcggccggccgtgcattgcggggcctgtcttaccgctcgctgcgaaggagggttcgccgattgaggcgactcaccgcgagggaagcagctaccgctgtggccgctcttctgtgggccgccgtgacccgagccggcgcagcaggagcgggcgcggccgccggagccctgggactgttgtggggcagtctctttggtggcggtttggtcgaaggtgcaaaaaaggtaacagtgacggagttacttgcaggtatgccagaccccacctctgacgaagtccacggagaacagccagctggcccggggggcgatgccgatggagagggggcatctgaaggtgctggtgacgctgcagaaggcgccggcgacgaagaagaggccgtgcacgaggccggtccaggaggcgccgacggggccgttgccgtcacggatggaggcccatttagacccgagggagccggaggactcggggatatgggcgacacaactcccgccgaaccccctaccccagagggctccccaatcttgaaacgcaagttgggggtagacggagtagaagaagagctgcctccagagccagaacccgagccggagccggagctggaaccggaaaaggcggatgcagaaaacggcgagaaagaggaagtgcccgagcccacacccgaacctccgaaaaagcaagcgcctccgtctcctccacctaaaaaggaggaggccggaggtgagttttggggcgaactggaggtgcagcgcgtgaagttcctgaactatctgtccagaaacttttataccttgcggtttcttgcactcttcctggctttcgccatcaacttcatccttctgttctacaaagtctccgattcccctccaggcgaggacgatatggagggctcagctgctggagacgtctctggggccgggtccggcggaagttccggctggggcctgggcgccggcgaggaggctgagggagacgaggacgaaaacatggtctattatttccttgaagagtcaacggggtatatggagcccgccctccgttgtctgtcacttctccacaccctggtcgcattcctctgcattattggttacaattgcctgaaagtgccactggtcatcttcaaacgagagaaggagctggctcgcaaacttgaattcgacggcttgtacattaccgaacaaccagaagatgatgacgtaaaaggccagtgggacaggctggtcctcaacactcccagcttcccctcaaattattgggacaaatttgttaagagaaaagtgcttgataagcatggcgacatttatggtagagagaggatcgctgagctgttgggcatggacttggccacactggagatcacagcacacaatgagcgaaaaccgaacccccctccaggactactgacctggctgatgagcatagacgtaaagtatcagatctggaagtttggagtgatcttcaccgacaactccttcctgtacctgggatggtatatggtgatgtcactattgggacactacaataatttttttttcgctgctcatctgcttgacatcgccatgggtgtgaagacactaaggactatactctcatccgtgacccataacggaaaacagctggttatgaccgtcggtctgctggctgtggtcgtgtatctttacaccgtggttgcgttcaacttttttcggaaattctacaacaaatccgaagatgaagatgaacctgatatgaagtgcgatgacatgatgacatgctacctgttccacatgtatgtgggggtaagggctggagggggtatcggtgacgagatcgaagatccagctggcgacgagtacgagctttaccgcgtagtctttgacatcacgtttttttttttcgttattgtaattcttctggcaatcattcaaggccttattatcgacgcattcggcgaactgagggaccaacaggaacaggtcaaagaggacatggagacgaagtgtttcatttgcggtatcggatccgactacttcgacacaaccccgcacgggtttgagactcacactctggaggaacacaatctggccaattacatgttcttcttaatgtacctcattaataaggatgagacagagcataccggccaggagagctacgtatggaaaatgtatcaggagcggtgttgggacttttttccagcaggagactgctttaggaagcagtacgaagaccagctgtcgtag

SEQ ID NO: 204104 - DNA, 2031 bp, synthetic construct
  misc_feature 1..2031: note = Description of Artificial Sequence: Synthetic coding sequence
  source 1..2031: mol_type = other DNA
atgaagagcggccccgagatcgtgaaggccggcctgcggagcttcttcgaaagtgctagcgaggatatcgagaagatggtggagaatctgcgcctcggcaaggtttcacaagcaaggactcaggtgaagggcgtgggacaaaacttgacttacacaacggtagcccttttgcctgtcctgacaacactctttcaacatatcgcccagcaccagttcggggacgacgtcatccttgacgatgtgcaggtctcctgttaccgcactctctgcagtatctactctttaggaacaactaaaaatacatatgtcgagaagttaagacctgcactaggtgaatgtttagcacggcttgcggcagccatgccagttgcctttctggaaccccagctgaacgagtacaacgcatgtagtgtctacactacaaagtctccccgcgagcgcgcaatcctgggccttcccaattccgttgaggaaatgtgccccgatatcccagtgctcgagagattaatggccgatatcggtgggctggcggagagcggagcacggtacacagaaatgccacacgtcatcgagattaccttgcccatgctctgttcttacctccctaggtggtgggagcgcggccccgaggcacccccatcagcactgccagccggtgcacctccaccctgtacagcagtcacatcggaccatttgaattcactcctagggaatatcctgagaattattgtcaataacctcggcatcgatgaagcctcatggatgaaacgattggctgtgttcgcccagccaattgtgtcccgagctcggcctgaacttttacagtcacacttcatccccactatcggccgtctgcgaaaaagggctggcaaggttgtctctgaggaagagcaactgcgcctggaagccaaagctgaggcccaagagggagaattactcgtgagggacgagttcagtgtgctgtgccgggatctctatgccctctacccacttctgataagatatgtggataacaatagagcacagtggttaaccgaacctaatccgtcagccgaagaattgttcaggatggtcggtgagatcttcatatattggtctaagtctcacaactttaaacgggaggaacagaactttgttgtgcagaatgagattaataacatgagtttccttaccgctgataataaatctaagatggccaaagcaggggatatccagtccggcggctccgatcaggaaagaaccaaaaaaaaacgccgtggggatcgctattccgtacagacctctttgattgtcgcaacgcttaagaagatgctgcccatcggactgaacatgtgcgctcctaccgatcaggatctcattacactcgccaaaacccgatatgccctaaaggatacggatgaggaagtccgggagttccttcacaataacctgcacctgcagggaaaggtggaagggagtcccagcctgagatggcagatggccctgtaccgaggcgtgccaggccgggaggaggacgccgatgaccctgaaaaaatcgtccggagggtgcaggaggtgtctgccgttctctactacctcgatcagacagaacacccgtacaagtccaagaaggccgtgtggcacaagttgctctccaagcagcgacgaagagctgtcgttgcctgtttccgaatgaccccactttataacctccccacacatcgggcatgcaacatgtttcttgagtcttataaggcagcttggatacttaccgaagatcacagctttgaagacagaatgatcgatgatctgagcaaggccggggaacaagaagaagaggaggaggaggttgaggagaagaagcccgaccccctccatcagcttgtgcttcacttttctcggacagcgctgactgagaaatctaagttggacgaagattacctttacatggcctacgccgacattatggccaaatcttgccatcttgaagaaggtggtgaaaatggcgaggctgaagaggaagtggaggtctccttcgaggaaaagcaatag

SEQ ID NO: 204105 - DNA, 14922 bp, synthetic construct
  misc_feature 1..14922: note = Description of Artificial Sequence: Synthetic coding sequence
  source 1..14922: mol_type = other DNA
ctgggcccccggagcagcagcaacaagctgagcaacaagaagatgatgaagtggttctgctctgccccacagccatcaactaaaaacaataggtcttacgcttggcagcagaaagacctggccaccgattttgtttcttggtccccgctgccgatccctcgaatgtgtccccaaacctcaccctctgctccgttatgctggagctcgccttctctgagtggtcgatgcaggcgatgttggctgaccccttggcgaaatcagaaaggacagttagacatcatcaagtggtcttttgggctgaaaacagcacaggggggcggccatcggaccctcttgtacggacacgccattcttctgcgccactcttacagtgggatgtacctgtgttgcctgagcacgagccgctcgagtactgataagctggcatttgatgttggtctgcaggaagacactaccggagaagcatgctggtggacgattcacccagccagcaaacagagatccgagggcgaaaaggtcagggttggagacgacctgattctggtgagtgtatcttcagagagatatcttcatctttcctatggtaacggaagtcttcacgtggacgcggcattccaacagactctgtggtccgtggcacctatatcttcaggcagtgaagcagcgcagggatatttaatcggcggcgatgtattgcggttgctgcatggccatatggatgagtgtctgacagtgcccagtggagagcacggggaggagcagaggagaaccgttcattatgagggaggcgcggtaagcgtacacgccagatccctgtggcggctggaaacccttcgagttgcctggtcaggcagtcacattagatggggccaaccgttcaggcttcgccacgtgaccacagggaagtacctctctctgatggaagataagaacttgctgctgatggataaggagaaagctgacgtgaagtctaccgcatttacattcagatccagcaaggagaagctggacgttggcgtgaggaaagaggtagatggcatgggcacatctgagatcaaatacggcgattccgtgtgttatattcagcacgtcgacacaggactgtggcttacttaccagtctgtggacgtcaagagtgttagaatgggatcgatccagcggaaagcgatcatgcaccatgagggccatatggatgacgggatatccctttctcggagccagcacgaagaaagccgcacggctcgggttataaggagtacagtctttttgtttaaccgctttatccgcggcctagatgccctatccaagaaagccaaagccagcaccgtggacctgcccatcgaatcagtatctctgtcactgcaggaccttattgggtacttccatccgccggacgaacatttggaacacgaagacaaacagaatcggcttcgcgctttgaagaacaggcagaatttgttccaagaagagggaatgattaacctcgtgctcgagtgcatcgatagactgcacgtgtattctagcgcagcacactttgccgacgtggccggacgtgaagcaggggaatcttggaaaagcatcttgaatagcttgtatgagctgcttgcggctttgataagaggcaatcggaagaattgtgcacagttctctggtagcttggactggctgatctctcgcctagaacggctggaggcttcttccgggatcctggaagtgctgcactgtgtcttggtggaaagcccggaggctctgaacattattaaagaggggcacatcaagagcatcatctccctccttgacaagcatggccgtaatcacaaagtcctggatgtcctgtgttccctctgcgtttgtcacggagtggcagttcgatcaaatcagcatttaatctgcgacaacctgctgcccggccgcgacctcctgctgcagactcgcctcgtgaatcacgtctcctcgatgagacctaatattttcctcggcgtgtctgagggcagcgctcagtataaaaagtggtattatgagcttatggtggatcacactgagcccttcgtgacagccgaggccacccacctgcgggttggctgggctagcaccgaggggtattccccctacccagggggtggagaagaatggggcggaaacggggtaggggatgacctgttctcctacggatttgacgggctccacctctggagcggatgcatcgcacgtactgtttcatctccgaatcagcacctgctcagaacagatgatgtaatctcttgctgcctggacctctcagctccgagcatctctttcaggattaacgggcagccggtgcagggaatgttcgagaacttcaatatagacgggctgtttttcccagtggtgagctttagcgccggcatcaaagtgcggttcttattagggggccgccacggagaatttaagtttctgcctcccccgggctatgctccctgttacgaagcagttcttcccaaggagaaactgaaggttgagcacagccgagagtacaagcaggagcggacctacacccgggatctattgggcccgactgtgtcccttacacaggccgccttcacaccgattcctgtggacactagccagatagtactaccccctcacttagagagaatccgcgaaaagttagcagagaacattcacgaactttgggtgatgaacaagatcgaattgggatggcagtacgggccagtgcgagacgacaataagaggcaacacccatgtttggtcgaattctccaaactgcctgagcaggagcgtaattataatttacagatgagcctggagacattgaagacactgcttgccctgggttgtcatgtcggtatctccgatgaacacgccgaagacaaagtgaaaaagatgaaactccccaagaactatcagctgactagcggatataagcctgcccctatggatctcagctttatcaaacttactcctagccaagaagccatggttgataagctcgccgagaatgcacacaatgtgtgggcccgcgacaggatccggcagggttggacatacgggatccaacaagatgtcaaaaaccgaagaaaccctcgtcttgtaccgtataccttactcgacgaccgtacaaaaaaatccaacaaggattcgctccgcgaggctgttcgcaccttgcttgggtacgggtacaatctcgaagccccagatcaggaccatgctgcccgggctgaagtgtgttcaggcaccggagaaaggttccgtatattcagagctgagaaaacatatgccgttaaggccggcaggtggtactttgagttcgagacggtcaccgccggcgatatgcgtgtgggctggagcagacccggatgtcagccggaccaggagctgggatctgatgaaagggcctttgcttttgacggctttaaggcacaacgctggcaccagggaaatgagcactacgggcggtcgtggcaagcaggcgacgtggtcgggtgcatggtcgacatgaacgaacataccatgatgttcaccctgaatggcgagatactccttgacgattccggcagcgaactggccttcaaggatttcgacgttggagatgggtttattcctgtttgttcgctgggagtggcccaggtagggagaatgaattttgggaaagacgtctctactctaaagtactttacaatctgtggactgcaggagggctacgagccttttgccgttaataccaaccgggacattaccatgtggttgagcaaacgattgccccagttcctgcaagtgccaagcaatcatgaacacatagaggtgactcgcattgacggcacgatcgacagtagcccctgtctgaaggtaacgcagaagtcatttggatcgcagaattccaacacagacattatgttctaccgcctgagcatgcctatcgagtgcgccgaggtcttttcgaaaactgtggctgggggcctcccaggcgccggcctctttggccccaagaacgacctcgaggactacgatgccgatagcgacttcgaggtcctcatgaaaacagcccacggtcatctcgtgcccgatagagtcgataaggataaggaggctaccaaaccagagttcaacaaccataaggattatgcccaggaaaaacccagccgcttgaagcagaggtttctactgcggcggaccaaaccggactatagtactagtcattctgctcgactgactgaagacgttcttgctgacgacagggacgattatgacttcctgatgcaaacatccacttactattactcggttaggatctttcccgggcaggagccagccaatgtgtgggtgggttggataacaagcgattttcaccagtacgacactggcttcgacctcgatcgcgtcagaacagtgacagttacactcggagacgagaaggggaaagtgcacgagtccatcaaacgctctaattgttacatggtgtgtgcaggtgagagcatgtcacctggacagggacgtaataacaatggcctggaaatcggatgcgttgtggacgcagcctcgggtcttttaacatttatagcaaacggcaaggagctcagtacctattaccaggtggagccgagcacaaagctgttcccagcggtgttcgcacaagccacttcacctaatgttttccagttcgagttgggtaggattaagaacgtcatgccactgagtgctgggctgtttaagagcgagcataagaacccggtcccccagtgccccccccggctacatgtgcagttcctgtcacacgttctttggagtcggatgcctaatcagttcctaaaagtggacgtatcaagaatcagcgagcggcaggggtggttagtgcagtgccttgacccactgcagttcatgagcctgcatatcccagaggagaaccggagtgtggatattcttgaactgacggaacaagaggagctcttgaaatttcattatcacacactgaggctgtatagcgctgtgtgtgctctggggaaccaccgggttgctcacgcactgtgcagtcatgtagacgagccacagctgctctatgccattgaaaacaagtacatgcctgggctgctgagagctggctattacgacctactaatcgatattcatttgtcttcctatgcaactgcaagactgatgatgaacaatgagtatatcgttccaatgacagaggagacgaaatccatcaccctgttccctgatgagaataagaagcacggactgcccgggataggtctctccacaagtctgcgcccacgaatgcagttctcctctccatccttcgtctccatctctaatgagtgctaccagtatagccccgagtttccactggatattctcaaaagtaagaccatccagatgctaactgaagcagtaaaggagggcagtctccacgctcgtgatcccgtgggaggcactacggagtttttatttgtacctttgattaagctattctacaccctgctaatcatggggatttttcataatgaggacttgaaacatattctgcagttgattgaaccttccgtattcaaggaagcagccacacctgaggaagagtctgacaccctggagaaagaactgtcagtagacgatgccaaacttcagggagctggggaagaagaagccaaaggaggtaagcggccaaaagaggggctgctccagatgaaactgcccgagccagtgaagctgcagatgtgcctgctcctccagtacctgtgtgattgtcaggttcgtcaccgcattgaagcaatcgtcgcatttagcgacgattttgtggctaagctacaggataaccagcggtttcggtataacgaggtgatgcaggcactgaacatgtccgcagcactgacagcccgcaagacaaaagagtttagaagcccaccgcaggagcagataaatatgctgctcaactttaaggacgataaaagcgaatgcccatgccccgaggaaatcagagatcaactgctcgactttcacgaagatttaatgactcattgtggaatcgagcttgatgaagatggatctttggacgggaacagtgatcttactatccgagggcgtctcttgtctcttgttgaaaaggtgacatacttgaagaagaagcaggctgagaagcccgtggagtcagactctaaaaagtctagcaccttacagcagctgattagcgagacaatggtcagatgggctcaggaatccgttatcgaagatcctgaactggtgagggccatgttcgtactgttacaccgccagtatgacggcattggcgggcttgtccgggctctgcccaaaacgtatacaatcaatggggtcagcgtcgaagatactattaaccttttggctagcctggggcagatacgtagccttctgtctgtgcgcatgggaaaggaggaagagaagctgatgatcagggggctaggcgatataatgaataataaggtgttttaccagcatccaaatctgatgagagccctcggcatgcatgaaactgtgatggaggtcatggtgaacgtgctgggaggaggtgagagcaaggaaatcaccttcccaaagatggtggccaactgttgtcgttttttgtgttatttttgccgtatctctagacagaatcagaaggcgatgttcgatcacctttcttacctgttggaaaattctagcgtgggcctggcttcaccagctatgagagggagtaccccattggacgttgccgccgctagcgtgatggataataatgagctcgccttggccctgagagagccagacctggaaaaggttgtgaggtatttggccggatgtggattacagtcctgtcaaatgcttgtaagcaagggatacccagacattggctggaaccccgtggagggtgagcgttatttggattttctgcgctttgccgtcttttgcaatggagagtcggtggaagaaaatgctaacgtggtagtgcgcttgctcattcgaagaccagagtgtttcggacctgcactgagaggcgagggagggaacggcctcttggctgctatggaggaggctattaagattgctgaagacccttctagggatggtccgtcacccaacagcggctcctcaaaaacactggataccgaggaggaggaagacgacacgatccacatgggaaacgcaatcatgacgttctatagcgccttgatagacctgctcggaagatgcgcgcccgagatgcaccttattcacgcgggcaagggcgaagccatcaggattagaagcatcctgcggtctctcatacccctcggcgacctggttggggtcatctccatagctttccagatgcccacaatcgcaaaggacggtaatgtggtcgaacccgacatgtccgcggggttttgtcctgaccataaggccgccatggtccttttcttagaccgagtctacggaatagaggtccaggacttcctgctgcacttgctggaggtgggattccttcctgatttacgggcagctgcctccctcgataccgcagctctaagcgcaaccgacatggccctggccctgaatagatatctgtgtaccgctgtcctgcccctactaacacggtgtgcacctctgttcgccggaaccgaacaccacgccagcctgattgacagtctgctgcacacagtatatagactgtcaaagggctgcagtctcacaaaagctcaacgagatagtatcgaagtttgcttgctgagtatttgcggtcagctgcggccctcaatgatgcagcacctgcttagacggctagtctttgacgtgccccttttgaatgaacacgccaagatgcctcttaagcttctgacaaaccattacgagcgctgttggaaatactattgtctccctgggggatggggcaacttcggagcagcttcagaagaggagctgcatctcagcagaaagctattctggggaatatttgacgcactctcgcagaagaagtacgagcaggagctctttaagctggcccttccatgcctcagcgctgtagcaggggctctgccaccagattacatggagtcgaactacgtgagtatgatggagaagcagagcagcatggattccgagggcaattttaatccgcaacctgtggatactagtaacataaccatacccgagaagctggaatattttattaataagtatgccgagcactcccacgataaatggagtatggacaagctcgcaaacggatggatctatggcgaaatctacagtgactcgagcaaggtgcagccacttatgaagccttataaactgttatcagagaaggaaaaggagatatatagatggcccattaaagaatcattaaagactatgctcgcgtgggggtggagaatcgagcgaacccgagagggagactctatggctctgtataatagaaccaggaggatttcacagacctcacaggtgagcgtggatgccgctcatgggtattctccgagggcaatagacatgtccaacgtgacactgagtagggacctccacgcaatggcagagatgatggccgagaattaccataacatttgggccaagaagaagaaaatggagctggaatccaaaggtggcggcaatcatcccctgttagtgccatatgacactcttactgcaaaggaaaaagctaaggatcgcgaaaaggcacaggatattttaaaatttttgcagatcaatggctatgcggtttcaagggggttcaaagacctggagctggatacaccgtcgatcgagaagaggttcgcttacagctttctgcaacaattaattcgttacgtcgatgaggctcaccagtatatcttggaatttgacgggggctccagaggaaagggcgagcacttcccatacgagcaagagatcaaattttttgcgaaagttgtcctgcccttaattgaccaatactttaaaaatcaccggctctatttcttgtccgccgcctccaggccactctgcagtggtggacacgcaagcaacaaggaaaaggagatggtgacttcccttttttgtaaactgggggttctggtgcgccaccgaatctcattgttcggtaacgatgccacctccatcgtgaattgtctgcatatcctgggccagacactggatgccagaaccgtgatgaaaacgggactggagtctgtcaagtcggcactccgcgccttcctagacaacgctgccgaggatttggagaaaactatggagaatctcaagcaaggacagttcacccacacacgcaatcaaccgaagggagtaactcaaattatcaattataccacggtggcgcttcttcctatgctcagcagcctgtttgagcatattggtcagcatcagtttggggaggacctgatcctggaagatgttcaggttagctgctataggattctgactagcctttatgctctgggaaccagcaaatccatttacgtggagcgacagcgcagcgctctcggcgagtgcctggccgcttttgccggtgctttcccggtggcttttctggagacccaccttgataagcataatatttacagtatctataacaccaagtcctccagagaacgcgctgcactgagccttccaaccaacgtggaagacgtgtgtcctaacatcccatctctcgagaaactgatggaggagatagtcgagttggcggaatcaggcattcggtatacgcagatgcctcacgtgatggaggtcatcctgcccatgctgtgtagttacatgagcagatggtgggagcacggacccgaaaataacccagagcgtgctgaaatgtgttgtaccgctctgaactccgagcacatgaatactcttttggggaacatcttgaagattatctacaataacctgggcatcgatgagggcgcttggatgaaacggttggcggtgttttcacagcccattattaataaggtgaagcctcagctcctgaaaacgcatttcctcccgctgatggaaaaactgaaaaagaaggctgctactgtggtgtctgaggaagaccacctgaaggcagaggcaagaggcgacatgagtgaggcagagcttttgatcctggatgaattcacaactctagcacgcgatctctacgcattctatcctctcctgatcaggtttgtggattataacagagcaaaatggttaaaggagcccaacccagaggcagaggaactcttcaggatggttgccgaagtctttatctactggtccaaaagccataatttcaagcgggaggaacagaacttcgtggtccagaacgagattaataacatgtccttcctgatcacagataccaagtctaaaatgtctaaggccgccgtgtccgatcaggagcgaaagaagatgaagaggaaaggagatcggtactccatgcagacatctctgatcgtcgctgccttgaagcggctgttaccgattggtctgaatatatgcgctcccggtgatcaggaactgatagccttggccaaaaataggttctctctgaaggacaccgaggatgaggtgcgggacatcattcggtctaacatacatctccaaggcaagctggaagaccctgccatccggtggcagatggcgctatataaagatctgccgaatcgaacagacgacacgagcgatccagagaagacagtcgaacgggtcctagatatagccaatgttctatttcatctggagcagaaatccaaaagagttggcaggcggcattattgtcttgtggagcacccacagcggtctaagaaggcagtctggcacaagctcctgtccaagcagcggaaacgggcagttgtggcttgtttcagaatggctcctttatataatcttcctagacaccgtgctgtcaacctgttcctccagggctatgagaagagctggatcgagaccgaagaacattatttcgaagacaaactaattgaggatctcgccaagccaggcgcagagccccccgaagaggatgaggggaccaaaagggtggacccactccatcagcttatcctattgttctccaggaccgctttgacagagaagtgcaaactggaagaggactttttgtacatggcttacgcagacatcatggccaaaagctgccacgatgaggaggacgacgatggtgaggaggaggtgaagagcttcgaagtcaccggaagtcagaggtctaaggagaaggaaatggagaagcagaaacttctctatcaacaggctagactccatgaccgaggggctgctgagatggtcctccaaacaatttctgcttcgaagggagaaactggcccaatggtggctgctacgcttaagctgggcattgctatccttaatggcggcaattccacagtgcagcagaaaatgctggattatttaaaagaaaaaaaggacgttgggttctttcagtctctcgctggacttatgcaatcttgttccgtccttgacttgaacgccttcgagcggcagaataaggccgaggggcttggtatggtgacagaagagggcagcggagaaaaggtcctgcaagatgacgagttcacgtgcgacttgttccgcttcctgcagcttttgtgtgagggccataactccgattttcagaattacctgaggacgcagaccggtaacaatacgaccgttaatatcattatctctaccgtggactacttgttgagggtccaagaatccatttcagacttttattggtattatagcggaaaagacgtgatagatgagcagggccagcgtaatttcagcaaagccatccaggtggcgaaacaagtattcaacacgctgacagaatacatacaggggccttgtaccggcaatcagcagagcttagctcacagtcgcctttgggatgctgtggtgggcttcctgcatgtgttcgcccacatgcagatgaagctgtctcaggattcgagccagattgagttactgaaggagctgatggacctgcagaaagatatggtcgtaatgctgctgtcaatgcttgaagggaacgttgttaatgggaccattggcaagcagatggtcgatatgctagtggagtcatccaacaatgtggaaatgatcctcaagttcttcgacatgttcctgaaacttaaggacctcacttccagcgacaccttcaaagaatatgatcctgacggaaaaggggtcatttccaagcgcgactttcacaaagccatggaaagccataagcactacacgcagagcgagacagagtttctgttgtcgtgtgctgaaaccgatgagaacgagacacttgactacgaggagttcgtgaagcggttccacgaacccgcaaaggatatcgggtttaatgtggcagtgctcttgacaaacctgtccgagcatatgccaaacgataccagactgcagaccttcctggagctcgcggaatcggtgctgaactattttcagccatttctgggtagaattgagattatgggctccgccaagcgcatcgagagagtttacttcgagattagtgaatcatctcgcacccagtgggagaagccacaggtcaaagagtccaagaggcaatttattttcgacgtcgtcaatgaaggcggcgagaaagagaagatggagttgttcgtaaatttctgcgaggacaccattttcgagatgcagctggccgcgcaaatctcagaaagtgacctgaatgagagatctgcaaataaagaggaaagcgaaaaagaaagaccagaagagcagggaccacgcatggctttcttcagcattcttactgtccgctccgcgctgtttgcactgagatacaatatcttgactctcatgagaatgctgtctctaaagagtcttaagaaacaaatgaagaaagtaaaaaagatgactgttaaagatatggtgaccgcattcttcagctcttactggagcattttcatgaccctcctgcacttcgtagccagtgtcttcaggggtttctttcgcatcatctgttcccttctgctcggcggcagtctcgtcgaaggggcaaagaagatcaaagtggctgaattgctcgcaaatatgcccgaccccactcaggacgaggtgcggggagatggggaggaaggcgaaagaaagccactggaagccgctttgcctagtgaggatttgacagatctcaaggagttgacggaagagtcagacttgctgtcggacattttcgggctcgacctgaaacgcgagggaggtcagtacaaactaatccctcacaatcctaacgcaggattgagcgacttaatgtcaaatcccgtgcccatgcctgaggtgcaagagaagtttcaggagcagaaggcaaaggaggaagaaaaagaggagaaggaggagaccaagtccgaacccgagaaagccgaaggtgaagatggcgagaaggaagagaaagctaaggaagataagggaaagcaaaagctccgacagcttcacacgcaccgctatggcgagcccgaagtcccagaatccgccttttggaaaaagattatcgcctatcaacagaagttacttaattattttgcccgcaacttctacaacatgaggatgttagctctgtttgtggctttcgcaatcaatttcattctgctattctacaaggtatccacctcaagtgttgtcgaaggcaaggaattgcctacccgctccagtagcgagaatgcgaaggttaccagcctggattcttcttcacatagaatcatcgccgtgcattacgttttggaggaatcttccggctacatggagcctaccctcaggatcctggccatcctgcacactgtaattagtttcttctgtattataggttactattgcctgaaggtccccctggtgatttttaaaagagagaaggaggtggcccgcaaactggagttcgacggcctctacataaccgaacagcccagcgaggacgacatcaaaggacaatgggaccgccttgtcatcaatacgcagagcttcccgaataactattgggacaaattcgttaaaagaaaagtgatggacaaatacggggaattttacggcagggatcgaattagcgagttgttgggaatggacaaagcagccttagattttagtgacgcccgcgagaagaagaaacctaagaaagactcaagcctgtctgcagtgctgaattcaatagacgtgaaataccagatgtggaagttgggcgtcgtgttcaccgacaactcttttttatatcttgcctggtacatgacaatgtccgtgctagggcactacaacaattttttttttgcagcccacttgttggacatcgcaatgggcttcaagacactcaggacaattctatcatccgtcacacacaatggaaaacaactagtgctcaccgtcgggctgcttgctgttgtagtttacctgtatacagttgtggcgttcaactttttcagaaagttctacaataaatcagaagacggcgacactccagacatgaaatgcgatgacatgcttacctgctatatgttccatatgtacgtgggcgtgcgagcagggggggggataggcgatgagatcgaggatcctgcaggcgacgagtacgagatttacaggattatttttgacattactttttttttctttgttattgtgattctgcttgcgattatccaagggctcattattgacgcgttcggggaactgagagatcagcaagagcaagtgaaagaagatatggagacaaagtgcttcatttgcgggataggaaatgactactttgacaccgtacctcatggcttcgaaacccacaccctgcaggaacataacctggcaaattacctattcttccttatgtatctaataaataaggatgaaacagagcacacgggtcaggagagctatgtttggaagatgtaccaagagagatgctgggagttttttcccgcaggagactgtttccgcaaacaatacgaagatcagctcaattag

SEQ ID NO: 204106 - DNA, 14904 bp, synthetic construct
  misc_feature 1..14904: note = Description of Artificial Sequence: Synthetic coding sequence
  source 1..14904: mol_type = other DNA
atggccgacggcggcgagggcgaggacgagatccagttcctgcggaccgacgacgaggtcgtgctccaatgtactgccactatacataaggagcagcagaaactatgtcttgcggcagagggcttcgggaatcggctgtgctttctggagtcaacctctaatagcaagaacgtcccacctgacttgtctatttgcaccttcgttctcgagcagagcctctcggtacgtgcactccaagaaatgcttgctaatacagtggagaaatccgaagggcaagttgatgtggagaaatggaagttcatgatgaagaccgctcagggggggggccatcgcacccttttgtacggccatgctatacttctccgacactcttattccgggatgtacctatgttgcctctccacatcccgctcctcaaccgacaagctggccttcgatgtgggcctgcaagaggacaccaccggcgaagcttgttggtggactattcatcccgcatccaaacagcgctccgaaggagagaaggtccgggtaggagacgaccttatcttggtatccgtctcgtctgagcgatatcttcatctgagttacggcaacggatccctacacgtcgatgcagcgtttcagcagactctctggtctgtggcccccatcagttccgggtcagaggccgcccaggggtacctcatcgggggagatgtattaaggctgctgcacgggcatatggatgagtgtttgaccgtaccctctggtgagcacggcgaggagcaaaggcgaactgtacactatgaaggcggagcagtgtctgtccacgccaggtccctttggagacttgagaccctgcgggttgcttggagcggttctcacatccgttggggccaaccttttcgcctgcggcatgtgacgactggcaagtacctgtccctcatggaggacaagaacctgctgctgatggataaggagaaggcagatgttaagtcaacggcattcactttcagatcatccaaggagaaactcgatgttggggtgagaaaggaggtagacggcatgggcacaagcgagatcaagtacggtgactcagtgtgttacattcaacacgtcgataccggtctgtggctgacatatcagtccgtggacgtaaagtctgtgcgcatgggatccatccaacgaaaagccatcatgcatcatgaggggcatatggacgacggaatttctctaagtaggagccagcacgaagaatcacgaactgcaagagtgatccggagcactgtattccttttcaacaggttcatccgcgggttagacgctttgtcaaaaaaagccaaggcatcaactgtcgatcttcccatagagtcagtgtccttgagcctgcaggacctgatcgggtacttccacccaccggatgaacatttggaacatgaagacaagcagaaccggttacgtgcccttaaaaaccggcagaacttattccaggaagaagggatgattaatcttgtcctcgaatgtatcgaccggctccatgtgtattcatccgctgcccacttcgctgacgtggccggaagggaagccggggagtcgtggaagagcatcctgaactccctgtacgagctcctggcggccctgattcgcggcaaccgcaagaattgtgcccagttctcaggctccctcgattggctgattagtcggctggagagactggaggccagcagcggcattctggaagtcttacattgtgttctagtggagtctcctgaggctctcaacataataaaggagggccatatcaagagtatcatcagtttgcttgacaagcacgggaggaatcacaaagtcctcgacgtactgtgctccctctgtgtgtgtcacggagtagcggtgcggtctaaccagcatctcatctgcgataacctgctcccaggccgcgatttgctcctacaaaccagacttgtcaaccatgtgagtagcatgcggcccaacatcttcctgggagtctctgaaggttcagcacagtacaagaaatggtattatgaattgatggtcgaccacacggagccgttcgtcaccgccgaagccacccacctgcgcgttggttgggcttctaccgagggttatagtccataccctggtggaggggaagaatggggtggcaacggggttggtgacgatctctttagttacggattcgacggactacacctgtggtcaggatgtatcgcacgcaccgtttccagcccaaatcagcatctgctccgcaccgatgacgtcatctcatgttgtctagacctgagtgctccttcgattagctttcgcataaacggacagcctgttcaagggatgttcgagaattttaatatcgacggacttttcttcccagtagtctccttctcggcggggatcaaggtccggtttctccttggggggcgccacggtgagttcaaattcctccctccgcccgggtatgctccatgttacgaagccgtcctgccaaaagaaaaattaaaagtggagcactcccgcgaatacaagcaggagaggacatatacgcgagatctcctcggccccaccgtgtctcttactcaggccgcgtttaccccaatcccagtcgacacatctcaaatcgtgttgcctccgcacctggaacggattcgcgagaagctggccgagaacatacacgagctgtgggtgatgaacaagattgaactaggctggcagtacggtccagtgcgcgatgataacaagcggcagcacccgtgcctggtcgaattttctaaattaccagagcaggaacgtaattataatctgcagatgtcccttgagacactgaagacgctgctagccctcggctgtcatgtgggtatctccgacgaacatgccgaagacaaagtgaaaaagatgaagctgcctaagaattaccagctgacgagtggttataagcctgcccctatggatctgtctttcatcaaactcaccccctctcaggaggccatggtggataagcttgcagagaatgctcataacgtgtgggcccgggatcggatcagacagggatggacctatggcatccagcaggatgttaaaaatcgacgtaatccaagactggtcccctatacccttttggacgaccgcacaaagaagtcaaacaaggacagccttagggaggccgtgagaactttactaggatatggctacaacctggaggctcctgaccaggaccacgcagctcgggctgaagtgtgctctggaacaggggaacggttccgcattttccgggctgagaaaacctacgcagtgaaggctgggcgctggtactttgaatttgagaccgtgaccgccggggacatgcgcgttgggtggtcccgcccaggctgtcagccagatcaggaactgggttccgatgagcgagccttcgccttcgacggcttcaaagcccagcggtggcaccaggggaatgaacattacggcagaagttggcaggccggcgatgttgtgggttgcatggtggacatgaacgaacatactatgatgtttaccctgaacggagagatccttctcgatgattccggctctgaattggccttcaaagatttcgacgtgggtgacggcttcatccccgtgtgcagtctgggggttgctcaagtcggacgcatgaacttcgggaaggatgtgagtaccctgaagtacttcacaatatgtggtctgcaggaagggtacgagccttttgccgtcaataccaacagagacataacaatgtggctcagcaagagacttcctcagttcctgcaggtaccctcaaatcacgaacacatcgaagtgactcgtatagatggtaccatcgattccagcccctgtctgaaggtgacccagaagtcattcggaagccagaatagcaatactgacatcatgttttacaggctgtccatgccaatagagtgtgcggaagtgttttccaagacggtcgccggaggcctgccaggcgccggactcttcggacccaaaaacgatctagaggattatgatgctgacagcgattttgaagtgctcatgaaaacagcccacggccatcttgtgcctgacagagtagataaggacaaggaagccactaaacctgaattcaacaatcacaaggactatgctcaagagaaaccatccagactcaaacaaagattccttctcaggcgtacaaaacctgattattctactagccattccgcgagattgactgaagacgttttagccgacgaccgcgatgactatgattttctcatgcagacttcaacttattattactctgtgcgtatttttcccggtcaggaaccagccaacgtgtgggttggatggattactagcgattttcatcagtacgacacaggcttcgatctggatcgggttagaactgtgacagtgacccttggcgatgaaaagggaaaggtgcacgagagtatcaagcggtccaactgctacatggtctgcgccggggaaagcatgagccccggccaggggcgaaacaacaacggattagagattggctgcgtcgtagacgctgccagtggacttctgacatttatagccaacggcaaggagctatccacatattatcaggttgaacctagtaccaagctgtttcccgctgtattcgcgcaagctacttcgcccaacgttttccaatttgagctggggcgcattaaaaacgtaatgcctctgtccgcaggtctgtttaaaagcgaacataaaaacccagtgccacagtgcccacctcgcttgcatgtgcagtttctgtctcacgtgctctggagtaggatgccgaaccagtttctcaaagtggacgtgtcaagaatctcagagcgacagggctggttggtacagtgtctggatcccctgcaatttatgagtctgcatattccggaggaaaaccgctctgtggacatcctggagcttaccgagcaggaggaattgctgaaattccactaccataccctgaggttatactcagccgtctgtgccctggggaaccatagggtggcgcatgctctgtgcagtcacgttgatgagcctcagctgctctacgctattgaaaataagtatatgcctggcctcctccgggccggatattacgacttgcttatagacatccatttgtcttcctacgccacagctagactgatgatgaataacgagtacattgtgcctatgacagaggagactaagtccataactcttttcccggacgagaacaagaaacatggcctcccagggatcgggctgtctacctctcttaggccccgcatgcagttctcctctcctagtttcgtgagcataagcaacgagtgttatcaatactctccagaattccccctggatattctcaaatctaaaactattcagatgctgaccgaagccgtcaaggaaggctccctacatgctcgcgatcccgtcggcggaactaccgagtttctgtttgtgcctctcatcaagcttttctacacgcttctgattatgggcatcttccacaacgaagacttgaaacacatcctgcagcttatcgaaccctctgtttttaaggaggccgccacacctgaagaggagagtgatacccttgaaaaggagctgtctgtagatgacgccaagttacaaggagcaggggaagaggaagcgaaggggggtaagaggccaaaagaagggctactgcagatgaaactccccgaaccagttaaattgcagatgtgtttactgctgcaatacctgtgcgactgccaggtcagacatcgcattgaggctatagtagctttcagcgatgattttgtagccaagctgcaggacaaccagcgcttcagatacaacgaagtaatgcaggccttgaatatgtcagctgcactgacggcccgcaagaccaaagagttcagaagccccccccaggagcagatcaatatgttgctgaacttcaaggacgacaagtccgagtgcccctgtccagaggagataagagaccaattgctggactttcacgaggatctcatgacacactgtggaattgagttagatgaggacggatcactcgacggaaacagtgatcttacaatacggggaagactgctgagccttgtggaaaaagtaacctatctgaagaaaaagcaggccgaaaagcccgtggagagtgattctaagaagtccagtaccctccaacagttgattagtgagaccatggtgaggtgggcacaggaatcggtgatcgaggaccccgagctagtccgagcaatgttcgtgctcctccaccgacagtatgacggaatcgggggactggtcagagcccttccaaagacctacaccataaatggagtgagcgtggaggatacaattaaccttctggcctcactcggacagatcaggagcctcctgagcgtgcgcatgggcaaagaggaagagaagctcatgattcggggactcggagatatcatgaacaataaggtgttctatcagcatcccaatctgatgcgggcactgggaatgcatgaaaccgtcatggaagttatggtcaacgtgctgggaggcggggaatccaaggagatcactttcccaaaaatggtggcaaactgctgccgtttcttgtgttacttttgtcgaatctccaggcagaaccagaaggctatgttcgatcacctgagctaccttctggagaatagcagtgtcggactagcatctccagcgatgcggggcagtactcctctggacgtggctgccgccagcgtgatggacaacaacgagcttgcattggccctgagggagccggacctggagaaagtggtgcgttatctggctgggtgtggtcttcagtcatgccagatgctcgttagcaagggatatccagatatcggttggaatccagtggagggtgaacgttatctggacttcctccgttttgctgtcttttgcaacggggagtctgtcgaagagaatgccaatgtggtcgtgaggctcctgatccggaggcctgaatgcttcggacccgctctgcggggagaggggggcaatggtcttctcgccgcaatggaggaggccattaaaattgccgaggacccttcacgcgacggcccctcccctaattctggtagctccaagacccttgacactgaagaggaggaagacgataccatccacatgggcaatgccataatgacgttttattctgctctgatcgatctgctgggtcgatgcgcccccgagatgcatctaatacacgcgggaaagggggaggctattcgcataagaagcattctgaggtcccttatacccctgggagatctcgttggcgtgatttccatcgcctttcaaatgcccacaatcgccaaggacggaaacgttgtcgagcccgatatgagcgcaggtttctgtccagatcataaggccgccatggtcctgttcctggacagagtgtacgggatagaggtgcaggacttccttctccaccttctcgaggtgggatttttgcctgatctaagagccgcggcttccctggataccgcagcgttgagtgccaccgatatggctttagccctcaatcggtatttgtgcacagctgtcctacctcttctgaccagatgcgcgcctctttttgccgggaccgaacatcatgcgtcattgatcgactcccttcttcacacggtgtatcggttatcgaagggatgctccctgaccaaggcccagagagacagtatcgaggtgtgtctgctttctatttgtgggcagttgagacccagtatgatgcaacatctccttcggcggctggttttcgacgtgccactgcttaatgaacatgctaaaatgcccttaaaactgctcacaaatcattatgaacggtgttggaagtactactgcctccctggaggctgggggaactttggtgcagcttcagaggaagaactccacctaagtcgaaagctgttctggggcatctttgatgccctttcacaaaagaaatatgagcaggaactctttaagttagcattaccctgcctctctgccgtggcaggagctttacctccagactatatggaaagcaattacgttagcatgatggagaagcaaagttcaatggactctgaggggaatttcaatccgcagccagtcgatacatccaatattacaatcccagagaagctggagtatttcatcaataaatatgccgagcattctcacgataaatggtccatggataagttggccaacggctggatttacggcgaaatttacagcgatagttcgaaagtgcaacctctcatgaagccttacaagcttctgagcgaaaaggagaaggagatttatcgatggccgatcaaagagagcttaaagactatgctcgcttggggatggcgtatcgagcggacccgggagggtgattccatggctctttacaacaggaccaggcgcatctcgcagacctcccaggtttccgtggacgcagctcacgggtatagtcctcgcgctatcgacatgtcaaatgtgaccctcagtagagacctccatgctatggccgagatgatggcggagaactatcataacatatgggccaagaagaaaaaaatggagttagagtcaaaggggggcggaaaccaccccctgctggttccatatgatactctgaccgctaaggagaaagctaaggaccgagagaaggcccaggacatcctcaagtttctccagattaacggttatgcagttagcagaggttttaaggacttagaacttgacaccccatcaatcgaaaagagattcgcttattccttcttgcaacagttgatccggtacgttgacgaggcccatcaatatatactcgagttcgacggtggaagccgaggaaaaggggaacacttcccatacgaacaggaaatcaaattctttgctaaggtggtgctcccacttatcgaccagtatttcaaaaaccatcgactgtactttctctccgcagcgtcccgcccactgtgctccggtgggcacgctagcaacaaagagaaggaaatggtgacttctctgttttgcaagctgggcgtgcttgtgagacatcgcatttcactatttggcaacgacgccaccagcattgttaattgcctgcatattctgggacagaccctggacgctcgaacagttatgaaaaccggactggagtcagtgaagagcgcgctgcgagccttccttgacaatgccgccgaagatttggagaaaactatggaaaatctcaaacagggacagtttactcatactcgtaatcagccgaaaggtgtcactcaaataatcaactacactaccgtggccttactgccaatgttatccagtcttttcgaacacattggtcagcaccagtttggggaggatctaatcctggaagatgtgcaggtctcctgctatagaatactaactagcctgtatgccttgggcacttctaagtcaatatatgttgaacggcagagatcagccctgggggagtgcctggccgctttcgctggggcgttccccgtcgcctttctggagactcacctggataaacacaatatatacagcatatataatactaagtcttcacgcgagcgcgctgccctgtctctgcctaccaacgtggaggatgtatgccctaacatcccgagcctcgagaagttaatggaagagatcgtggaattagccgagtctgggattcgctatactcagatgccccatgtcatggaagttattctccctatgctgtgtagttacatgtccagatggtgggagcacggaccggagaataaccccgagcgggcggaaatgtgttgtactgcattgaactcagaacatatgaacacccttctgggaaatatcctaaaaatcatttataataaccttggtattgatgagggagcctggatgaagcgtctcgctgtgttctcccaacccatcatcaacaaagtcaaaccccagctgttgaagacccatttcctccccctgatggagaaactcaaaaagaaagcagccacagtcgtgtcagaggaggaccatctcaaagcagaagcccggggagacatgagcgaggcggagctccttattctggatgagtttacaacattggcccgggatctgtatgccttctatcccttgctaatcaggtttgttgactacaaccgggccaaatggctgaaggagccaaatcctgaagctgaggagctgtttagaatggtggcagaagtattcatatattggagtaaaagccacaactttaaaagggaggaacagaactttgtcgtgcagaatgagatcaacaacatgagcttcttgattacagatacaaagtctaaaatgtccaaggcagcagtttccgatcaggagaggaagaaaatgaagcgcaaaggcgatagatactccatgcagactagtctgatcgtggcagcactcaaaaggctactccctattggactcaatatctgtgcccccggagatcaggagctcattgccctggcaaagaatcgattttctcttaaagataccgaggacgaagtgagggacatcatcaggtcaaacatccatctgcagggaaagttggaagatccagctattcggtggcaaatggcactctacaaagatctcccaaaccgaaccgatgatacctctgaccccgaaaaaactgtagaaagagttctggatatcgcaaatgtgctgtttcacctcgagcagaaatctaagagagtggggcgtagacattattgcttggtggaacacccccagaggtctaagaaagcggtctggcacaagctgttgtctaagcagcggaagagagccgtggtcgcatgtttccggatggcccctctttataatctcccgagacaccgggccgttaacttgttcctacaagggtacgaaaaatcatggatcgagacagaggaacattatttcgaagataagcttatcgaggacctcgcgaaaccgggggctgagccccccgaggaggacgagggaaccaaacgggtggatccactccatcagctaattctgctttttagccgcacagcactgacagaaaagtgtaagctagaagaagatttcctgtacatggcttatgccgacattatggctaaatcttgccatgatgaggaagacgatgacggggaagaggaagtcaaatctttcgaggaaaaggagatggagaagcagaagctcttgtaccagcaggctaggctgcatgaccgaggcgccgcagagatggtactgcaaaccataagcgcctctaaaggagagacaggccccatggttgccgcaaccctgaaacttggcattgcgattctcaacggcggaaacagcacagtgcagcaaaagatgctggactatttgaaggaaaagaaggacgtaggattcttccagagcctcgcaggattgatgcagagctgtagcgttcttgatctgaatgcctttgagaggcagaacaaggccgagggattaggtatggtgactgaggagggatctggcgagaaagtgctccaagatgacgaatttacctgtgatctctttcgcttcctgcagcttctgtgtgaggggcacaattccgacttccagaattaccttaggactcagaccggaaacaatacaactgtaaacattatcattagcactgtcgactatctactgcgcgttcaagagagtatctctgacttttactggtactattctggtaaagacgtcatcgacgagcagggccaaaggaatttttccaaagctattcaagtggcgaaacaggtattcaacaccctgacagagtacattcaaggaccttgcactgggaaccagcagagcttggcccattcacgcctttgggacgcagtcgtcggatttctgcacgtatttgctcatatgcagatgaaactctcacaggacagtagtcaaatcgaactgttaaaagagctcatggatctacagaaagatatggtcgttatgctgctctccatgctggagggtaacgttgtcaatggtaccataggcaagcagatggtggatatgctcgtggaaagctccaacaatgtggaaatgatccttaagtttttcgacatgttcctcaagctgaaagacttgacgtcaagcgacacttttaaggagtacgatcctgacggaaagggcgttatctccaaaagggactttcacaaagctatggagagccacaaacactacacacaatccgaaaccgaattcctactgtcatgcgcagaaaccgacgaaaatgagaccctcgattatgaggagttcgtgaaacgtttccatgagcctgccaaggacatcggctttaacgtggccgtgctcctcaccaatctgagcgaacacatgcctaatgataccagacttcagaccttcctggagctagctgagtccgtcctgaattattttcagcctttcctcggccgcatcgaaatcatgggcagtgctaagagaattgaaagggtctacttcgagattagcgagtcctcaagaacgcaatgggaaaagcctcaggtaaaggaatcaaagcgtcagtttatttttgacgtggtgaacgaggggggtgagaaggaaaagatggaactctttgtgaatttctgtgaagatactatttttgagatgcaattagccgcccagattagcgaaagtgacctgaacgaacgctcagctaacaaagaagaatcagagaaggaacgccccgaggagcagggaccgagaatggcattcttcagtatccttactgttcgatcagccctgtttgctctccgttacaatattttgaccctcatgcgaatgctgtcactgaaaagcctgaaaaagcagatgaagaaggtgaagaagatgaccgtgaaagacatggtgaccgcattttttagcagttactggtccatcttcatgactctccttcattttgtggctagcgtgttccgcgggttctttaggattatatgcagccttctgctgggaggctctctcgttgaaggagccaaaaaaattaaggttgccgaactactggcgaacatgcctgaccccacacaggacgaagtgaggggtgatggcgaagaaggggaacgtaaacccctggaggctgctctgccctctgaggacttgaccgacttaaaggaactgacagaggagagcgatttacttagcgatattttcggccttgacctcaagcgggaagggggccagtacaagctgatcccccataatccgaacgccggcctctccgatctgatgtctaacccagtaccaatgccagaggtgcaggaaaaattccaggagcagaaggccaaggaagaagagaaggaagaaaaggaagagacaaagagcgagcctgagaaagccgaaggagaggacggtgaaaaggaggaaaaggccaaggaggacaagggaaaacagaaactgcgacaactacacacacaccggtacggagaaccagaggttcctgagtccgccttttggaagaagatcatcgcgtaccagcaaaaattattgaactatttcgcaagaaacttctacaacatgaggatgttagccctcttcgtggccttcgctatcaatttcattttgctcttctataaagtttcaaccagtagcgtggtcgaggggaaggaactgccaacccgttcctcatctgaaaacgcaaaggtgacctctctggatagctcctcccacagaataatcgcagtacactacgtcctggaggagagtagtggctacatggaaccaacactgcgtattcttgccattctgcatacagtgattagcttcttttgcatcatcggctactactgccttaaggtcccactggtcatcttcaaaagagagaaagaggtggcccgcaagctggaattcgatggtctgtacatcacggaacagcctagcgaggatgacataaagggacagtgggatcgcctggtgattaatacccaaagtttccccaataactattgggacaagtttgtgaaaagaaaagtgatggacaagtacggggagttttacgggcgggataggattagcgaactcctgggaatggataaggctgcccttgacttctccgatgcaagagagaagaagaagcccaagaaggattcttcgctgtccgctgtgttgaattccatcgatgtgaagtatcagatgtggaagctcggcgttgtgtttactgacaatagcttcttatatcttgcttggtatatgaccatgagcgttctgggacactataacaatttcttcttcgcggcccacctcctggatattgccatgggcttcaaaactctgcgcactatacttagttccgtgacgcacaatgggaagcagctagtgcttaccgtaggcctcttggctgtcgtcgtatatctctatacagtggtagcctttaatttcttcaggaagttttacaacaaatccgaggatggggacactccagacatgaaatgcgatgacatgttgacctgttacatgttccacatgtatgtgggcgtgagggccggtggcggcattggtgacgaaatagaggatccagccggcgacgaatacgagatatacaggattatcttcgatatcacttttttctttttcgtcattgtcattttgctggcaattattcagggcctgatcattgatgcctttggggagcttagagatcagcaagagcaagtgaaggaagacatggaaactaaatgctttatctgcggtattgggaatgattacttcgatacagtcccacacggcttcgaaacgcatacactgcaggagcacaacctggccaattacttatttttcctgatgtatttgatcaataaagatgaaaccgaacacacagggcaggagtcatacgtgtggaagatgtaccaggaacggtgctgggaattttttcccgcaggtgattgtttccgtaagcagtatgaagatcagttgaattag

SEQ ID NO: 204107 - DNA, 987 bp, synthetic construct
  misc_feature 1..987: note = Description of Artificial Sequence: Synthetic coding sequence
  source 1..987: mol_type = other DNA
atggagcccaccctgcggatcctggccatcctgcacaccgtgatctcatttttctgcatcattgggtactactgcctgaaagtcccactcgtgatctttaaacgcgagaaggaagtggcccgtaaactagagttcgatggtctgtacattactgagcaaccaagcgaagatgatataaaaggacaatgggacagacttgttatcaatacccagtctttccctaataactattgggacaaattcgtgaagcggaaagtgatggacaaatacggcgagttctatgggagggatcgcattagcgaactgttgggaatggataaggcagcacttgatttcagcgatgcgagggaaaaaaaaaagccaaagaaggactcttccctgtccgccgtcctcaactctattgacgtaaagtatcaaatgtggaaactgggtgtggtctttacggataactcatttctctatctggcttggtatatgactatgtccgtcctcggtcattacaataatttcttctttgcagcccatttattggatattgccatgggcttcaagacactgcgtaccattctgtcctccgtgacacataacggcaagcaattggttttaactgtaggactccttgccgtcgtggtgtacctgtacaccgtggtggcattcaatttcttccggaagttttacaacaaatcggaagacggggacactcccgatatgaagtgcgacgatatgctgacttgttacatgttccacatgtacgttggcgtgcgcgcaggcggtggtatcggcgatgaaattgaagacccggcaggcgatgaatatgagatatatcgcattatcttcgatattacattttttttcttcgtgatcgtaattctactcgccattatacaggggcttatcatcgatgcgtttggcgaactgcgagatcagcaggagcaggtgaaagaagatatggaagtattctctgacgtgtcgtataagcagcgctag

SEQ ID NO: 204108 - DNA, 645 bp, synthetic construct
  misc_feature 1..645: note = Description of Artificial Sequence: Synthetic coding sequence
  source 1..645: mol_type = other DNA
agcctgttctgcaagctgggcgtgctggtgcggcaccggatcagcctgttcggtaatgacgccacctcaattgttaactgcttgcatattttagggcaaactctcgatgcccgcactgttatgaaaactgggctggaatccgtcaaaagcgccctaagagctttcctagacaatgcggccgaggacctagagaagaccatggaaaatctgaagcaaggacagtttacccacacccggaaccagccaaaaggggtgactcagatcattaactatacaacagttgccctcctgcccatgctgtcttccctgtttgaacatattgggcagcaccagtttggagaggatctgattctggaggatgtgcaggtctcctgctaccggatcctcacaagcctctatgctctgggaacctctaaaagcatctatgtcgagaggcagcggagcgccctcggagaatgccttgccgcttttgccggggcttttcccgtcgcatttctcgagacacacctggataaacacaatatctatagtatttataacactaagtcgagtcgggagcgcgcagccctgtcactgccgacaaacgtggaggacgtgtgccctaacatcccatccctcgaaaaactgatggaggaaatcgtgtag

SEQ ID NO: 204109 - DNA, 4266 bp, synthetic construct
  misc_feature 1..4266: note = Description of Artificial Sequence: Synthetic coding sequence
  source 1..4266: mol_type = other DNA
atgaagaccggcctggagagcgtgaagagcgccctgcgggccttccttgataatgcggctgaggatttagaaaagactatggagaacctcaagcagggacagttcacacatacaaggaaccaacccaagggagttacacagatcattaactatactaccgtggctctgttgccaatgctcagtagcctattcgagcatatcggccaacaccaatttggcgaggatctcatccttgaggacgtgcaggtttcttgttacaggatcctcacctcgctctacgccctcggcacctctaaatccatttacgtcgaacggcaaaggtcagccctcggggaatgtttggcagcttttgctggagcttttcccgtagctttcctggagacgcatctggacaaacacaacatttatagcatttataatactaaatctagtagggagcgagctgcactgtcactcccaaccaatgttgaagacgtctgcccaaatatcccatccttagagaagctgatggaggaaatcgtggagctggccgaaagcgggattcggtatacgcaaatgcctcatgtaatggaggttattctccctatgctttgctcgtacatgagtcgatggtgggaacacggcccagagaacaatcccgaaagagcagaaatgtgttgcacagcattgaactccgaacatatgaacacactgctcggcaatattctcaaaattatctacaataacttaggcattgatgagggcgcttggatgaaaagattggccgtgttttcccagcctattatcaataaggtcaagccacaacttttgaagacccatttcctgccattaatggaaaagctgaaaaaaaaagctgctaccgtggtttctgaggaggaccatctgaaggccgaggccaggggcgatatgtctgaggctgagctcctcattctggatgagttcactacactcgcgagagatttatatgccttttatccactgctgattaggtttgtcgactacaacagagcaaagtggctgaaagaacccaatcccgaagccgaagaattattccgaatggtggccgaagtgttcatttactggtctaagtcccacaatttcaagcgggaagagcaaaacttcgtggtgcagaacgagataaacaacatgagctttctcattacagataccaaaagtaaaatgtctaaggcagctgtctctgatcaggagagaaaaaagatgaagagaaagggagatcggtatagcatgcagacttccctgatagtcgcagcacttaagcgattgctacccatcggcttgaacatttgtgcacccggagaccaggagttgattgccctagccaaaaatagattttccttgaaggatacagaggacgaggttcgcgatattatccgctcgaatatacacttgcagggaaagctcgaggatcccgctatccgctggcaaatggccctctacaaggaccttcccaacagaacggatgacacttccgacccagagaaaactgtcgaacgcgtgttggacatcgctaatgtgttgtttcatctggagcaaaagagtaagcgtgtggggaggcgccactactgtctggttgagcacccccagcggtccaaaaaagctgtatggcacaagctgctgagcaaacagagaaaacgggcagtcgttgcctgcttcagaatggcccccttgtacaatttacccagacacagggctgttaatctgtttctccagggctatgagaagtcgtggatcgaaaccgaggagcactattttgaggacaaattgatagaggatctggcaaagcccggggctgagcctcctgaagaggacgaaggtacaaagagggtcgatccactacaccagctcatcttactctttagcagaaccgctctcaccgagaagtgtaaactcgaagaggatttcttatacatggcctacgcggatatcatggctaaaagctgccacgatgaggaagatgatgatggagaggaagaggtcaaaagttttgagcacgacattattaaggacttacgcaacaagttcgcctcgttgggcgaaaacagtctggagaaggagatggagaagcagaagctgctgtatcagcaagcccgcctgcacgataggggggcggccgagatggtccttcaaacaataagcgcttcgaaaggagaaaccggtccaatggttgcagccacactcaagctgggtattgccatcctgaacgggggcaacagtacggtgcagcagaaaatgctcgactaccttaaggaaaaaaaggacgtgggcttcttccaatcactcgcagggctgatgcagagctgcagcgtgttggatctgaatgcattcgagcgccaaaacaaagcagaagggctgggaatggtgaccgaggaaggctccggagaaaaggttttacaggatgacgagttcacttgtgacttgtttcgttttctgcaactgttatgtgaggggcacaattcagactttcagaactatttgcggacacagaccgggaacaacaccaccgtcaacataatcatcagcactgtggattatttgctcagggtgcaggaatccattagtgacttctattggtattacagcggcaaagacgtcattgatgagcagggacagaggaatttctccaaggctatccaagtcgctaagcaggtcttcaacacactgactgaatacatacagggtccgtgtacagggaaccagcagagtttggcccactcgcggctgtgggacgctgtagtgggctttttgcacgtatttgcacacatgcagatgaagttatcgcaggacagctcacagattgaactgctgaaagagctgatggaccttcagaaagatatggtcgtcatgctgctgagtatgctggaagggaacgtcgtgaacggcactatagggaagcagatggtggatatgctggtagagtcctcaaataacgttgagatgattctgaagttttttgatatgtttctcaagctaaaagatctgactagctcagacaccttcaaagagtatgatcccgatggcaagggggtcatttctaagcgggattttcataaggcgatggagagccataaacactatactcagtccgagaccgagttcctattgagttgtgcagaaacggacgaaaacgaaacacttgactacgaagaattcgttaaacgcttccatgaacccgctaaagacatagggttcaatgtcgctgtacttctgactaacctatccgaacacatgcctaacgatacccggctccagacttttcttgagcttgcggaatcagtcttaaactatttccagccgttcttgggtcgcatagagattatgggctcggcaaaacggatcgagcgggtgtacttcgaaataagtgagtccagcagaactcagtgggagaaacctcaagtgaaagaaagcaagcgtcagttcatattcgacgtggtaaatgagggaggggagaaggagaaaatggagctctttgtcaacttttgcgaggacactatcttcgaaatgcagcttgcagcccagatcagcgaatcagacctaaatgaaaggtccgccaataaagaagagagcgagaaagagcgccctgaggaacaaggaccccggatggccttcttcagtatcctgacggtaagatccgccctcttcgcccttcgctacaatattttaaccttgatgaggatgctgagtctgaagagcttgaagaagcagatgaagaaagtgaagaaaatgacagtcaaagacatggtgaccgcctttttttcctcctattggtcgatattcatgacccttctgcactttgtcgcctcagtgttccgaggattcttcaggataatctgctccctgctgctaggtggttccctcgtggagggagctaaaaaaataaaagtagccgaactgttggccaacatgcccgaccctacccaggatgaagtcagaggcgatggagaagagggagagcgcaagcccctggaggctgccttgcccagtgaagacctcaccgatcttaaggagctgactgaggagagcgatttactgagcgacatctttggtttagacctgaagcgcgaggggggacagtacaaactaatcccacacaatcctaacgcgggcctgtctgacctcatgtcgaaccctgtgcctatgccagaagtgcaggaaaaattccaagaacagaaagccaaagaagaagaaaaggaagagaaagaggagacgaagagcgagccagagaaagccgagggcgaggacggctag

SEQ ID NO: 204110 - DNA, 14856 bp, synthetic construct
  misc_feature 1..14856: note = Description of Artificial Sequence: Synthetic coding sequence
  source 1..14856: mol_type = other DNA
gacgacgaggtggtgctgcagtgcaccgccaccatccacaaggagcagcagaaactgtgtctcgctgcggaagggtttgggaaccgactgtgtttcctggaatcaaccagcaattccaagaatgtgccacctgatctgtctatttgcacctttgtgttggagcagagcctcagcgtgcgggccctacaggaaatgctcgccaacacagttgaaaagtcagaaggtcaggtggacgtggagaagtggaaattcatgatgaaaaccgcccaagggggggggcaccggactcttctgtacggccatgctatcctgctgcggcactcgtattccggaatgtacctatgctgcctctccacttctaggtcaagtaccgataagcttgcttttgacgtgggcctgcaggaggacaccaccggagaggcctgctggtggacaattcaccctgcgagcaaacagcgcagcgaaggtgaaaaagtgcgcgtgggggacgacttaattctggtgtccgtaagtagtgaaaggtacctccacctaagttacggcaacggctccttgcacgtcgatgctgcttttcagcagaccctctggagtgttgctccgatttccagcggctcagaggccgcgcaggggtacctgattggcggagacgtgcttcggctgctccatgggcatatggacgagtgcctgacagtgccctctggcgagcacggtgaggagcagcggcggactgtgcattacgaaggcggcgctgtcagcgtgcatgctcgcagcctatggcgcctggagaccctgagagttgcgtggtcagggtcacacattaggtggggccagccgtttaggctgcggcacgtgactaccgggaagtatctaagcctgatggaagataaaaatttgctgctgatggataaggagaaagcagacgtaaaaagcactgcatttacctttagaagctccaaggaaaaactggatgtcggggtccgtaaagaagtggacggaatgggcacttctgagataaaatatggcgacagtgtgtgttatatccaacacgtggacacgggactatggcttacctatcaatctgttgatgtcaagtcagtaagaatgggcagtatccagcggaaggctatcatgcaccacgagggccacatggacgatgggataagtctgtcaaggtcacaacatgaggaatcgcgtacagcgagggtgatccgttctactgtcttcctgttcaaccggtttattcgggggcttgacgctctgtccaaaaaagccaaggcttcaacggttgacctgccgattgagtcagtctcccttagtcttcaagacctgatcggctacttccatcctccagatgaacacttagaacatgaggacaaacaaaatcgactcagggccttgaaaaaccgccagaatctgttccaggaggaaggcatgatcaacctggttctggagtgcatcgatcgtctgcacgtttacagttccgcggcacacttcgccgacgtggccggcagggaagccggagagtcatggaagtctatcctcaattctctttacgaacttctcgccgccctgattagaggcaaccgcaaaaattgtgcgcaattttcaggatccctggattggcttatcagtcgtctcgagaggctagaggcgagctcaggaatcctggaggttctgcactgcgtactcgtggagagccccgaggctctgaacataattaaagagggtcacatcaagtctataatcagccttcttgataaacatgggagaaatcataaggtgctagacgtgctctgttctctgtgcgtgtgtcacggcgttgcagtgaggtctaaccagcacctgatatgtgacaacctgctgcccgggagggacctgcttttacagacgaggctggttaaccatgtttcttcgatgagaccgaatatttttttaggcgtgtcagaaggctccgcccaatataagaagtggtattacgaattgatggtggaccacacggaaccattcgtgactgcagaggccacacatttaagagtgggttgggcctccaccgaaggctattctccctacccaggcggcggagaggagtggggtggaaatggagttggggatgacttattcagttacgggtttgacggccttcatctctggagcggctgcatagcccgcacagtgagttctcccaaccaacacctcttgcgaacagacgacgtgatctcctgttgcctggacctatccgcgccatcgatcagttttcggataaacggacagcctgtccagggcatgttcgagaatttcaacattgatggccttttcttccctgtagtatccttttcagctggtataaaggtcaggtttctcctcggcggccgccatggcgaattcaagttcctgcctccccccgggtacgccccttgttacgaagcagtcctacccaaggagaagctcaaggtggaacattcaagggagtacaaacaggagcggacctatacccgcgatctcctcgggcccacggtgagcctgacacaggcggcttttacccccattccggttgacacatctcagattgtgctccctccccatctcgagaggatccgggagaaactggctgagaacattcatgagttatgggtgatgaacaaaattgagctgggttggcagtatggccctgtgcgcgacgacaacaaacgccagcacccatgtctggtggagttcagtaaactacccgagcaggagaggaattataaccttcagatgtcattggagactttgaaaactttgctcgctctgggttgtcatgtcgggatctccgacgaacacgcagaagataaagtgaaaaaaatgaaactacccaagaattaccagctgactagcgggtataaacctgcacctatggatctgtcttttatcaaactgaccccctcacaggaagctatggttgacaaattagcggaaaatgcccacaatgtgtgggcccgtgaccgtatccgccaaggttggacttacggaatccagcaagacgtcaagaacaggcgcaatccccggttagtcccctataccctgttggatgatcgcaccaagaaatcaaataaggattctttgcgcgaagctgtgcggaccctgctcggctatggatacaatctcgaggcaccagaccaggatcacgctgcccgagctgaagtgtgtagtggcactggcgagagatttagaatatttcgagctgagaagacgtatgcggttaaggcaggacggtggtattttgagttcgagacggtgacagccggcgatatgcgtgtcggctggtccaggcccggctgccaacccgatcaggagctggggtcagatgaacgtgcgtttgctttcgatgggtttaaagcgcaaagatggcatcagggtaatgagcactatggtagaagctggcaggccggcgacgtggtaggctgcatggtggacatgaacgagcacacaatgatgttcaccctgaacggggaaatactgctggacgacagtggttctgagctcgctttcaaggatttcgatgtgggggatggattcattcccgtgtgcagcctcggggtggcacaggtcggacgcatgaacttcggaaaggatgtgagcacactgaaatatttcactatctgtggcctgcaggaagggtatgagccttttgcagtcaatactaatcgggacattaccatgtggttgagtaaacggttaccgcagttcctacaggtgccatctaatcacgagcacattgaggttactcgaatcgatggtactattgacagctccccttgcctgaaggttactcagaagtcgtttgggagccaaaactcaaatactgatatcatgttctacaggctcagcatgccgattgagtgtgctgaggttttttctaaaactgtggctggggggctaccgggcgccggcctctttggacctaaaaacgacctcgaggactatgatgctgattctgatttcgaagttttaatgaaaaccgctcacggacatctggtgcccgaccgggtcgataaagataaagaggccactaaaccggaatttaacaaccacaaagattacgcacaggagaaaccctcccgcttgaagcagcgttttctgctccgacgaactaaacccgattactcaaccagccactctgcccgattgacggaagatgtcctagccgatgatcgcgatgactacgactttctgatgcaaacatctacatattattattccgtgcgtatctttccaggccaggagcccgctaacgtctgggtgggttggattacttctgacttccatcagtatgataccggatttgacctggaccgagtgcgtacagttaccgtgaccctgggcgacgaaaagggcaaggtccatgagagtattaagcgctcaaattgttacatggtttgcgccggtgagtcaatgtcccctggacaggggcggaataataatggacttgagataggatgtgttgtggacgcagccagcggactgctcacttttatcgccaatggtaaagagctgagtacttactaccaggtggaacccagcaccaagctgttccccgcagtgttcgctcaggcaacctctcccaatgtgttccaattcgagctcgggcgcatcaagaacgtcatgcccttgtccgccggtctgtttaaaagcgaacataagaaccctgtgccacagtgtcccccccgactccacgtgcaatttttgtctcatgttctgtggagtcgtatgcccaatcagtttcttaaggtggacgtgagtcggatctccgagaggcaagggtggctcgtccagtgcttagaccctcttcagtttatgagtctgcacattcctgaagagaatagaagtgtggatatcctcgagttgacagagcaggaagaattgctcaaatttcattaccacacccttagactgtacagcgcagtatgcgcactgggcaatcacagagtagctcatgcactgtgctcccacgttgacgaacctcaactgctgtacgccattgagaacaagtacatgcccggtcttctgcgagcaggctactatgacctgctcatagatatccacctgtccagctatgcaaccgcccgacttatgatgaataatgagtacattgtgcccatgacagaggagacaaagagcataaccttgttccctgatgagaacaagaaacacgggctccctggaatcggcctgtcaacgtcattgaggcctcggatgcagttttcaagcccctcctttgtcagcatcagcaacgaatgctatcagtactctcctgagttccctctggacatcctgaaatcgaagacaattcaaatgctgacagaggccgttaaggaaggtagcttacacgcaagggaccctgtcggtggcaccaccgagttcttgttcgtcccactgattaaactgttctatactctgctcattatgggaatttttcacaatgaggaccttaaacatattctccaattgattgaaccaagcgtgtttaaagaggcagctacacctgaagaggaatcagataccctcgagaaagaattgagcgtcgacgacgccaagctgcagggggccggagaggaagaggccaaagggggcaagagaccgaaagagggactactccagatgaaattgcctgagcctgtcaagttacagatgtgcctgttgctgcagtacctctgcgactgtcaggtccgccatcgtattgaagccattgtagctttctccgacgactttgtcgctaaactacaagacaatcagcggtttcgatataacgaggttatgcaagcgctgaatatgtctgcggcacttacggccagaaagacaaaggaatttcggtcgcctccgcaagaacagattaacatgctactaaattttaaggatgacaagagtgagtgtccctgtccggaggagataagggatcagctattggacttccacgaggacctcatgacccactgcggtatcgagctggatgaggacggcagcctagatgggaactctgacctgaccataaggggaaggcttttgagccttgtcgagaaagtgacctacctgaagaaaaagcaggccgagaaaccagtggaaagtgatagcaaaaaaagtagtactttgcaacagctaatttcagagaccatggtacgatgggcccaagagagcgtgattgaggaccccgagctggtgagggcgatgtttgtgctgctgcaccgtcaatacgatgggataggaggcctggttagggccttaccaaagacctacactatcaatggagttagtgtggaggacacgattaatctgcttgcttctcttggtcagatccgctctttgttatccgtcaggatgggcaaggaggaggagaagcttatgataagaggactcggggacattatgaacaataaagtcttttatcagcaccctaatctcatgagagccctgggtatgcacgagacagtgatggaagtgatggtcaatgttctgggagggggagagagtaaggagatcaccttccctaaaatggtggccaattgttgccggtttctctgctacttctgtcgcatctccaggcagaatcaaaaggctatgttcgatcacctgtcgtatctgctggagaactctagcgtgggcctggcatcccccgcaatgcgcggtagtacgccgctggatgtggccgcagcgtccgtaatggataataacgaactggctctggcactgagggaacccgatctggagaaggtagtgcggtatcttgccgggtgtggtctgcagtcatgtcagatgcttgtgtctaaagggtatcccgacattggatggaacccagtcgaaggtgagaggtatctggatttcttgcgcttcgccgtgttttgtaacggcgagtcagtcgaagaaaacgcaaacgtggtggtaaggctgttgattcggcgcccagagtgtttcggaccagcccttaggggagaggggggtaacgggttactggcagcaatggaggaagcaattaagattgcagaggatcctagccgggatggcccctcccctaattcgggtagttcaaaaaccctggatacggaagaggaggaagacgacactatccacatgggaaacgcaatcatgacattctactcagcattgatagacttactgggtcgatgcgctcctgaaatgcatctcattcacgccggaaaaggcgaagctatcaggatccgctctattttgcgctcccttatacctctgggggacctggtgggggtcatttccatcgcgtttcagatgcccaccatcgctaaggacggcaacgtggtcgagccagatatgagcgccggattttgtcctgaccataaggcagcaatggtgctgtttctagacagggtctacggcatcgaagttcaggatttcctccttcaccttcttgaagttggttttctgccagacttaagggcagccgcgtccctggacacagccgccctgtctgctacagatatggccctggccctgaatcgatatctatgcacagccgtccttccactcctcactagatgtgcacccctgtttgctgggactgagcaccacgccagcttgattgacagtttgttacacactgtctacagactgagtaaggggtgctctctgaccaaggcgcagcgcgacagtatcgaagtatgcctgctttctatctgcggacaactcaggccatccatgatgcagcatctgctgcgtagattggtgttcgacgttccactcctgaatgagcacgccaagatgcccttaaaattgctgacaaaccattatgaaaggtgctggaaatattattgccttcccggtggctggggcaactttggtgctgcatccgaggaggaactgcatctgagtagaaagcttttctggggaattttcgacgcactttctcagaagaaatatgagcaggagctgttcaaactagcccttccatgtcttagcgccgtggccggggcgcttccccctgactacatggagtctaactatgtcagtatgatggaaaagcaatcatcaatggattctgagggcaacttcaatccccagcccgtcgatacatccaatatcacaattcccgagaaactcgagtactttatcaataagtatgccgagcattctcacgacaagtggagcatggataagttggccaatggctggatttacggggaaatttatagtgactctagtaaggttcagcccctcatgaagccttacaagctcctatctgaaaaagaaaaggagatttacagatggcctatcaaagaaagtcttaaaaccatgttggcatggggttggagaattgagaggactcgggaaggcgacagcatggccctgtataaccggaccaggcgtatcagccagaccagccaagtgtcagtggacgccgcacacggatatagtcctcgggcaatcgatatgagcaatgtgaccctcagcagggacctgcacgccatggccgagatgatggccgaaaactaccataacatctgggccaaaaagaaaaagatggagctggaatccaaagggggggggaatcatccccttctggtaccctacgatactctaaccgctaaagagaaagctaaggatcgggagaaggcccaggatatcctaaaatttctccagatcaacggttatgctgttagccgaggatttaaggatctcgagcttgataccccgtccatcgaaaaaagatttgcctattcctttctgcagcagctgatcagatatgtagatgaagcacatcagtacattcttgagtttgatggcggttcccgaggcaagggggaacactttccctacgaacaggaaattaaattcttcgctaaggttgttttacctctgatcgatcagtatttcaaaaatcaccggctctactttctcagtgccgcaagccggccattatgcagtggcggtcacgcttcaaataaggagaaagagatggtgactagcctattttgcaaattaggcgtcttagtcaggcatcgcatctcactgttcggcaatgatgcgaccagcatcgtcaattgtctgcacatcttggggcagacgctcgatgcacggaccgttatgaaaactgggctcgagtccgtcaaaagcgccctgcgggcattcctcgacaacgcagcagaggatctcgagaagacaatggagaatctaaaacaagggcagtttacccatacgaggaaccagcctaagggggttacacaaatcataaattacacaacagtggcattactgcccatgctgagttctctttttgagcacatcggccagcatcagtttggtgaggatctcattctggaagacgtgcaagtgagctgctatcggatccttacctctctctatgccttgggcacgagcaaatctatttacgtcgagcgacaaaggtctgctctcggggaatgtcttgccgctttcgcaggtgccttccctgtagcattccttgagactcaccttgacaaacataatatttactcaatctataatactaaaagttcgcgcgaacgggccgccctctctctgcctaccaatgtggaggatgtctgcccaaatataccctccctggaaaaactgatggaggaaattgttgaactagccgaaagtggaattcgctatacacagatgcctcatgtgatggaggtgatcctcccaatgctttgttcctatatgagccggtggtgggagcatggtccagagaacaacccggaaagggcagagatgtgttgcacagcactcaacagtgagcacatgaacaccctcttagggaacatcctgaagatcatctataataacctgggaattgatgaaggtgcctggatgaagcggctggccgtcttctcccagcctataatcaataaagtgaagccccagctgcttaagacacacttccttccgcttatggaaaaactgaaaaagaaagcagccactgttgtgagtgaagaggatcatctgaaggctgaagcccgaggtgatatgtctgaggctgagctccttatcttggatgagttcacaactttagcccgtgacttatacgctttttaccctttattgattcgtttcgtcgactacaaccgggcaaaatggctgaaggagccaaaccccgaggccgaagaactttttaggatggtggctgaagtgttcatttactggtctaagagtcataactttaaaagagaggagcagaacttcgtcgtccagaatgagattaataacatgtctttcctgatcaccgacaccaaatctaagatgtcaaaggccgctgtatctgatcaagagagaaagaaaatgaagagaaagggcgacaggtactccatgcagacaagcctgatcgtggccgccctgaagcgtttgctccctatcggccttaatatctgtgcacccggagaccaggagctaattgccttagccaaaaaccgttttagtctgaaggacacagaggacgaggttagggacataattaggagcaacatacatcttcagggcaaacttgaagatcctgctatacgatggcagatggcactatacaaagacttgcctaatcgcacagacgatacttctgatccagaaaagaccgtggagcgggtgctggatatcgccaatgtcctgtttcatctcgaacaaaaatcaaagcgggttggacgccgccactattgcctagtggaacacccccaaaggagtaagaaggctgtgtggcacaaactattgtccaaacagcgcaaacgcgccgtggtcgcctgtttcagaatggcaccattgtacaatctgccccgacaccgggctgtgaacctctttttgcagggctacgagaagagctggatcgagacggaagaacactattttgaagacaaactgatcgaggacctcgctaaaccaggagcggaaccccctgaggaagatgagggcacgaagcgcgtagaccccctccaccaacttatcctgctgttttctagaactgccctgacggagaagtgtaagctggaagaggacttcctctacatggcttacgctgacattatggctaaaagctgccacgatgaagaagacgacgatggggaagaggaggtaaaaagtttcgaagagaaagagatggaaaagcagaagctcctttaccagcaagcgaggcttcacgacagaggggctgcagaaatggtgctccagactatttccgctagcaagggcgagacaggtcctatggtagccgccactttgaagttgggaattgcgattctgaacggcgggaatagcacagtccagcaaaagatgctcgattatttgaaagaaaagaaggatgtgggcttcttccagtcactggccggattgatgcagagctgctcagttttagacctgaacgcatttgagcgtcaaaacaaagctgaaggactgggtatggtgacagaggagggaagcggagagaaggtcttacaagatgacgagtttacttgcgatctgttccgctttctgcagctgctgtgtgagggccacaattccgacttccaaaactatctcagaacacagaccggtaataacaccactgtcaatattattataagcacagtggactatcttctgagagtccaagagagtattagtgatttctactggtactacagtggcaaggatgtcatcgatgaacagggccagcgcaatttttccaaagccattcaagtggcaaaacaggtgttcaacacgttgacagagtatattcagggcccctgcaccggaaatcagcaatcactggctcactcgcgtttgtgggatgctgtcgttgggttcctgcacgtcttcgcccacatgcagatgaagctgagccaggattcatctcagatcgagctcctgaaggaattgatggatctgcagaaagatatggtggtgatgcttttgtctatgctcgaggggaacgtagtgaatgggaccatcggaaagcagatggtggacatgctggtggagagttctaataacgtcgagatgattctgaaatttttcgatatgtttctgaaattgaaggatctgacaagctctgatacatttaaggagtacgatccagatgggaagggagtaattagcaagagagactttcacaaagcaatggagagccacaaacattacactcagagcgagactgagttccttctgtcttgtgccgaaacggatgagaacgagaccttggactacgaagagtttgttaaacggtttcacgagcctgcaaaagatattggtttcaacgtcgcagttctgctgacaaatctgtctgagcatatgccaaacgacacccggctgcagacgttcctggaactcgcggaaagcgtgctcaactatttccagccatttctaggacgaattgagatcatgggaagcgcaaaacgcatcgagagagtgtacttcgaaatttccgagtcgtcgcggactcaatgggagaaacctcaggtcaaagaatcaaagcgccagttcatcttcgacgtagtaaatgaaggtggagaaaaggagaagatggaactctttgtcaatttttgtgaggacactatctttgagatgcaactggctgcacagatatctgagtcggatctgaacgaaagatcagccaacaaagaagagagtgaaaaggagagacccgaggaacaaggaccccgaatggcctttttctctatcctgacagtccgatccgcgctgttcgctctgaggtacaacatattgaccctcatgagaatgctgtccctgaagagcctaaaaaagcagatgaaaaaggttaaaaagatgacggtcaaggacatggtgaccgccttttttagcagctactggtccattttcatgaccttgctgcattttgtggcttcggtctttcggggcttcttcaggatcatttgctctctgctcctcggtggcagtctcgtagaaggggccaagaagattaaagtggccgagctccttgcaaatatgccagaccctacccaggatgaggttcgtggtgatggagaagaaggggagagaaaacctttagaggccgccctgccttccgaagacttgacggatcttaaggaattgaccgaagagtccgatttactgtctgatatttttggcctggatctgaagcgtgaagggggacagtataaactcatcccccacaatcctaacgccggcctgagtgatctcatgagtaacccagtaccgatgccagaagttcaggaaaaatttcaggagcaaaaagcgaaggaggaagaaaaagaagagaaggaggagaccaaatcagaacccgaaaaggcggaaggggaagacggcgaaaaggaggagaaagcgaaggaagacaagggtaagcagaaactgagacagcttcacacccacaggtatggagagcccgaagtgccggagtccgccttttggaagaaaattattgcttatcagcagaaattgcttaattactttgctagaaacttttacaacatgagaatgctggccctatttgtagcttttgccattaatttcattctcctcttctacaaggtgtccacctcatccgtcgtcgaaggaaaggaactgccgacaagaagcagcagtgagaatgccaaagtcacatccctagactcatctagccacagaatcattgccgtccactatgtcctcgaggaaagcagtggctatatggagcccactctgagaatccttgcgatacttcacaccgtgatcagcttcttttgcatcatcggatactactgcctgaaggtgcctctggtcatctttaagcgcgagaaggaagttgctcgaaaacttgagttcgatggcctgtacattacagagcagcccagcgaggatgacattaagggacagtgggatcggctcgtgattaacactcaatcctttcctaataattactgggacaagttcgtcaaacgaaaggtgatggataagtatggggaattttacggtcgagacaggattagcgaattgctgggcatggacaaggccgccctggattttagtgacgccagagagaaaaagaagcctaagaaggactcaagtctgtccgctgtcttaaattctatcgatgttaaataccagatgtggaagttaggggtggtcttcacagacaattctttcctttatctggcctggtacatgacaatgtccgtcctcgggcactataacaactttttctttgcagctcacctgctagacatcgccatgggttttaaaactctccggacaatcctgtctagcgttacccataacgggaagcaactcgtgctaacagtgggacttctcgcagttgtggtgtacctgtatacagtcgttgcctttaatttctttcggaagttttataacaagagtgaggacggggacacgcccgatatgaaatgtgacgatatgcttacatgttatatgttccacatgtacgtaggcgttagagcaggaggcggaatcggcgacgaaattgaggaccccgccggggacgagtacgagatctaccggatcatcttcgatatcaccttctttttcttcgtcattgtgatcctcttggccataatccaggggctcatcatcgacgccttcggggagcttcgcgatcagcaggaacaggttaaagaagacatggagaccaagtgctttatctgtggaatcggcaatgattactttgatacagtgccacacggattcgagactcacacgctgcaagaacacaatctcgccaactacttgtttttcctcatgtacttaataaacaaggacgaaaccgagcacacaggccaagagagctacgtctggaaaatgtaccaggagcggtgttgggagttttttcctgcaggtgactgctttcgaaaacaatatgaggatcagctgaactag

SEQ ID NO: 204111 - DNA, 14601 bp, synthetic construct
  misc_feature 1..14601: note = Description of Artificial Sequence: Synthetic coding sequence
  source 1..14601: mol_type = other DNA
atggccgagctgggcggcggcggcgaggaggacgcccggtggtacagaaaagaggacgaagttgtgcttcagtgcatagctaccatccacaaggaacagcggaagttctgtctggctgctgaaggccttggcaaccgactttgttttctagagccaactagcgaggcaaagtatatcccgcccgacctgtgtgtatgcaatttcgtccttgagcaaagcctgtcagttcgcgctttgcaggagatgctggcgaatacaggtgaaaacggcggggagggagctgctcagggagggggacacaggaccctgctgtatgggcatgccgtcctgctgcgccacagtttttcagggatgtatcttacctgcctgacaacttcgaggagtcaaacagataaactcgctttcgatgtggggctccgcgagcatgccacaggcgaagcgtgctggtggactatccaccccgcatcaaagcagcgatccgagggcgaaaaggtcagaattggagatgacctgatcctggtgagtgtgtcatccgagcgttatctgcacttgagcgtatcaaatggcaacatccaggtcgacgctagctttatgcagacattgtggaacgtgcaccccacgtgttctggcagctccatcgaagaggggtacttattagggggtcatgtcgtgaggctctttcatggtcatgacgagtgcttgacgatacccagtaccgaccagaatgattcacagcacagacgcattttttacgaagcagggggcgccgggacccgagctagaagcctctggcgcgtcgagccactgaggatcagttggtctggctcgaacattcggtgggggcaagcgttcaggttacggcacctgactaccggtcattacttagcattgacagaggatcagggcctgattctgcaggaccgagctaagtcggataccaagagtacagctttcagctttagggcctccaaagagctcaaggagaagctggattcttctcacaaaagggacattgaagggatgggggtgccagaaatcaagtacggcgactccgtttgctttgtgcagcacatagcttcagggctgtgggtcacatacaaagcacaggatgcaaagacttctaggctgggtccccttaaaaggaaggtgattctgcatcaagagggacatatggatgatgggttgacactccagcgatgtcaacgagaggagtcacaggctgctagaattatacgcaatacaacagccttattttctcagtttgtgtccggcaacaacaggaccgcagccccgattaccttacccatagaagaggtactccaaacactgcaggacttaatcgcatactttcagcctcccgaagaggaaatgagacatgaggataagcagaacaagctgaggtcccttaagaacagacagaacttgttcaaagaagaaggcatgctcgctttggtgcttaactgcattgataggttgaatgtgtacaatagcgtcgcacacttcgcaggaatcgcaagggaggagagcggcatggcctggaaagagattctcaatctcctgtataagctcctggccgccctcatacgcggtaaccgaaacaattgtgcacagttctctaacaacctggactggcttatctcaaaactggacaggctcgaatcctcaagtgggatcttggaggtgcttcattgcatcctaaccgagagccctgaggccctgaatctcattgcagaaggccacatcaaatccatcatatccctcttggacaagcacggcagaaatcataaggtcctggacattttgtgttctctatgtctgtgcaacggggtcgccgtcagagccaatcaaaatctgatttgcgataatttgctgccccgccgaaacctcctgttgcagactagactgatcaacgacgttacctccatccgtcccaatatcttcttaggagtcgccgaggggtccgcacagtataagaagtggtactttgaacttatcatcgaccaggttgacccttttctcacagctgagcccactcacttgcgggttggttgggcctcctcttcaggctatgcaccttaccccggtggcggggagggttggggagggaatggcgttggggatgatctgtactcctatggttttgacgggttacacctctggtcaggccgcatcccacgggcagtggcaagtattaatcagcatctgcttaggagcgatgacgtggtgagctgttgcctggacctcggcgtcccgtccatctcatttagaatcaacggtcagcctgttcaggggatgtttgaaaatttcaatacagacggtttgttctttcccgtcatgtcgttctcagccggagtcaaggtgaggtttttaatgggcggcagacacggtgaatttaagtttcttcctcccagcggatacgccccttgttatgaggctctactgccaaaggagaaaatgaggctcgagccagtgaaagaatataaacgggacgctgacgggattcgggacttactggggaccacccaattcttgtcacaggccagctttatcccctgccctgttgatactagtcaagtgattctccccccccatcttgagaagatacgggaccggcttgcggaaaatattcacgaactctggggcatgaacaaaatcgagctggggtggactttcgggaaaattagggatgataataagaggcagcacccgtgtcttgtggaattttcaaaattaccagagacagagaagaactataatctgcaaatgtccaccgaaacacttaaaacactgctggccctgggatgccacattgcacatgtgaacccagctgcagaggaagatttaaaaaaagtcaaactgccaaaaaattacatgatgagcaacgggtataagccggctccgctcgatctgagtgacgtaaagttgctccctccacaggaaatcctggtggacaaactggcagagaacgctcataatgtgtgggcgaaggaccggattaaacaagggtggacatacggtatccagcaggacctcaaaaacaagcggaaccctcgattggtcccatacgctcttctggatgaacgtaccaaaaagtctaatagggattctttacgagaggccgtgaggacttttgtgggttatggctacaatattgaaccctccgaccaggaactcgctgattcagccgttgagaaagtgtcaatcgacaaaattcgattcttccgagtggaacgtagctacgctgtgcgcagtggaaaatggtacttcgaattcgaggtagtgactggaggagacatgcgggtaggctgggcacgccctggttgccgcccagacgtcgaactcggggcagacgaccaggccttcgtgtttgagggcaatcggggtcagaggtggcaccaaggcagcggctactttggacggacctggcagcccggtgatgtggtcggttgcatgattaatctcgacgacgcctcaatgatattcaccctgaatggggaactgttaattacgaataaaggttcagagctagcttttgctgactatgaaattgagaatggttttgtaccaatctgctgcctggggctgagccagattggacgcatgaatcttgggaccgacgcatccacctttaagttttatacaatgtgtggtctgcaggagggctttgagccatttgccgtgaacatgaatcgcgacgtcgctatgtggttctcaaaaagattgccgaccttcgtgaacgtgcccaaagatcacccccacattgaagtcatgcgcattgatggcacaatggatagcccaccgtgcctgaaggtgacccacaaaacgttcggcacacagaattcaaacgcagatatgatttattgccgtctgagtatgccggtcgaatgccactcatcattttcacacagcccttgcctcgacagtgaggcattccagaagagaaagcagatgcaggaaatactctcacatacaactactcagtgctattacgccatccggatctttgctggacaggatcctagctgcgtctgggttgggtgggtcacccctgattaccatctgtatagtgaaaagtttgacctcaataagaattgtaccgtcaccgtgaccctcggcgacgagagaggacgagtacatgagagtgtgaagcgctccaattgttatatggtttggggcggagacatagtggctagttctcagcgcagcaaccggagcaatgtcgacctggagatcgggtgtctagtggatttagctatgggtatgctgtccttttccgccaatggtaaggagcttgggacatgctaccaggttgaacctaacacaaaagtcttcccggctgtgttcctgcagccgacttccactagcttgtttcagtttgagctgggaaagctaaaaaacgcaatgccactgagtgctgctatattcagatccgaggaaaaaaaccccgtgccccagtgtccccctaggctcgatgtgcagaccatccagcctgtgttgtggagcagaatgcccaattcatttttgaaagtagaaacggaacgggtttccgagcgccacggatgggtggtccagtgcctggagcctctgcagatgatggccctacatatcccagaagagaacaggtgcgtggacatactcgaactttgcgagcaggaggacctgatgcggttccactatcatacactcagactgtattctgctgtctgcgctctggggaatagtagagtggcgtacgcattgtgctctcacgtcgacctgagccaattgttctatgccatagataataagtacctgcctggactgctacgatccgggttttacgatctgttgatcagcattcacctggcatcagcgaaagaaagaaaactgatgatgaagaacgaatatattatccccatcacttctaccacgcgcaatattcgcctttttcctgacgaaagcaaacggcatgggctcccaggtgtgggactgcggacttgcttaaaacccggattcagattcagtaccccttgcttcgtcgtgaccggcgaggaccaccagaagcagtcgccagaaattcccttggagtcccttaggaccaaggctcttagtatgcttactgaggctgtgcagtgcagcggagcccacatcagggatccagtcggaggcagtgttgagttccaattcgtgcctgtgctaaaactcataggtacactactggtgatgggcgtatttgacgacgacgacgttaggcagattctccttttaatagatccttccgtgtttggcgagcactcagccggaaccgaggagggggccgagaaggaggaagtgactcaggttgaagaaaaggccgtggaggccggcgaaaaagcgggaaaggaggcacccgtgaagggccttcttcagacacgcttaccggaatccgtaaagctgcagatgtgtgaactcctttcctacctatgtgactgtgaattgcaacaccgagttgaagctatcgttgcttttggcgatatctatgtatctaaactacaggccaatcaaaaattcagatataacgaattaatgcaggctcttaatatgagtgcggcactcactgctaggaagaccaaagagttccggagcccgccacaggaacagatcaacatgcttcttaattttcagttgggcgagaattgcccttgtccggaagaaattcgggaagaactctatgatttccatgaagatttgctcctgcactgtggggtccctttggaagaggaggaggaagaagaggaggacacttcttggaccggaaagctgtgtgccttggtgtataagataaagggccccccaaagccagaaaaggagcagcctactgaagaggaggagcggtgcccgacaacgcttaaggagttgatttcccaaacaatgatctgctgggcacaagaggaccagatacaggactccgaactggtaagaatgatgttcaacctgctgaggagacaatatgactccatcggagaactgctgcaggctttgaggaagacctacaccattagtcatacaagcgtcagtgacaccattaacctgctggcagccttgggccagatcaggtcattgctctcagtacgcatggggaaggaggaggagttattaatgattaacggcctgggcgacatcatgaataacaaagtcttctaccagcatcctaacctcatgcgcgtgctgggaatgcatgagactgtgatggaggtgatggtgaacgttctcggaaccgagaagtctcagattgcattccccaagatggttgcgagctgctgcaggtttctgtgctatttctgtcgcatctctagacagaatcagaaggcaatgtttgaacacttgagttaccttctggagaatagctccgtggggctagcgtcacctagcatgcggggttctactcccttggatgtcgctgcatccagcgttatggataataacgagctggccctgagcctggaggagcccgatctggagaaggtcgtgacgtacctagccgggtgtggtcttcagtcatgtccaatgctgctggccaaggggtaccctgatgtgggctggaatccaatcgaaggtgagagatacttgtcattcttacggttcgctgttttcgtcaattcagagagtgtggaagaaaatgctagtgtcgtggttaagctgctgattagacgaccagagtgcttcggccccgccttgcgcggcgaaggcggtaacggtcttctcgcggcaatgcagggcgccataaaaatcagcgaaaatcctgcgctcgatctgccatctcagggctataagagggaagtgagtacaggggatgacgaggaagaagaagagatcgtgcatatgggaaatgccattatgtcattttacagcgcgttaatagacctcctgggaaggtgcgcccccgaaatgcacctcattcagaccggcaagggcgaagctatccggatcaggagcatcctgagaagtctcgtccccaccgaggacctggtggggatcatttccattcctttaaaactcccctcccttaataaagatggtagcgtgtccgagcccgacatggctgccaacttctgccctgatcacaaggcacctatggtactgttcctcgaccgggtttacggcattaaggaccagacattcctcctccacctccttgaggtcggtttcctgcccgacctgcgtgccagcgcgtccctcgatacagtttcactgtcaacaacagaagccgcactggcccttaatcgctatatatgctctgctgtgctcccactgttgacacggtgcgcccccctgttcgcaggcacagagcactgcacatccctgatcgactctacccttcagactatatatcgcctgtccaagggacgttcacttaccaaagcccagagggatactattgaggagtgcctgctcgcaatctgtaatcacttgaggcctagtatgctccaacaactgctaaggagactcgtgttcgacgtgccgcagctgaatgaatattgcaagatgccgttgaagttacttacaaatcactacgagcaatgctggaaatattactgcctaccgtccggttgggggtcgtacggactggcagtcgaggaggagcttcaccttacagaaaaacttttttgggggatctttgactccttgtctcacaaaaagtatgaccccgatctgttccgcatggctcttccttgcctctccgcaattgcaggggccctgcctcccgactacctagatacaagaatcacggccactctcgaaaaacaaatttcggtggacgcagatggaaacttcgaccccaagcctattaacaccatgaatttttctctgcccgagaagttggagtacatcgttaccaagtacgccgagcattcccacgataagtgggcatgcgacaagagtcaatctgggtggaagtatgggatcagcttagatgaaaatgttaagacccatccccttatacgcccctttaaaaccctgactgaaaaggagaaagaaatctaccggtggcctgctcgggagagcctcaagaccatgttagccgtgggttggaccgttgaaaggacgaaggaaggcgaagctctggtccaacagagggaaaacgaaaagctgaggtctgtttcccaggctaaccaagggaatagctactctcccgcaccactcgatctctcgaatgtcgttttgtctagggagctgcagggcatggtcgaggtggtggctgaaaactaccacaacatctgggctaagaaaaagaaactggagcttgagtcaaagggaggtgggtcacatcccctgttggtgccatatgacacacttaccgccaaggagaaattcaaggacagagagaaagcgcaggatctctttaagtttctacaggtgaatggaataatcgtgtcacggggcatgaaggatatggaactcgatgcttcgagcatggagaagagattcgcatataagtttctcaaaaaaatattgaaatacgtagattctgcgcaggaattcatagcccatctcgaagccatcgtcagttcgggaaagacggagaaaagcccacgggaccaggagattaaattttttgccaaggtactgctccccctggtggatcagtacttcacaagccactgcctgtattttctttcttctcctctgaagccgttatcaagctccggttatgcctcccacaaagaaaaggagatggtcgccggtttgttttgcaagctcgctgctctggtacgacaccggatatctctgtttgggtccgattctacaacaatggtaagctgcctccacattttggctcagactcttgacactagaacggtgatgaagagcggttctgaactggtcaaggctggcctgagggccttcttcgagaatgcagcggaggacctggaaaaaactagtgaaaacctgaaactaggtaaatttacccacagccggactcaaataaagggcgtgagccaaaacatcaactataccaccgtggctctgctaccgatccttacctctatcttcgagcatgttacccaacaccagtttggaatggatctcttgctgggcgacgtccagataagttgttaccatatactctgctctctgtactccctaggcacagggaagaacatttacgtggagaggcagagaccagcactcggggaatgcttggcgagtttagcagctgccatcccagtggctttccttgaacccacactgaaccgttataacccgttaagtgtgttcaacactaaaacacctcgcgaaagaagcatacttggaatgcccgacacagtagaagacatgtgccctgatataccccaactggaaggtttgatgaaggagataaatgatttggccgagtccggggccaggtacacagagatgccacatgttatagaggttatcctgccaatgctgtgtaactacctgagctactggtgggagcggggccctgagaatttgccgccctcaactggtccatgttgcacaaaggttaccagcgagcacctctctctgatcttgggaaatatactcaagatcataaataacaatttgggcatcgatgaagccagttggatgaaacgaatcgctgtctacgctcaaccaattattagcaaggccagacctgacctgctgaggtcccatttcatcccaactcttgagaagctgaaaaagaaagcggtcaagaccgtacaggaagaagaacagttaaaagctgatggcaaaggcgatacccaggaggccgagctcctcatcctggacgaatttgcggtgctctgtagagacctttacgccttctaccccatgctgattagatacgtggataacaaccgctccaattggcttaagtccccagatgccgattcagaccaactgttccgcatggtggcagaggtgtttattttgtggtgcaagagccacaactttaaacgagaagagcaaaatttcgtcattcaaaatgaaattaataatctagcattccttactggtgacagcaagtctaagatgtctaaatccggcggccaggaccaggaaagaaagaagacaaagcgtcggggagatctgtattccattcaaacctcgcttatcgtggctgccttgaagaagatgttgcccatcgggctcaatatgtgcactccgggcgatcaggagctgatcagcttggccaagtccagatactcacacagggatacagatgaagaagttagagaacacctgcggaacaacctccacctgcaagagaagtccgacgaccctgctgtcaagtggcagttaaatctgtacaaggacgtgctgaaatctgaggagccgttcaaccctgagaaaacagttgagcgcgtccagagaattagcgccgccgtttttcatctggagcaggtggagcagcccctccgctcaaagaaagcagtgtggcataagttactttccaaacaaagaaagcgagcagtggtggcctgttttagaatggcccccctttacaacctaccccggcacagatccatcaacttgttcctccacggataccaaagattctggattgaaaccgaagagtattcttttgaggaaaagttagttcaagacctggcaaagtctccaaaggtggaagaggaggaagaggaggagaccgagaagcagcccgacccactgcatcagatcattctgtactttagccgcaatgcacttacagaaaggagtaagctggaagacgacccactatatacctcctatagctccatgatggcaaaaagctgtcagtcaggcgaagacgaggaagaggacgaagacaaagagaagaccttcgaagagaaagagatggagaagcagaaaacgctttaccaacaagcccgtctccacgagcgcggagccgccgagatggtgttgcagatgatctctgccagcaagggggagatgagtccaatggtagtcgagaccctcaagctgggtattgctatcctcaatggtgggaatgcaggggtgcagcagaaaatgcttgactatctgaaagagaaaaaggacgccgggttcttccagtccctgagcggactgatgcagtcatgccggtcagtcttggacctgaatgcgtttgagcgccagaacaaagccgaggggctgggtatggtgacagaagagggcaccctgatcgtaagagagcggggagaaaaagtgctgcagaatgatgaatttactagagacctgtttcgctttctgcagctgctttgcgagggccacaattccgactttcagaattttcttagaacacagatgggcaatacaactactgtcaatgtcatcatcagcactgtcgattacctgctccgattacaggagtccatctcggacttctactggtactactctggcaaggacatcattgatgagagtggacagcacaacttctcgaaagcgcttgcagtgaccaagcagatctttaacagcctgactgaatatatccagggcccctgcattgggaaccagcaaagccttgcgcattcccgactgtgggatgccgtggtaggtttccttcacgttttcgcaaatatgcagatgaagttatcccaagactcatcccaaatcgaattgctgaaggagctcttagacctacttcaggatatggtggtgatgctgctttcattactagagggcaacgttgtcaacggaacgatagggaaacaaatggtagacacactggtagaatcctcaactaacgtcgaaatgatcttgaagttttttgatatgtttctgaaactaaaggacttgacgagtagcgacacctttaaggagtatgatcccgacggtaagggaataatctcaaagaaagaattccagaaagccatggagggtcagaagcagtacacccagagtgaaattgatttcctgctttcatgtgctgaggccgacgagaacgatatgttcaattatgtggatttcgtggaccgatttcacgaacccgccaaggatatcggttttaacgtagctgtgttgctgactaacctgagcgagcatatgccgaacgattcgcgactgaagtgcctgctggaccctgcagagagtgtgctgaactacttcgaaccctacctgggaagaattgagataatgggtggcgccaaaaaaattgagcgggtgtacttcgagatcagcgaaagcagtaggactcagtgggaaaagccacaagtgaaggaatccaaaaggcaattcatattcgacgtcgttaatgaggggggcgaacaggaaaaaatggaactattcgttaatttttgtgaggacactatctttgagatgcagcttgccagtcagatcagcgaaagcgatagcgccgacagaccagaggaggaagaagaagatgaggattcttcttacgtgcttgaaatcgccggagaagaggaagaggacggtagcctcgaaccggccagtgcattcgcaatggcctgcgcttcagtaaaacgtaacgtcacagatttcctgaaacgggccacactcaaaaacctgaggaaacagtacaggaatgtgaaaaaaatgactgctaaagagttggtgaaagtgctgtttagtttcttctggatgttgttcgtgggcttattccagctccttttcactatcctcggtggaatatttcagattctctggtctactgtgtttggaggcgggctggtagagggcgcgaagaacattagggtgactaaaattctgggagatatgcctgacccgactcagttcggaattcacgatgacaccatggaggcggaacgcgcggaggtgatggaacccggaatcaccacagagctcgtgcactttatcaagggcgaaaagggagacacggatatcatgtcggacttatttgggctccatccaaagaaagagggatctcttaaacatggaccggaagtcgggttgggggacctgtcagaaattatagggaaagatgagccacccaccctagagagcactgtacaaaaaaagcgcaaagcgcaggctgcggaaatgaaggcggccaacgaggctgagggaaaagtggagtccgagaaggctgacatggaagatggggaaaaagaggacaaagataaagaagaagaacaagcagaatatctgtggaccgaggtgactaagaagaagaaacgacggtgcggtcagaaggtcgagaaaccagaagcatttaccgcaaacttcttcaaaggcctcgagatttaccagactaaactgctccactacttggcccgtaatttctataatctgaggtttctcgccttattcgtggcctttgcaataaacttcatcttgctgttctataaagtcacggaggaacccctggaagaggaaactgaagatgtggcaaacctttggaatagctttaatgatgaagaagaggaagaggcgatggttttcttcgtcctgcaggagtccacaggctatatggccccgaccctgcgggccctcgccatcattcatacgatcatttcgctggtgtgtgtggttggatattattgcctcaaggtaccacttgtggttttcaaacgggagaaagagatcgccagaaaacttgaattcgacggcctatacataaccgagcaacctagtgaggatgatattaagggccagtgggaccggctagttattaatactcctagtttcccaaacaattattgggataaatttgtaaaacggaaggtgatcaacaagtacggcgacctttacggggctgaacgaatcgcagaacttctgggactcgataaaaatgcactagatttcagtccggtggaagagaccaaggccgaggcagccagcctggtcagctggttgtcaagcatcgacatgaagtatcacatatggaaattgggagtggtgttcactgacaactcctttctgtatttagcctggtatactacgatgagtgttctggggcattataacaatttcttctttgccgcccacctcctggatatcgcaatggggttcaagaccctgagaacgattctgagctcagtgacacacaatgggaaacagttggtgctaactgtcggacttctggccgttgttgtttatttgtacacagtggttgctttcaacttcttccggaaattctataataagtctgaggacgacgatgaaccagacatgaaatgcgacgatatgatgacttgttatctttttcacatgtatgttggagttcgagctggcggagggattggcgacgaaatagaagatccagcaggagacccctacgaaatgtatcgtattgttttcgatatcacatttttcttctttgttatcgtcatcctcctggctatcatccagggattaatcattgatgcctttggcgagctgagagatcagcaggaacaggtccgtgaggatatggaaaccaagtgtttcatttgcggtattggcaatgattacttcgacacgaccccgcacggttttgaaactcacacgctccaagagcataatctagcgaactacctgttcttccttatgtaccttattaataaagacgaaacagaacatacaggacaggagagctatgtttggaaaatgtaccaggaaagatgctgggacttttttcccgccggtgattgctttaggaagcagtatgaagaccagctcggatag

SEQ ID NO: 204112 - DNA, 14613 bp, synthetic construct
  misc_feature 1..14613: note = Description of Artificial Sequence: Synthetic coding sequence
  source 1..14613: mol_type = other DNA
atggccgagggcggcgagggcggcgaggacgagatccagttcctgcgcactgaggatgaggtggtgttgcagtgtatcgccactattcacaaagaacagaggaagttctgtctggcagcggaggggttgggcaacaggctgtgtttcctggaacccacctccgaagccaagtacatccctccagatctgtgcgtgtgcaactttgtattggaacagtcgctcagcgtccgggcactccaggagatgctggccaacactggggagaacggcggtgaaggcgccgcccagggcggcggtcaccggactctgctgtatggacacgcagtgctgcttcgccactcatttagtggcatgtatcttacgtgtctgactacttcccgctcgcaaacagacaagctggctttcgacgttggcctgagagaacacgccacaggggaggcgtgttggtggaccattcatcctgccagtaagcagcggagcgaaggggagaaagtgcgcatcggcgatgacctgatcttagtgagcgtgagtagtgaacgctacttacacctgagcgtatccaatggcaacatccaggtggacgcgagtttcatgcagacgttgtggaatgttcacccaacgtgctcagggagttccatcgaggagggctatctgttggggggacacgtcgtgcgtttattccacggtcatgacgagtgcttaactattccttccactgatcagaacgattcccagcataggcgtattttttatgaggccggcggcgccggtacgagagcacgctcactctggagggttgaacccctgcgaatctcatggtcaggctccaatattaggtggggacaagccttcaggctgcggcaccttacgacagggcattatcttgcactgacagaggaccaaggcctaatcctgcaggatagagccaagtccgatactaagtctacggccttctccttccgcgcctcaaaagaactgaaggagaagctggattcttcccataagcgagacattgaaggcatgggggtccctgaaatcaaatatggagacagtgtgtgctttgttcagcacattgcctctggcttgtgggttacctataaggctcaagacgctaaaacatctagattagggcccctaaagagaaaggttattctgcaccaggagggccatatggacgacggcctcacattacagcgatgtcagcgggaggaatcccaggccgctaggatcatccgcaatacgacagcactttttagtcaattcgtctctggaaataataggacggccgcacccatcactctcccaatagaggaggtgctgcagactttgcaagacctgatcgcctactttcagcctcctgaggaggaaatgcggcatgaagataagcagaataagctgagaagccttaagaatcgccaaaaccttttcaaggaagagggcatgctcgcgctggtattgaactgcatcgatagactaaatgtgtacaactccgtggctcattttgcaggcattgctagagaggagtctggaatggcatggaaagaaattctcaacttactttacaaactgcttgccgcgttaattcgtgggaaccggaacaactgtgcccagttcagcaacaatcttgattggctcatttccaagctcgatcggcttgagtcctcatcgggaatactggaggtgctgcactgcatattaaccgagtccccagaggccttgaaccttattgcggagggacacataaaaagtattattagccttctggacaaacatggccggaatcacaaagtgctcgatattttatgctcactctgcctgtgcaacggagtggcagtacgcgccaatcagaaccttatctgcgacaatctcctgccgcgccgcaatttactcttgcagacacggcttattaacgacgtgactagtatcaggcctaatatcttcctcggcgtcgcagagggcagcgcccagtacaaaaagtggtatttcgagttgatcatagaccaggtcgacccgtttctgacagctgagccaacgcatctccgggtaggctgggcttcttcatccggctatgccccttaccccggaggcggggagggctggggcggcaacggggtgggcgacgacctgtactcatacggttttgacgggctgcacctgtggagcggacgaattccgcgagcggtagcctctattaaccagcatcttttgagatcagacgatgtggtgagctgttgtctcgatctcggtgtgccaagtataagtttccgcatcaatggccagccagtccaaggaatgttcgagaactttaataccgacggcctgttctttcctgtcatgtcttttagcgctggggttaaagtccggtttctgatgggcggccggcatggtgaatttaaattccttcccccatcaggatacgccccctgttacgaggcgctgctccctaaagagaaaatgcgactggagccagtgaaagaatataagcgtgatgccgatggaataagggatctgctgggtacgacacaattcctatcacaggcctcgtttatcccatgccccgtggatacgtcacaggtgatactgcctcctcacctggaaaagatccgggataggctggccgagaatatccacgaactctggggcatgaacaagatagagctcggatggacgttcggaaagatccgggacgacaataaaagacaacatccctgcctcgtcgagttttctaaactccccgagactgagaagaattacaacctgcagatgtccaccgaaaccctgaaaactctattggccctcggctgtcatattgcgcatgttaaccctgctgccgaggaggacctcaaaaaggtgaagctgccgaaaaactacatgatgtcaaacgggtacaaacccgcgccattagatctgtcagacgtcaaactcctaccaccacaggagatacttgtggataaacttgctgaaaatgcccataatgtctgggcaaaggaccgcattaagcaaggatggacctacgggattcaacaggacctgaaaaacaagcgaaatccacgcctcgtcccttacgccctgctggatgaaagaactaagaagtccaaccgagattccctgagagaagccgtccggacatttgtcggatatggctacaacatcgagccaagcgatcaggagctggccgactctgccgtggaaaaagtctcgattgataagattagattttttcgagtggagaggtcatatgccgttcgatccggaaaatggtacttcgagtttgaggtcgttaccggaggggacatgcgcgtgggctgggccagacccggttgtaggcctgacgtcgagctaggggcagacgaccaagcattcgtgttcgaggggaatcgaggccagagatggcaccaggggagcggatatttcggcaggacatggcagccgggagatgtcgtcggatgtatgatcaacttagatgatgccagtatgatcttcactctgaacggggagctactgatcactaacaaaggatccgagcttgccttcgccgattacgaaattgagaatgggtttgtcccaatttgctgtctcggcttatctcagattgggcgcatgaacctaggtacagatgccagcacatttaaattctacaccatgtgcggactacaggagggtttcgaaccttttgccgtcaacatgaaccgtgacgtcgccatgtggttttctaagcgccttcctactttcgttaatgtgcctaaggaccacccgcacatagaggtgatgagaatcgacggaacaatggactcacccccgtgcctgaaggtcactcacaagaccttcggtacccaaaatagtaatgctgacatgatttattgtagactgtccatgccggtcgaatgccattcctctttctcacacagcccttgtctggacagcgaggcatttcagaagaggaagcagatgcaagagatcctgtcgcacaccactacacagtgttattatgcaattagaatattcgctggccaggacccttcatgtgtctgggtgggttgggtaacccccgactaccacctgtactcggaaaagtttgatctcaacaagaattgtactgttaccgtgacccttggagatgaaagagggcgagtgcacgagtccgtaaaaaggtccaattgctacatggtttggggcggtgatatagtagcctcttcgcagcgtagcaatcggtccaatgtcgaccttgaaattggctgcttggtggatctagccatggggatgttaagcttcagcgcaaatggaaaggaattaggaacatgttaccaggtcgagcctaacacaaaggtgttccctgccgttttcctgcagccaactagcacctcactgttccagttcgaactcggcaagcttaagaacgctatgccactgtctgctgctatattccggtcggaagaaaagaatcccgtaccccaatgtccacctagacttgatgttcagacgatccagcctgtcctttggagccgtatgccaaatagttttctgaaagtggaaactgagagggtttccgagcggcacggttgggtggtacagtgcctggaaccactgcagatgatggctctgcacattccggaggagaatagatgtgtagatatactggaactctgtgaacaggaagatctgatgaggttccattatcacacactcaggttgtattctgcagtgtgcgctttgggtaacagtcgagtggcatacgccctgtgcagtcacgtcgacctcagtcagctattctacgcaatcgacaataagtacctgcccggccttttacggagcgggttctacgatcttctcatctcaatccatttggctagtgcaaaggagaggaaactcatgatgaaaaatgaatatataataccaataacgtctactactaggaacatcaggctgttcccagacgagtcgaagcgccatggtctgcccggcgtgggcttgaggacatgcctgaagcctggatttaggttttctaccccatgcttcgttgtgaccggtgaggatcatcaaaaacaaagccccgaaatccctctcgaaagcttaagaactaaggccctcagcatgctaactgaagccgttcaatgcagtggagcccatattcgcgatccggtgggtggctcggtggagttccagtttgttcccgttctgaagctgataggcacgctactagtgatgggagtgtttgacgacgatgatgtccgccagattcttcttctgatcgacccgtccgtgttcggcgaacactcagccggaaccgaggagggagcagagaaagaagaggtcacccaggtcgaggagaaagccgtcgaggcaggcgaaaaagccgggaaggaagcccccgtcaaggggttactgcagacacgactcccagagagcgtaaaactgcagatgtgcgaattactgtcttacctgtgtgactgtgagcttcagcaccgcgtggaggctatcgttgcttttggggatatatatgtttcaaagctgcaggccaatcaaaagttccgatacaatgaactgatgcaggcactgaacatgtccgccgcgctcacagccagaaagacgaaggagttcaggtcgcctccccaggaacagataaacatgctgctgaacttccagctgggcgagaactgcccctgtcctgaggaaatcagggaagagctgtatgacttccatgaagatctcctcctccactgcggcgtgcctctcgaggaagaagaggaagaagaagaggatacctcctggaccgggaagctttgcgccctcgtctataagattaagggcccacccaagccagaaaaagagcagcctaccgaggaggaagaaagatgtcctacaacactgaaagagctgatatcacagacaatgatttgttgggcccaagaggaccagatccaggattccgaactggttcggatgatgtttaatttgctcagaaggcagtatgacagcatcggggagctgctgcaagctctcaggaaaacatacactatcagtcacacatcagtctccgatacgatcaacctgttagccgcattaggtcagatccggtcactgctgagcgtgcgaatgggaaaggaggaggaactgctgatgataaatggtctcggcgacattatgaacaacaaggtattttatcagcaccctaatctcatgcgggtgctggggatgcacgagacggtgatggaagttatggtcaatgtcctgggaacagaaaaatcacagatcgcctttcccaaaatggtggcctcttgttgccgctttctctgctacttctgcagaatttcacgacagaatcagaaggctatgttcgagcacttaagctacctgctggaaaattcctccgtgggactggcctccccttctatgagagggtcaacaccccttgatgtcgccgcctctagtgtgatggacaacaacgaactggcattatccttggaagaaccagatctggaaaaagtcgtgacttatctggctggctgtggactgcagtcgtgccctatgttgctggcaaagggctacccggacgttggctggaatcccatagaaggcgagcgatacctgtctttcttgagattcgccgttttcgtgaattccgagtctgtggaagaaaatgcaagtgtggtcgtgaagctgttaattcgtaggcccgaatgttttgggccagcactccgaggcgaaggggggaacggcctacttgcagctatgcagggtgccatcaagatctctgaaaaccccgctctggacctacctagtcagggttacaagagagaggtcagcactggcgatgatgaggaggaagaggagattgtccacatggggaatgccatcatgagtttctactctgccctaatcgacctgctaggcaggtgcgccccagagatgcacttgatacagacaggtaaaggcgaggccatcagaatccgcagtatcctgcgttccctggtccccactgaggacctcgtcggcattatctccatcccactgaagctgcctagtctcaataaggacggcagtgtctcagagcctgacatggcggcaaacttttgccctgatcacaaagcccctatggttctcttcctggacagggtgtatggcattaaagaccagacattcctgttgcaccttcttgaagtgggatttttgccagacctacgagcttctgcgtccctggacaccgtttccctgagcaccaccgaagctgccctggcgttgaatcggtatatatgttcagccgtgctgcccctcctgaccaggtgtgccccgctcttcgccggcactgagcattgcactagtcttatcgatagtaccctgcaaaccatctaccgtttgagcaagggccggagtctcacaaaagctcagagagatacaatcgaggaatgcttgctcgccatctgtaaccacctgagaccttctatgctccaacagctcctccgaaggcttgtgtttgacgtcccccaactcaatgagtactgtaaaatgcccctcaagcttttgacaaaccactacgaacagtgttggaaatactactgtctgccctccggatgggggagttacgggctcgcggtggaagaggagctgcatctcaccgagaagctcttctgggggattttcgattcactgtcgcataaaaaatatgatcccgacctctttcggatggctctgccgtgtctgtccgcaatcgccggcgctctgccccccgactacctagacacccggatcaccgcgactctcgagaaacagatttctgtcgacgccgatgggaattttgatcccaagccaattaacacaatgaatttttctctaccagagaaattggaatatattgttactaagtacgccgagcactcacatgataagtgggcctgtgataagtcccaatccgggtggaagtacggtatctccctggacgaaaacgtgaaaacgcatccactgatccgcccgttcaaaactctcactgagaaggagaaggaaatatatcgttggcccgctcgtgagagcttaaagacaatgctagcggtgggttggacagttgagagaaccaaggaaggcgaggctctggtacagcaaagagagaatgagaaattgcggagcgtatcccaggcaaatcaggggaactcatactcacctgcgcctctggacctttccaacgtggtgttatctagagagctacaggggatggtggaggtggtggcagagaattatcacaatatttgggcaaagaaaaaaaaattggagctagaaagcaaaggaggtggaagccaccccttactagtcccgtatgatactctgacagcaaaggagaagttcaaggaccgcgagaaggcccaagacctgttcaagttcctgcaagtgaacgggataattgtcagtagggggatgaaagatatggaattggacgcgagttcaatggagaaacggtttgcctataagttcttgaagaagattctgaagtatgtggatagtgcccaggagttcattgcccatctcgaggcaatcgtgtcaagcggcaagacagaaaagagccctcgtgaccaggaaatcaagttctttgcaaaggtactcctgccacttgtggaccaatacttcacctcccattgcctctacttcctgtcctcaccgctcaagcctttgagctcgtctggttatgcctctcacaaggaaaaggagatggtggctgggctgttctgtaagcttgctgcccttgtgcggcatagaatctcattgtttggcagcgatagtaccaccatggtttcctgcctgcacatactggcccagacactcgatacacgtacggttatgaaaagcggatcagagttggtgaaagccggactccgcgcctttttcgagaatgccgccgaagatctggagaagactagcgagaatctgaagttgggtaagttcacccactcacggactcaaattaagggagtcagccaaaacattaactatactaccgtggcccttctgccaatcctcactagcatttttgaacatgttacacagcaccagttcggcatggacctgctacttggggacgtccagatttcttgctatcatattttgtgttcactgtatagccttggcacaggaaagaatatttatgtagagagacagcggccagcgcttggtgaatgtttggcatcactcgcggccgctatacccgttgcctttctggagcccaccttaaaccgatacaaccccctttcagtctttaatacaaagactccccgggagcgttccattctgggaatgccagatacagtcgaggatatgtgcccagacatccctcaattggagggactgatgaaggaaatcaatgaccttgcagaatccggcgctaggtatacggagatgccccatgtgatagaagtaatccttcctatgctgtgtaactaccttagctattggtgggagcgcggacccgaaaacttgcccccttccacagggccttgctgtactaaagtgacctccgagcatttgagcctcatactcgggaatattctgaagattattaataacaacctggggatagatgaggcatcctggatgaaacgcatcgctgtgtatgcgcagcccatcatctcaaaagctcgacccgatttactgagatcccattttattcctaccctggaaaagctgaaaaagaaagctgtgaaaaccgtccaggaagaggagcagctgaaagctgacgggaagggtgacacccaagaggccgagctccttatcctggacgagttcgctgttctatgtcgcgacctatacgccttctacccgatgttgattcgatatgttgacaacaataggagtaattggctaaagtccccggatgccgactcagaccagttgttccggatggtcgctgaagtttttattctctggtgcaaatcccacaattttaagcgcgaggaacagaactttgtgatccagaacgaaatcaataacttggctttcttaacaggagacagtaaatcaaaaatgtctaaggcaatgcaggtgaagtccggcggccaagatcaagaacggaaaaaaactaaacgacgtggcgatctctattctatccagacaagcttaatagtggccgccctgaaaaaaatgcttcccattggactcaacatgtgcactcccggagatcaggaacttataagtctggctaagtctaggtatagtcaccgggatacggacgaggaagttagggaacacttacgtaacaatctgcaccttcaggaaaagtctgacgatccagccgttaaatggcagctcaacctctacaaggatgtcctgaagtctgaggagcctttcaaccctgaaaaaaccgtggagagggtccaaaggatatccgcagctgtcttccacttagagcaggtggaacagcctcttagaagcaagaaagccgtgtggcacaaattactttctaagcagcgcaagagggctgtcgtggcgtgctttcgaatggcgccgctttataatttgcctcggcatcgaagcataaatctttttctccacggctatcagaggttttggatcgagaccgaggagtacagcttcgaggaaaaacttgtgcaagatcttgctaagtctcctaaggtggaagaggaggaggaagaagaaacagaaaagcaacctgacccccttcaccagatcattttgtatttcagcaggaatgcactgactgaacgtagcaagctggaagacgatcccctgtacacatcttatagtagcatgatggccaagagttgtcagtctggcgaggatgaagaagaagatgaagataaggaaaagaccttcgaggagaaggaaatggaaaaacagaaaactctctaccagcaggcacgactgcatgaaagaggcgcagctgaaatggtcctgcagatgatctcagcctctaagggcgaaatgagtcctatggtagtggaaacactgaaattggggatcgctattctgaacggcggcaatgctggagtgcaacagaagatgttagattacctcaaggaaaagaaagatgctggctttttccagtcactgtcgggtttaatgcaatcttgttctgtgctagacctaaatgcttttgaacgacagaacaaggctgaggggctaggcatggttacggaagagggcactctgatcgttagagagcgtggagaaaaagtgcttcagaatgacgagtttactcgggacttattcaggttcctccaactattgtgcgaggggcataattcagactttcaaaatttccttcgaactcaaatggggaacaccactacagtcaacgtgatcataagcacagtggactatctcttgaggcttcaggagtcaattagcgatttctactggtactactctggcaaagatattatcgacgaatcaggccagcacaattttagtaaagcactcgcggtgacaaagcagatcttcaattccttaaccgaatatatacagggaccatgtattggcaatcagcagtccctagcgcatagtcggctttgggacgcagtggttggcttcctgcatgtgtttgcaaatatgcagatgaagttatctcaggattcctctcagatcgaactgctcaaggaactcctggacctgctacaggatatggtggtcatgctgctgagcctcttggaagggaacgtggtgaatggaacaatcggcaagcagatggtcgacactctcgtggagtcctccaccaacgtagaaatgatactcaagttctttgacatgttcctgaaactgaaagacctgacttcctcggacacttttaaggaatacgatccagacggcaagggcattatttccaagaaggaatttcaaaaggctatggagggacagaaacaatacacacagtcagagatcgattttctcctgtcctgcgctgaagctgacgagaacgacatgttcaattatgtcgacttcgttgatagattccatgaacccgcaaaagacataggatttaatgtggcagtcctgcttaccaatctgtccgagcatatgcccaatgactcccgattaaagtgcctgctggacccagcagagagcgtgctgaactattttgaaccatatttgggccggatcgaaatcatggggggggccaagaagatcgaacgcgtgtactttgagatctccgagagctcgcggactcaatgggagaagccccaggtaaaagaaagcaaaagacagtttatttttgacgtagtcaatgagggtggcgaacaggaaaagatggagctgttcgttaacttttgcgaggacaccatttttgagatgcagttggctagccagatctctgagagtgattctgccgatagacccgaggaagaggaggaagatgaagactcttcgtatgtgttggagatagcgggcgaagaagaggaagacggatccctagagccggcctctgcttttgctatggcatgtgcctcggtgaaacgaaatgtcaccgactttctcaaaagagcaactttgaaaaatctgagaaaacagtacagaaatgtgaagaagatgaccgcaaaggaactcgtgaaggtcctgttttccttcttctggatgttgttcgtaggactgtttcagctattattcaccatccttggcggaatttttcaaatcttgtggtctacagtctttggcggagggctggtagaaggcgccaagaatattcgggtgaccaaaatcctcggcgacatgccagatccaacacagttcggcatccacgatgataccatggaagccgagagagcggaggtgatggaaccggggattacaacagaactggtccatttcatcaagggcgaaaagggtgacaccgacatcatgagcgatctctttggattacaccctaagaaggaaggcagtttgaaacacggaccagaggtgggactcggcgatctcagtgaaataataggtaaggacgaaccacctaccctggaatctactgtgcagaagaagcgcaaggcacaggccgccgagatgaaagctgcaaatgaggctgaggggaaagtggaaagcgagaaggctgacatggaggatggtgagaaagaggacaaggataaggaagaagaacaggctgaatatctgtggacagaggtcaccaagaaaaagaagcgccgatgcggtcagaaggtggagaagccagaggccttcactgccaatttcttcaagggacttgagatctatcagaccaagcttctgcattacttagctcgcaacttctacaatttaaggttcctggcattgttcgtggctttcgccatcaattttatactgctattttacaaggtgacagaggaaccactggaagaggaaaccgaggacgttgccaacttatggaacagctttaacgatgaagaagaggaggaagccatggttttctttgttcttcaggaaagtaccggttacatggccccaactctcagggccctcgcaataatccatacaattatatcactggtgtgcgtggtcggctactattgcctcaaagtgccactggtcgtgttcaagagagagaaagagatcgcacgcaaactggaatttgacggactttacattactgaacagcccagtgaagacgatatcaaaggccaatgggatcggctcgtgattaacaccccatcgtttcctaacaactattgggataagtttgttaaacgaaaggtaattaataaatacggtgatctgtacggcgctgaaagaattgctgagctcctgggcctggacaagaatgccttagatttctctcccgtggaagaaacaaaggcagaggcagcttccctggtctcctggctgagttccatcgatatgaaatatcacatttggaaattgggcgtggtctttacagacaattcatttctttaccttgcttggtacacaactatgtctgtgcttgggcactataacaatttcttcttcgctgctcatttgctagatatagctatgggattcaaaacgctccggaccatcttgtccagcgtaactcataatgggaaacagcttgtgctgacagtcgggctgctcgcggttgtggtgtacctgtataccgtggtagcctttaacttcttcagaaagttttacaacaagtccgaggatgacgatgagcctgatatgaagtgtgacgatatgatgacctgctacctttttcacatgtacgtgggtgtgagagccgggggcggcatcggggatgagattgaggatcctgccggtgacccatacgagatgtatcgtattgtgtttgatataacattcttttttttcgtcatcgttattttattggcgattattcagggcctcatcatcgacgctttcggagaactgcgggatcagcaggaacaggtcagggaagacatggaaactaagtgctttatctgtggaattggcaacgattactttgataccacaccgcacgggtttgagacccatacgcttcaggagcacaacctagccaactatctattcttcctgatgtatctaatcaataaagatgagacagaacacaccggccaggagtcctatgtatggaaaatgtaccaagaacggtgttgggatttctttcccgctggagattgctttcgaaagcagtacgaggaccagttggggtag

SEQ ID NO: 204113 - DNA, 14598 bp, synthetic construct
  misc_feature 1..14598: note = Description of Artificial Sequence: Synthetic coding sequence
  source 1..14598: mol_type = other DNA
atggccgagggcggcgagggcggcgaggacgagatccagttcctgcgcacagaagacgaagttgtgctccagtgtatcgcaactatccacaaggagcagcgcaagttttgtctggccgcagagggattaggcaatcggctgtgttttctggaaccaacatctgaagcaaaatacatcccaccagatctctgcgtgtgtaatttcgtgctggagcagagcctgtcagtgagagccctgcaggagatgctcgctaacactggagagaatgggggagagggggcagcccagggaggaggacatagaacacttctttatggacacgcagtcctcttgagacattctttttccggaatgtatctcacatgcctcaccacctctcgatcccagacggacaaactcgctttcgatgtcggcctaagagagcacgcaactggtgaagcatgctggtggaccattcatccagcgtccaagcagcggagcgagggtgagaaagtgcgcattggagatgatctgattctggtcagcgtgagctcagagcgatacctgcacctgtctgtaagtaacggcaatatccaggtggatgccagcttcatgcagactctttggaacgtgcacccgacatgctccggctcatctatcgaggagggctacctgctgggcgggcacgtagtgcgtctcttccacggccacgacgagtgcttgacaataccctcaaccgaccagaacgattctcagcacagacggatattctacgaggctggcggagcaggaactagagcaagatcgctgtggcgagtcgagcctctgcggatctcctggtctgggagcaatatcaggtggggccaggcgttcagactacgacatctgactaccggtcattatctggccctgaccgaggatcaggggttgattctgcaggatcgggccaaaagcgacactaagagcaccgccttttcatttagagcgagcaaggagcttaaggagaagttagattcttcccacaaaagggacatcgaagggatgggcgttcctgaaatcaaatatggggatagcgtgtgctttgttcaacacatcgcttccgggctctgggtgacatataaggcgcaagacgcaaagacatctaggttgggtcctcttaaaagaaaggttatattacaccaggaagggcacatggatgatggccttacgctgcagcgctgtcagcgagaggaatcccaagcagcaaggatcatcaggaacactaccgcactattctcacagttcgtgtctggcaacaatcgtaccgctgcaccgataacgctccctatagaagaggtcctgcaaacgctacaggaccttatcgcctactttcagccacccgaggaggaaatgaggcacgaggacaagcagaataaacttcggtcattgaaaaatcggcaaaacctgtttaaggaggagggcatgctagctctggttctaaattgtattgataggctaaacgtatataattcagtcgctcatttcgcgggaattgctcgcgaggaatcaggaatggcatggaaagaaatcctgaatttgctctataaactcttggccgccctgattcggggaaatagaaataactgtgctcagttcagcaacaatcttgactggttaattagtaagttagatagactcgagagctcctccggcatactggaggtactgcactgcattttgaccgagagtccggaagctctgaatttgattgccgagggtcatatcaagtccatcatatcactcttggataagcacggacggaaccataaagtattggatatcctgtgtagcttatgtctctgcaatggcgtggccgtgagggctaaccagaatttgatctgtgataacctgctgcctcgcaggaacctgctgttacagacgcggttgatcaacgatgtgacttcaatccgcccaaacatctttcttggtgtggctgaaggttctgcacagtacaagaagtggtacttcgagcttattattgaccaggtcgaccccttcctgaccgcagagcccacacaccttcgagtcggctgggcctcgtcgtcaggctacgctccttaccccggcggtggcgagggctgggggggcaacggggtgggagatgacttatacagctacggctttgacggtctccacttatggagcggccgtatccctcgggctgtggcctctatcaaccagcacctgctgagatctgacgatgtggtgtcgtgctgcctggaccttggagtgccttccatttctttccggatcaatgggcaacctgtgcagggcatgttcgaaaactttaacactgacggcctgttctttcccgtgatgagctttagtgccggggttaaagtacggtttctgatgggtggtaggcacggcgagttcaaatttctgccacccagcggatatgccccctgttacgaggcactactgccaaaagaaaaaatgaggctggagcctgtgaaggaatacaagcgagacgctgacggtattagagacttgctgggcacaactcagtttcttagccaggccagcttcataccttgccctgtcgatactagccaggttatcttgcctccgcatttagagaaaatacgagatcgtctggccgagaacattcacgagctgtgggggatgaataaaatcgagttaggatggaccttcggcaagattagagatgataataagcgtcagcatccctgtcttgtcgaattctctaaattgccggaaacagaaaaaaactataatctgcaaatgagcacagaaactcttaaaactttgctggccctcgggtgccatattgctcatgttaaccccgcagcggaggaagacctcaagaaagtaaaattgcctaagaattacatgatgagcaacggctataagccagcacccttggacctgagtgatgtcaagctgcttcctccacaggagatcctggtcgataaacttgctgagaacgcgcacaatgtgtgggcaaaggaccgcatcaaacaaggttggacttacggcattcagcaggatctgaagaacaaacggaatccgcggttggtgccttatgcactcctggacgagaggacaaaaaaatcaaatagggattcgctacgtgaggctgtgcgaacatttgtgggctacggttacaatatagagccctcagaccaagaattggccgacagtgctgttgagaaagtgagcattgataaaatccgcttcttcagggttgagcggtcatacgcagtgcgaagtggaaaatggtactttgagtttgaggtcgtgacaggcggcgatatgcgcgtcggttgggccagacctggatgtcgccctgacgtggagctgggcgcagacgatcaggcattcgtcttcgaagggaaccgcggccaacggtggcaccagggcagcggatattttggtcgaacgtggcagcccggagatgtggttggctgcatgatcaatctggatgacgctagcatgatctttacccttaatggagaattactgatcactaacaagggcagtgaactggcattcgccgactatgagatcgaaaacggcttcgtgccgatttgctgtttggggctgtcccagattggtcgaatgaacctcggcactgatgctagcacatttaagttctatacaatgtgtggccttcaagaaggtttcgaaccttttgcggtgaacatgaatcgcgacgtggccatgtggtttagcaagcgactgccgacctttgtaaatgttccaaaggaccacccacatattgaagtgatgcggatcgatggcacgatggattctcccccttgtctgaaggtgacacacaaaacatttggaacacagaacagcaatgccgatatgatctactgtcggctatcgatgccagtggagtgccatagttcattctctcatagcccgtgtcttgatagcgaggcgtttcagaagcgcaagcagatgcaggaaattctgtctcacacaaccactcagtgttactacgccatcaggattttcgcaggtcaggatcctagctgtgtctgggttggctgggtaacgccagactatcatctttatagtgaaaaatttgacctcaacaagaattgtactgtcacggtcacactaggcgacgagcgggggcgggtgcacgagtcggtgaaaaggtcaaactgttatatggtatggggcggcgacattgtggcttcttcacagcgaagtaaccgttctaacgtggatctggagatcgggtgtctggttgatcttgctatgggcatgctgagcttcagcgccaacggaaaggagctgggtacttgctaccaggtggaaccgaatactaaggtctttccagccgtctttctgcagccgacaagtactagcctatttcagtttgagttaggcaagctgaagaacgccatgcccttatcggctgccatttttcgcagtgaggagaaaaaccctgttccgcagtgccctccgcgtctggacgtgcaaaccatccagcccgtactgtggtccaggatgccaaattctttcttgaaggtggaaaccgaaagggtgagtgagaggcatggctgggtggtccagtgcctcgaaccactgcagatgatggccctgcacattcccgaggagaatcgatgcgtggacattctcgagctgtgtgaacaggaagacctgatgaggttccattatcacacactcaggctgtactccgccgtgtgcgcccttgggaacagccgcgtcgcgtatgcattatgttcacatgtcgatctctcccagctattctacgccattgacaataagtatttgccaggactcttgcgcagcggtttttatgatctgctcatttctatccacctggcttctgctaaggaaagaaagctcatgatgaaaaacgagtatatcattcctattactagcacaactagaaatatcaggctgttcccagacgagtcgaaaagacacggcttacctggtgtcggcctgaggacatgcctaaagccaggatttcgcttcagtaccccatgctttgtggtcacaggagaagaccaccagaaacagagtccagagatccccctcgagagccttaggaccaaggccttgtccatgctcaccgaagcggtccaatgctctggagctcacataagagaccctgtcggaggatctgtcgagttccagttcgtgcccgtcctgaagctgatagggacactgctcgtgatgggtgtgttcgatgacgacgatgtccggcagattctcctgctcatcgatccaagcgttttcggagaacactctgctggaacagaggagggcgccgagaaggaagaggtgacacaggtcgaggagaaggcagtggaggcaggagaaaaagccggcaaggaggcccccgtgaagggtctcctccagacacgtctgcctgagtctgtgaaacttcaaatgtgcgaattgctgtcttatctgtgcgactgtgagctccagcaccgggtggaggctattgtcgcctttggggatatatacgtttcgaagctgcaggccaatcagaagtttcgatataatgagctcatgcaagccctcaacatgtccgccgccctgaccgcccggaagaccaaggagttcagaagccctcctcaagaacaaataaatatgctgctgaatttccagctcggagaaaattgcccttgccccgaggagattagggaagaactttacgacttccatgaagacttgctccttcactgcggcgtccctttggaagaggaagaagaggaggaagaagatacctcatggacaggtaagctttgtgccctcgtttataagattaaaggaccacccaagccggagaaagagcagccaaccgaagaggaggaaagatgccccacaacactcaaagagctgatctcccaaactatgatctgctgggctcaggaggaccaaatccaggattccgaattagttaggatgatgtttaatctgctaaggcgacagtatgactccattggggaacttttacaggcgctgagaaaaacatacacaataagccacacatccgtttccgatacaatcaatctgctggccgctctgggccagattcggtcacttctgtcggtgcgcatgggcaaggaggaggagctgttgatgatcaatgggcttggagacatcatgaataacaaggtgttctaccagcaccccaacctcatgagggtcctgggcatgcatgaaacagtgatggaagtcatggtgaacgttctcgggaccgaaaagtcccaaatcgcgttccctaagatggtggcttcgtgctgcagatttctgtgctacttttgcagaatctctcgccaaaaccaaaaggctatgttcgagcatttgtcttacctcctcgagaattcatcagtgggccttgccagcccaagcatgagggggtcaacccctcttgatgtcgctgcttcatccgtaatggacaataacgagttagccctatctcttgaggaacccgatttggagaaggttgtgacttatctggcaggctgtggacttcagagttgtccaatgcttcttgcaaaagggtatcccgatgtgggatggaatcctattgaaggcgaacgctacttgtcatttctgagatttgcagtgttcgttaactcagaaagtgttgaagagaatgcaagtgtcgtcgtgaagctccttatcagaaggccggaatgtttcggaccggccctccgcggtgaaggaggtaatgggctgctggcagccatgcagggagctattaaaatcagcgagaaccccgcacttgatctgccttcacagggttataaacgggaagtgagtaccggagacgatgaagaagaggaagaaattgttcacatggggaatgctattatgagtttttatagtgcactgattgatctattgggacgttgtgcaccggaaatgcacctgattcagaccggtaaaggcgaagccattagaattcgctctatcctacggagtctggtaccgaccgaggacctcgtgggcatcattagcatacctctaaaactcccttccctgaataaggatggctcagtgagcgagcctgacatggccgccaatttctgccccgaccataaggccccgatggtcttattcctcgatcgcgtgtacgggataaaagaccaaacgtttctgctgcacctcctggaagttggattcctaccagacctgagggcctccgcatcattagatactgtgtcactatccacgaccgaggctgcccttgctcttaaccgatacatttgttccgccgttctgccacttctgactagatgtgctcccctgttcgctggaaccgaacactgtacatctttgatcgatagcactttgcagaccatttacagactatccaagggccggtctctaacaaaagcccagcgggacaccatagaggagtgcctcctggcaatctgtaaccacttgaggccatccatgttacaacaacttctcaggcgactggtattcgacgttcctcaactgaacgagtactgcaagatgccactgaaactgctaacaaaccattacgagcagtgctggaagtactattgtttgcccagtggttggggatcatacggcttggcggtggaggaagagttgcacctaacggagaagcttttctggggcatttttgatagcctgagtcataagaagtacgatcccgacctcttccgaatggccctgccttgtttgtctgctatcgccggagcactgcctccagattaccttgatacccgaattaccgctaccctcgaaaagcagatcagcgtcgacgcggacgggaacttcgaccccaagcccattaacactatgaatttttcactgccagaaaagctggagtacatcgttactaaatatgccgagcattcacacgacaaatgggcttgcgacaagagccagtctggttggaaatatggcatctccttggacgaaaatgtaaagacccatccactgatccggccgttcaaaacattgaccgagaaggagaaagagatttatcggtggcccgctagggaatccctgaagaccatgcttgcggtgggctggaccgtggagagaactaaagaaggggaggccttggtccaacagagagaaaacgagaagctcagatctgtgtcccaagcaaaccagggtaatagttacagtcctgctccactggatttgagcaatgtggttctaagccgggaactgcaaggaatggtcgaggttgtggcagaaaattatcataatatttgggcgaaaaaaaaaaagctggagttggaatccaaaggaggcgggagccaccccctgcttgttccttacgacacgttgaccgcgaaggagaagtttaaagaccgagaaaaggctcaggatctgtttaaattcctgcaagtgaacggcattatagtgtctcggggcatgaaggacatggaactggatgcttcgtccatggaaaagcgatttgcctataaattccttaagaagatccttaaatatgtagacagcgcccaagagtttattgcgcatctggaagcaatcgtaagtagcgggaagactgagaagtctccacgcgaccaagaaatcaaattcttcgccaaggtcctgctgccgctcgtcgaccaatatttcactagccactgtctctatttcctctctagtccattgaagcctctctcctcttcaggctacgcctcccacaaagagaaggaaatggtcgcaggactcttctgcaaactggctgctttggtgcggcataggatatctctctttggctcagacagtacaacaatggtctcttgtcttcacatattggcccagactctggacactaggaccgtcatgaaaagcggatcagaacttgttaaggcagggctgcgcgcgttcttcgaaaatgctgcagaagacctcgagaaaacctctgagaatctaaagctgggcaaattcactcattcccgcactcagattaaaggtgtgtcccagaacattaattatactacagtcgcattactgcctatcctgaccagcatatttgagcatgtaacccaacaccagttcggcatggacctgctcttgggagacgttcaaatttcatgctaccacattctgtgttctttgtacagcctcggaacaggcaagaacatttacgtcgagcgtcagaggcctgctctgggggaatgcttagctagcctggctgccgcaatccctgtggcctttctggagcctactctgaatcggtataaccccctgagcgtgttcaataccaaaacacctcgtgaacgaagtatcctggggatgccagacactgtcgaagacatgtgtcctgatatcccccagttagagggcctaatgaaggaaattaacgatctggctgagagcggcgcacggtacacggagatgccacatgttattgaagtcatcctgcccatgctctgtaactatctgtcctactggtgggagcgcggaccagaaaacctgccgccttccaccggaccctgctgtaccaaagtgacttctgagcacctgagcttgatcctcggaaatattctgaaaattataaacaacaatctgggcatcgatgaagcaagctggatgaaacgtatagccgtatacgctcagccgataattagcaaagccaggccagaccttctgaggtcgcatttcatacctactttggagaagctgaaaaaaaaggcggtgaagactgtgcaggaagaagagcaattgaaggcagacgggaagggtgacacgcaggaggccgaactgctgattcttgacgaatttgccgtcctctgtcgggacctgtatgcgttctatccaatgctgatccgttacgttgacaataaccggagtaactggcttaagagtccagatgctgatagcgatcagctatttcgcatggtagccgaagtgttcatactatggtgcaagagtcataactttaaaagggaagagcagaactttgtgatccagaatgagatcaataatctcgcgtttcttacaggagattcaaagagcaagatgtccaagagtggcggccaagatcaggagaggaagaaaacaaagcgccggggggacctctattctattcagaccagcctgattgtggctgcgctgaaaaaaatgctgcccatcggacttaatatgtgtactccaggagatcaggagctaatcagcttggccaaaagtaggtattcccatagggacactgatgaagaggtacgggagcacctcaggaataacctgcacttgcaagaaaagagcgatgatcccgccgtcaaatggcagctgaacctttacaaagatgttctcaagtctgaagagcccttcaacccagagaagacagtggagcgggtccagagaattagcgcagccgtttttcatctggagcaggttgaacaaccactgaggtccaaaaaagcagtctggcacaaactcctctccaagcagaggaagagggcggtggtggcttgtttccgaatggctcctctctacaaccttcccaggcatcggagcatcaatttgttcctgcatggatatcagaggttttggatcgagaccgaggaatattcttttgaagagaagctggtacaggatttagccaaaagcccaaaagtcgaggaagaagaggaggaggaaaccgagaaacagcctgatcctctccaccagatcatcctttatttttctaggaacgctttaaccgagaggtctaaactagaagatgatcccctgtatacctcttactcctctatgatggccaagtcctgccagtctggagaagacgaggaggaagatgaagacaaggagaaaacgttcgaggagaaggaaatggagaaacagaaaaccctctaccaacaggcacgcctgcatgaaagaggcgccgcagagatggtgctgcagatgatttctgcctcgaaaggtgagatgtcaccaatggtggtggaaactctgaaacttggcattgccatcttaaacggaggcaacgccggagtgcaacagaaaatgttagactacctgaaagaaaaaaaagacgccggcttctttcagtccctaagcggtctcatgcaatcttgctctgttctggacctcaacgcattcgagcggcagaataaggctgaagggttaggcatggtaaccgaggaggggacgttaatagtgcgggagcgcggcgaaaaggttttgcagaacgacgaattcactagagatctcttccgtttcttgcaacttctgtgtgagggccacaactctgattttcaaaacttcttaaggacccagatgggcaacacgactactgttaacgtgataatctctaccgtggactatctgttacggttgcaggagtccatttctgacttctactggtactatagcggcaaggatattattgacgagagcggccagcacaacttttccaaagctctggccgtgaccaagcagatctttaacagtcttacagagtacattcaaggaccatgtattggtaatcagcagtccctcgcgcactctcgcctgtgggacgccgtcgtgggattcctgcacgtgtttgccaatatgcagatgaaactcagccaggatagctctcagattgaactacttaaggagcttctcgatctcctgcaggacatggtcgtcatgctgttgagtctgctagaggggaatgtggtgaatgggaccataggaaaacaaatggtggacacattagtggagagcagcactaatgttgagatgatcctgaagttctttgatatgtttctcaagcttaaggacttgacttctagcgacacatttaaggaatacgaccccgatggaaagggcatcattagcaaaaaggagttccagaaggccatggaagggcagaagcagtatacccagagcgagattgatttcctcctctcctgtgctgaagcagacgaaaatgacatgttcaactacgtagacttcgtggatcgattccacgaacctgccaaagacattggctttaatgttgcagtcctcttaacaaacttgagcgagcatatgcccaatgactctcgattaaagtgtttgctggacccggccgaatcagtgctgaactactttgagccttacttgggaaggatcgaaattatgggtggcgccaaaaagatcgagcgcgtttacttcgagatttctgagtcgtctagaacacagtgggagaagccccaagtcaaggagtcaaaaagacaattcattttcgatgtcgttaatgaaggaggcgaacaagaaaaaatggagctctttgtgaatttttgtgaggatacaattttcgagatgcagctggcaagtcaaattagcgaaagtgactccgccgatagacccgaggaggaggaggaggacgaagattcgtcatatgttctggagattgccggggaggaggaagaggacggttctctcgaacccgcctcagcttttgccatggcctgtgcaagcgtcaaacggaatgtgactgattttctgaagcgggcgacactcaagaaccttcggaagcagtacaggaatgtcaaaaaaatgactgctaaggagctggtgaaggtcctgttcagtttcttttggatgctgttcgtgggcctttttcaactactgttcactatcctgggaggcatctttcagattctttggagtaccgtgttcgggggaggactggtggagggcgccaagaacatccgggtgactaaaatcctcggtgacatgccagaccctacccagtttggaattcatgacgacaccatggaggctgagcgggccgaagtcatggagcctgggattaccactgaattagttcattttataaagggagaaaagggtgataccgatattatgagcgacttatttggcctccatccaaaaaaagagggttctttgaaacatggaccagaggtcggcctgggggatctgtcagaaatcatcgggaaagatgagcccccaacattggaaagtactgtccaaaaaaagagaaaggctcaggcagcagagatgaaagcagctaacgaggccgagggcaaagtggagtcagaaaaggcagatatggaggacggcgagaaggaggataaagacaaggaggaggaacaggcagaatacctgtggactgaggtcaccaagaaaaagaagcgccggtgcggtcagaaggtcgaaaaaccggaggcttttaccgctaacttctttaagggactggaaatctatcagactaaactgctacattacctagccaggaatttttacaacttaaggttcctagctctgtttgtggcctttgccattaattttatcctcctgttttacaaggtgaccgaggagccgctggaagaggagaccgaggatgtcgctaacctgtggaattccttcaatgatgaggaagaagaagaggccatggtgttctttgtccttcaggagagcaccggatacatggcccctacactgcgcgccctcgcaatcatccatactattatcagtctagtttgcgtagtgggatattattgcctgaaagtgccactggtggtattcaaacgcgaaaaagagatcgcaaggaagctcgaattcgatggcctgtacatcacagaacagccatcggaggatgatattaaaggacagtgggaccgtctggtgatcaataccccctcctttcctaacaattactgggacaagtttgtaaaacgcaaagttattaataaatacggcgacctttacggtgctgaaaggattgctgagctcctggggctggataaaaacgccctcgatttcagccctgtggaggaaaccaaagccgaggcagcgagtttggtatcctggctttcgtcaattgatatgaagtaccatatctggaaactcggtgtggtctttactgataacagcttcctttacctggcctggtacactactatgagtgtgttaggtcactataacaatttttttttcgccgcccacctcctggacattgccatgggctttaagactttgcggactattctgagctccgtgacacataatgggaagcagttggtcctgacagtcggtctgttggctgtcgttgtctatctgtatactgttgtagcattcaattttttccgcaagttctacaacaagagcgaggatgacgacgagcctgacatgaaatgcgacgatatgatgacctgttatctttttcatatgtatgtgggcgtgagagctggcggcggtatcggtgatgaaattgaagaccctgccggggatccctacgagatgtaccggatcgtgtttgacattacctttttcttttttgtgatcgtgatattgctggcaattatccagggtctgatcattgatgccttcggggagctgcgcgatcagcaggagcaggtgagagaggatatggagactaagtgcttcatttgcggaattggcaatgactactttgatacaacaccacacggttttgagacccacacactgcaggaacataacctggccaattatctgttcttccttatgtatttaattaacaaagatgaaacggaacacactggacaagagagctatgtctggaagatgtaccaggaaaggtgctgggacttcttccctgccggcgattgcttcagaaaacagtatgaggatcagctggggtag

SEQ ID NO: 204114 - DNA, 285 bp, synthetic construct
  misc_feature 1..285: note = Description of Artificial Sequence: Synthetic coding sequence
  source 1..285: mol_type = other DNA
atgggcagcgagctggagaccgccatggagaccctgatcaacgtgttccatgctcattccggtaaagaaggagacaaatataaactgtctaaaaaggaattaaaggagctactgcagaccgagcttagtggctttctcgacgcccagaaagatgtggatgctgtcgacaaggtgatgaaagaactggatgagaatggggatggagaggttgactttcaggaatacgtggtgctggtggccgcgcttaccgtcgcctgtaacaactttttttgggaaaatagttag

SEQ ID NO: 204115 - DNA, 162 bp, synthetic construct
  misc_feature 1..162: note = Description of Artificial Sequence: Synthetic coding sequence
  source 1..162: mol_type = other DNA
atgggcagcgagctggagaccgccatggagaccctgatcaacgtgtttcacgcacatagcggcaaggagggggataagtataagctgagtaagaaggagctcaaggagctcctgcaaaccgagctgtcaggcttcctggacgttaaggaactcatgctttag

SEQ ID NO: 204116 - DNA, 444 bp, synthetic construct
  misc_feature 1..444: note = Description of Artificial Sequence: Synthetic coding sequence
  source 1..444: mol_type = other DNA
atggaggagccccagaccaagacccccagcgccgagttccccccctatcgggctcagccagcacagccagccaccgcccccgccgctacattcgccaccctagcaatctgtcctgagcccgctcccacttcagggcctggacagccctgtactgccgccatgggctctgagctggaaactgccatggaaaccctgataaatgtgtttcacgcacacagtggcaaggaaggggataagtacaaattgagcaagaaagaattaaaagaattgttgcagactgaactgagcggctttctcgacgcacagaaagatgttgatgcagtggacaaggtcatgaaagagttagacgaaaatggggatggtgaagtagatttccaggagtacgtcgtccttgtagctgccctgaccgtcgcctgtaataatttcttctgggagaactcttag

SEQ ID NO: 204117 - DNA, 105 bp, synthetic construct
  misc_feature 1..105: note = Description of Artificial Sequence: Synthetic coding sequence
  source 1..105: mol_type = other DNA
atgggcagcgagctggagaccgccatggagaccctgatcaacgtgttccatgcccattctgggaaagaaggggacaagtacaaattgtctaagaaggaactatag

SEQ ID NO: 204118 - DNA, 294 bp, synthetic construct
  misc_feature 1..294: note = Description of Artificial Sequence: Synthetic coding sequence
  source 1..294: mol_type = other DNA
atgcccagccagatggagcacgccatggagaccatgatgttcaccttccacaaattcgctggggacaagggttatcttactaaggaggaccttcgcgtgctgatggagaaggagtttccaggattcctggaaaatcagaaggaccctcttgctgtggataaaattatgaaggacctggaccagtgtagagacggaaaagtggggttccaatccttttttagtcttattgccggtctcacaatagcttgcaacgactacttcgttgtgcacatgaagcagaaaggcaaaaagtag

SEQ ID NO: 204119 - DNA, 294 bp, synthetic construct
  misc_feature 1..294: note = Description of Artificial Sequence: Synthetic coding sequence
  source 1..294: mol_type = other DNA
atgcccagccagatggagcacgccatggagaccatgatgttcaccttccacaagtttgctggcgacaaaggctatttgaccaaagaagacctgagggtgctcatggagaaggaattccccggctttctggaaaaccagaaggatccactcgccgtggacaaaatcatgaaggacttagaccagtgccgagacggcaaggtgggcttccagtcatttttctctctgattgcaggcctgacaattgcctgtaacgattactttgtcgtacacatgaaacagaagggcaaaaagtag

SEQ ID NO: 204120 - DNA, 318 bp, synthetic construct
  misc_feature 1..318: note = Description of Artificial Sequence: Synthetic coding sequence
  source 1..318: mol_type = other DNA
atggccaagatcagcagccccaccgagaccgagcggtgcatcgagtcccttatcgccgttttccaaaaatatgcggggaaagatggatacaactatacattatctaaaaccgagtttctcagctttatgaacacagaattagcagcgttcaccaaaaatcagaaagatccaggagtgcttgatcgcatgatgaagaagttagataccaactcagatgggcagctggactttagtgaattcctgaacttgatcggcggcctggccatggcctgccatgacagttttctcaaggcggtgccatcccaaaaacgcacctag

SEQ ID NO: 204121 - DNA, 252 bp, synthetic construct
  misc_feature 1..252: note = Description of Artificial Sequence: Synthetic coding sequence
  source 1..252: mol_type = other DNA
gccggcaagatgaccaagctggaggagcacctggagggcatcgtgaatatcttccaccagtactcagtgagaaaaggccactttgacactctgtccaagggagaattgaaacagctccttacaaaggaactcgccaacactatcaagcgtcccaaaaagggctcctccgtgattgacgaaatctttcagggattggacgcaaaccaagacgagcaggtggatttccaagaatttatctcactggttgcatag

SEQ ID NO: 204122 - DNA, 279 bp, synthetic construct
  misc_feature 1..279: note = Description of Artificial Sequence: Synthetic coding sequence
  source 1..279: mol_type = other DNA
atgaccaagctggaggagcacctggagggcatcgtgaacatcttccatcagtatagtgtgaggaaaggtcatttcgacactctcagcaaaggcgagcttaagcaactgctgaccaaagagctggctaacacaattaagaacatcaaagataaagctgtcattgacgagatcttccaaggccttgatgccaaccaagacgaacaggtggactttcaagaatttatctccctagtcgcgatcgcactcaaagctgcccactatcacacccacaaggagtag

SEQ ID NO: 204123 - DNA, 297 bp, synthetic construct
  misc_feature 1..297: note = Description of Artificial Sequence: Synthetic coding sequence
  source 1..297: mol_type = other DNA
atggccgccgagcccctgaccgagctggaggagagcatcgagaccgtggtcacgacctttttcaccttcgcacggcaggaaggccgaaaagactctctctcggttaacgaatttaaggagctggtgacccaacagttgccccacctgttaaaggatgtgggatctctagatgagaaaatgaagagccttgacgtaaatcaagattctgagctgaaatttaacgagtattggagactgattggcgagctggcaaaggagattagaaagaagaaggatttgaaaattcgcaagaagtag

SEQ ID NO: 204124 - DNA, 297 bp, synthetic construct
  misc_feature 1..297: note = Description of Artificial Sequence: Synthetic coding sequence
  source 1..297: mol_type = other DNA
atggccgccgagcccctgaccgagctggaggagagcatcgagaccgttgtgacaacgtttttcacattcgcgcgacaggagggtcgcaaagattcgctgtccgtcaatgagtttaaagagttagttacacaacagctcccacatctgctgaaggacgtcggatcgcttgacgagaaaatgaaatccctggatgtgaaccaagattcagaacttaaatttaacgaatactggcgcttgatcggtgagctggcgaaagaaattcgaaaaaaaaaggacctgaaaattcggaaaaagtag

SEQ ID NO: 204125 - DNA, 297 bp, synthetic construct
  misc_feature 1..297: note = Description of Artificial Sequence: Synthetic coding sequence
  source 1..297: mol_type = other DNA
atggccgccgagcccctgaccgagctggaggagagcatcgagaccgtagtgacgaccttcttcacattcgcccgccaggagggacggaaggatagcctgtctgttaacgagttcaaggagctggtgacacaacagctgccgcacctgctcaaggacgtcggcagtttggatgagaaaatgaaatcgctcgatgtgaatcaggactctgagctcaagttcaatgagtattggcgtttgattggagagttggccaaggaaatcagaaaaaagaaggacttgaagattcggaaaaaatag

SEQ ID NO: 204126 - DNA, 297 bp, synthetic construct
  misc_feature 1..297: note = Description of Artificial Sequence: Synthetic coding sequence
  source 1..297: mol_type = other DNA
atggccgccgagcccctgaccgagctggaggagagcatcgagaccgtcgtcacaacgttcttcacgttcgctcgacaagagggtcgcaaagatagtctgtccgtgaatgagttcaaggaactggttacccagcagctaccccatcttctcaaagatgtgggctcactcgacgagaaaatgaagagccttgacgtgaaccaggattccgagttaaagttcaatgagtactggagactaatcggggagctggccaaagaaattagaaagaagaaagatcttaagattaggaagaagtag

SEQ ID NO: 204127 - DNA, 297 bp, synthetic construct
  misc_feature 1..297: note = Description of Artificial Sequence: Synthetic coding sequence
  source 1..297: mol_type = other DNA
atggccgccgagcccctgaccgagctggaggagagcatcgagaccgtggtaaccacattctttacatttgctcgacaggaagggaggaaggattcactgagtgtgaacgagttcaaagagcttgtaactcagcagctgccgcacctactgaaggatgttggttcccttgatgagaagatgaagagccttgacgttaaccaagactccgaactcaaatttaatgagtactggaggttgattggcgaacttgctaaagagattaggaagaagaaggacctgaagatcaggaaaaagtag

SEQ ID NO: 204128 - DNA, 315 bp, synthetic construct
  misc_feature 1..315: note = Description of Artificial Sequence: Synthetic coding sequence
  source 1..315: mol_type = other DNA
atgggccagtgccggagcgccaacgccgaggacgcccaggagttcagcgatgtcgaacgtgccattgagactttgatcaaaaacttccatcagtacagtgtcgaggggggcaaagagactctcactccctcggagctcagagacttggtgacacaacagctccctcacctcatgccttccaactgtgggctcgaagagaagatagccaatctgggatcatgcaatgatagtaagctcgagtttcgtagtttctgggaacttattggagaagctgcaaaaagtgtcaaactcgagcgccccgtgagaggccactag

SEQ ID NO: 204129 - DNA, 315 bp, synthetic construct
  misc_feature 1..315: note = Description of Artificial Sequence: Synthetic coding sequence
  source 1..315: mol_type = other DNA
atgggccagtgccggagcgccaacgccgaggacgcccaggagttctctgacgtcgaacgggctatcgaaactctgatcaaaaacttccatcaatacagcgtcgagggaggaaaggaaactctgaccccttctgaactgagggatctcgtgacacagcagttgccccatttaatgccctcaaactgcggcctggaggagaagattgcaaacttgggatcctgtaatgattccaaactggaatttcgcagtttttgggagctaatcggagaagcggctaaaagcgttaaattggagcgaccagtgagaggtcattag

SEQ ID NO: 204130 - DNA, 315 bp, synthetic construct
  misc_feature 1..315: note = Description of Artificial Sequence: Synthetic coding sequence
  source 1..315: mol_type = other DNA
atgggccagtgccggagcgccaacgccgaggacgcccaggagttcagtgatgtagaaagagctatcgagaccctgataaaaaatttccatcaatactcggtcgagggaggcaaagagacgctgacaccaagtgaactcagggacttagtcacccagcagctacctcacttgatgcccagtaactgcggactggaggagaagattgccaacttgggatcctgcaatgactccaagctggagttcaggagtttctgggaactcattggagaagccgcaaaatcagtgaaattagagcgccccgtgcgtggtcattag

SEQ ID NO: 204131 - DNA, 315 bp, synthetic construct
  misc_feature 1..315: note = Description of Artificial Sequence: Synthetic coding sequence
  source 1..315: mol_type = other DNA
atgggccagtgccggagcgccaacgccgaggacgcccaggagttcagcgacgtggaacgggcgattgaaaccctaatcaagaacttccatcaatattctgtggaaggaggaaaggaaacactgaccccttccgagctgcgcgatctagtgacacagcaactccctcatttgatgccctcaaactgcggcttagaagaaaagatcgcaaaccttggcagctgtaacgactccaaactggagtttcgtagtttttgggagctgatcggcgaggccgcaaaatcagtgaaactggagcgccctgtccgtggtcactag

SEQ ID NO: 204132 - DNA, 417 bp, synthetic construct
  misc_feature 1..417: note = Description of Artificial Sequence: Synthetic coding sequence
  source 1..417: mol_type = other DNA
atgtgcagcagcctggagcaggccctggccgtgctggtgaccacctttcacaagtatagctgccaggagggagataagtttaaattatcaaagggtgagatgaaggagctgctacacaaggaactcccaagctttgttggccactcaagggagccttgcgccgtgcgggcatttagagtgcacctgttcaatccagtgatcggggatctgaggaatcaatcccctgaaggaaagagcgattgtcctaaaattacccaacactgggagaaggtagacgaggaaggtctgaagaagctgatgggctctttggatgaaaattccgaccagcaggtggacttccaggagtatgccgtatttctggccctgattacggtgatgtgcaacgattttttccaaggttgtccggaccgcccttag

SEQ ID NO: 204133 - DNA, 294 bp, synthetic construct
  misc_feature 1..294: note = Description of Artificial Sequence: Synthetic coding sequence
  source 1..294: mol_type = other DNA
atgtgcagcagcctggagcaggccctggccgtgctggtgaccacctttcacaagtactcttgtcaggaaggagacaagttcaaactgagcaagggcgagatgaaggagcttctacacaaagaacttccatcatttgttggagagaaagtggacgaagaaggattgaagaagctcatggggtcactagatgagaactctgaccagcaggtagactttcaggagtacgccgtttttctagcattgatcacagtgatgtgtaacgactttttccagggatgtccggatcggccgtag

SEQ ID NO: 204134 - DNA, 294 bp, synthetic construct
  misc_feature 1..294: note = Description of Artificial Sequence: Synthetic coding sequence
  source 1..294: mol_type = other DNA
atgtgcagcagcctggagcaggccctggccgtgctggtgaccacctttcacaagtattcttgccaggagggtgacaagttcaaactttcgaagggggagatgaaagaactgctgcacaaagagctcccatcgttcgtaggagaaaaggtagatgaagaagggctgaaaaagctgatggggtcactggatgagaacagcgatcaacaagttgatttccaggagtacgccgtatttctggcccttattaccgtcatgtgtaacgatttcttccagggatgcccagaccgaccatag

SEQ ID NO: 204135 - DNA, 294 bp, synthetic construct
  misc_feature 1..294: note = Description of Artificial Sequence: Synthetic coding sequence
  source 1..294: mol_type = other DNA
atgtgcagcagcctggagcaggccctggccgtgctggtgaccacctttcacaagtacagctgtcaggaaggggacaaattcaagctatcgaaaggcgagatgaaagaactactccacaaagagctgccttcttttgtgggagaaaaggttgatgaagaagggcttaaaaaattaatgggttccctggacgagaactcggaccagcaggtggactttcaggaatatgccgttttcctggcgttgattacagtgatgtgcaatgactttttccagggatgcccagatcgcccctag

SEQ ID NO: 204136 - DNA, 306 bp, synthetic construct
  misc_feature 1..306: note = Description of Artificial Sequence: Synthetic coding sequence
  source 1..306: mol_type = other DNA
atggcccggcccctggagcaggccgtggccgccatcgtgtgcaccttccaggaatacgccggaagatgtggagacaagtataagctttgccaggccgagctaaaggagctgctgcagaaggaactggcaacttggacacccaccgaattccgagagtgtgactacaataagttcatgtccgtgcttgacacaaataaagactgcgaagttgatttcgtggagtatgtgagatccctggcgtgtctatgcctctattgccatgaatactttaaggactgtccaagtgaaccaccttgctcacagtag

SEQ ID NO: 204137 - DNA, 306 bp, synthetic construct
  misc_feature 1..306: note = Description of Artificial Sequence: Synthetic coding sequence
  source 1..306: mol_type = other DNA
atggcccggcccctggagcaggccgtggccgccatcgtgtgcaccttccaggaatacgccggacgatgtggagacaagtacaaactgtgccaggctgagctcaaagagctcctgcagaaagaactggcaacatggaccccaaccgagtttagggagtgtgattataataaattcatgagcgtcctggacacaaacaaggattgcgaggtggactttgtagagtacgtgcggagcctggcgtgcttatgtttgtactgccacgaatattttaaagattgcccaagcgaacccccttgctcacagtag

SEQ ID NO: 204138 - DNA, 306 bp, synthetic construct
  misc_feature 1..306: note = Description of Artificial Sequence: Synthetic coding sequence
  source 1..306: mol_type = other DNA
atggcctgccccctggagaaggccctggacgtgatggtgagcaccttccataagtactctggtaaggaaggagataagtttaagttaaacaagtccgagcttaaggaactcctcactcgcgagctgcctagttttcttggcaagaggacagacgaggcggctttccaaaaactaatgtccaatctcgatagtaatagagataatgaagtggacttccaggagtactgcgtgttcctcagttgtattgccatgatgtgtaatgaatttttcgagggcttcccagataagcaaccgcgaaagaaatag

SEQ ID NO: 204139 - DNA, 306 bp, synthetic construct
  misc_feature 1..306: note = Description of Artificial Sequence: Synthetic coding sequence
  source 1..306: mol_type = other DNA
atggcctgccccctggagaaggccctggacgtgatggtgagcaccttccacaaatacagcggcaaggaaggcgataagttcaaattgaataagtcagagctgaaagagctacttactcgcgagttgcctagcttcctaggcaagaggacagatgaagcagcatttcagaagctcatgtctaatttagattcaaatcgagataacgaggtcgatttccaggaatattgcgttttcctttcttgtattgcgatgatgtgtaacgaatttttcgaggggtttcccgacaagcagccaaggaaaaagtag

SEQ ID NO: 204140 - DNA, 306 bp, synthetic construct
  misc_feature 1..306: note = Description of Artificial Sequence: Synthetic coding sequence
  source 1..306: mol_type = other DNA
atggcctgccccctggagaaggccctggacgtgatggtgagcaccttccataagtacagcgggaaggagggcgataagttcaaactgaataagtctgagctgaaggagttacttaccagggagctcccaagctttttagggaaaaggaccgacgaggctgcttttcaaaagctgatgagcaacctggactcgaatcgagataacgaagtggatttccaggaatactgcgtattcctgagctgtatcgcaatgatgtgtaacgaattttttgaagggttcccagataaacagccccgaaagaaatag

SEQ ID NO: 204141 - DNA, 306 bp, synthetic construct
  misc_feature 1..306: note = Description of Artificial Sequence: Synthetic coding sequence
  source 1..306: mol_type = other DNA
atggcctgccccctggagaaggccctggacgtgatggtgagcacctttcacaaatatagtggaaaagaaggggacaagtttaaattgaataagagcgagcttaaagagctgctcactagagaacttccatcctttctaggcaagcgcacggatgaagcggcttttcagaaacttatgtctaatttggatagcaatagggataacgaggtcgatttccaggaatactgcgtgttcctgagttgcattgccatgatgtgcaacgagttctttgaaggctttccagataaacagcctcgaaaaaagtag

SEQ ID NO: 204142 - DNA, 273 bp, synthetic construct
  misc_feature 1..273: note = Description of Artificial Sequence: Synthetic coding sequence
  source 1..273: mol_type = other DNA
atggtgagcaccttccacaagtacagcggcaaggagggcgacaagtttaagctcaacaagtctgagcttaaggaattgttgactcgcgagcttccttcgtttcttggcaagaggactgacgaagctgcctttcagaagctcatgtccaatttggattcgaacagagataatgaggtagacttccaggaatattgcgtttttttaagttgcatagccatgatgtgtaacgagttctttgagggcttccctgataagcagccccgaaagaaatag

SEQ ID NO: 204143 - DNA, 333 bp, synthetic construct
  misc_feature 1..333: note = Description of Artificial Sequence: Synthetic coding sequence
  source 1..333: mol_type = other DNA
atgcccgccgcctggatcctgtgggcccacagccacagcgagctgcataccgtcatggagactcctctggaaaaggccctgacaactatggtgacaaccttccacaagtacagcgggcgcgagggaagcaagcttaccctgagtagaaaggaacttaaagagctcatcaagaaggaactttgtttaggtgaaatgaaagagagttcaatagatgatttgatgaaatccctggataagaactccgaccaggaaatcgatttcaaggaatattcggtgttcttgactatgctctgcatggcctacaatgatttctttcttgaggacaataagtag

SEQ ID NO: 204144 - DNA, 279 bp, synthetic construct
  misc_feature 1..279: note = Description of Artificial Sequence: Synthetic coding sequence
  source 1..279: mol_type = other DNA
atggagacccccctggagaaggccctgaccaccatggtgaccaccttccacaagtactctggccgcgagggctcaaaactgaccttgtccaggaaagagctgaaagaactgataaagaaagagctctgtctgggcgaaatgaaggagtctagcattgatgacctcatgaagtctctcgacaaaaactcagatcaggaaattgacttcaaggagtactcagtgttcctcaccatgctctgtatggcctataatgatttctttctagaagataacaaatag

SEQ ID NO: 204145 - DNA, 279 bp, synthetic construct
  misc_feature 1..279: note = Description of Artificial Sequence: Synthetic coding sequence
  source 1..279: mol_type = other DNA
atggagacccccctggagaaggccctgaccaccatggtgaccacctttcacaagtacagtggacgcgaggggtccaagttgacactgtctcgcaaagagttaaaagaactgatcaagaaagagttatgcttgggagaaatgaaggagtcttctatcgatgacttgatgaagtcattggacaagaacagtgatcaagaaatcgactttaaggagtattccgtgttcctgacaatgctgtgcatggcatacaacgattttttcctcgaggataacaaatag

SEQ ID NO: 204146 - DNA, 273 bp, synthetic construct
  misc_feature 1..273: note = Description of Artificial Sequence: Synthetic coding sequence
  source 1..273: mol_type = other DNA
atggcctgccccctggaccaggccatcggcctgctggtggccatctttcataaatactcgggcagagaaggggataagcatactctgtctaaaaaggagttgaaagaactgattcagaaagagctgaccattggatccaagcttcaagatgctgagattgcccgcttgatggaggatttagacagaaataaagaccaggaggtgaacttccaggagtatgtaaccttcctgggagcattggcattgatttataacgaggctctcaaaggatag

SEQ ID NO: 204147 - DNA, 273 bp, synthetic construct
  misc_feature 1..273: note = Description of Artificial Sequence: Synthetic coding sequence
  source 1..273: mol_type = other DNA
atggcctgccccctggaccaggccatcggcctgctggtggccatctttcataaatattccgggagggaaggagacaaacacactctgtccaagaaagagctcaaagaattaattcagaaggaattaactattggaagtaaattgcaggatgcagagatcgctcgcttgatggaagatcttgaccgcaataaggaccaggaagtgaacttccaagagtacgttacctttctcggggctctggcactgatctataatgaggctttgaaggggtag

SEQ ID NO: 204148 - DNA, 306 bp, synthetic construct
  misc_feature 1..306: note = Description of Artificial Sequence: Synthetic coding sequence
  source 1..306: mol_type = other DNA
atgagcaacacccaggccgagcggagcatcatcggcatgatcgacatgttccataagtatacaagacgggatgataaaattgaaaaaccttctctgctcaccatgatgaaagaaaattttcccaatttcctcagcgcttgtgataaaaaaggaacaaactatcttgccgatgtgtttgagaaaaaagataaaaacgaggataagaaaattgacttttctgagttcctgtcacttctaggcgatatagcaactgactaccataagcagtctcacggagctgctccttgttcgggaggtagccagtag

SEQ ID NO: 204149 - DNA, 306 bp, synthetic construct
  misc_feature 1..306: note = Description of Artificial Sequence: Synthetic coding sequence
  source 1..306: mol_type = other DNA
atgagcaacacccaggccgagcggagcatcatcggcatgatcgacatgttccacaagtacacccgtcgagatgacaaaattgaaaagccgtccttgctgacgatgatgaaggaaaatttcccaaattttcttagcgcctgcgacaaaaagggaactaattacttagcagacgtgttcgaaaaaaaggacaaaaatgaggacaaaaaaatagattttagcgaattcctctctctgcttggcgatatagccactgattaccacaagcagagccacggggccgctccttgttctggtggctcgcagtag

SEQ ID NO: 204150 - DNA, 282 bp, synthetic construct
  misc_feature 1..282: note = Description of Artificial Sequence: Synthetic coding sequence
  source 1..282: mol_type = other DNA
atgctgaccgagctggagaaggccctgaacagcatcatcgacgtgtatcataaatactccctgatcaaaggaaactttcacgcagtctaccgtgacgacctgaagaaattgctcgaaaccgagtgtccccagtatattcgaaaaaaaggcgctgatgtgtggtttaaagagctggatattaatacggacggagcagttaactttcaggagtttctcatcctcgtcataaaaatgggcgtggctgcccataaaaagtcgcacgaggaatcacataaggaatag

SEQ ID NO: 204151 - DNA, 282 bp, synthetic construct
  misc_feature 1..282: note = Description of Artificial Sequence: Synthetic coding sequence
  source 1..282: mol_type = other DNA
atgctgaccgagctggagaaggccctgaacagcatcatcgacgtgtatcacaagtattctctcataaaggggaacttccacgcggtgtaccgagatgacctgaaaaaactactggagacagaatgcccacaatacatcagaaagaagggggcggacgtttggttcaaagagttagacatcaatacagatggcgccgttaacttccaggagtttcttatcttagtgataaagatgggagtggcggcccacaagaaaagccacgaggaaagtcataaggagtag

SEQ ID NO: 204152 - DNA, 345 bp, synthetic construct
  misc_feature 1..345: note = Description of Artificial Sequence: Synthetic coding sequence
  source 1..345: mol_type = other DNA
atgacctgcaagatgagccagctggagcggaacatcgagaccatcatcaacaccttccaccagtactctgtgaagttgggccatcccgacacgctcaatcagggggaattcaaggaactggtcaggaaagacttgcagaatttccttaaaaaagagaacaaaaacgaaaaagtaatagagcatataatggaggatctcgacaccaacgccgacaaacaattaagcttcgaggaattcattatgttgatggcccgtctcacttgggcctcccacgagaagatgcatgagggagacgaaggcccgggtcaccaccataagcccggattgggggagggaaccccctag

SEQ ID NO: 204153 - DNA, 279 bp, synthetic construct
  misc_feature 1..279: note = Description of Artificial Sequence: Synthetic coding sequence
  source 1..279: mol_type = other DNA
atgagcgagctggagaaggccatggtggccctgatcgacgtgttccaccagtacagcggccgtgagggcgacaaacacaaattgaaaaagtccgagctcaaggagctcattaacaatgagctgagtcattttctggaagaaatcaaggaacaagaagtcgtggacaaggtcatggagaccctggacaacgatggcgacggggaatgcgattttcaagaatttatggccttcgtagcaatggtgaccacagcctgccatgaatttttcgagcatgagtag

SEQ ID NO: 204154 - DNA, 279 bp, synthetic construct
  misc_feature 1..279: note = Description of Artificial Sequence: Synthetic coding sequence
  source 1..279: mol_type = other DNA
atgagcgagctggagaaggccatggtggccctgatcgacgtgttccatcagtattccgggcgagagggggacaaacacaagctcaagaaaagcgaactgaaagaacttatcaacaatgagctgtcacactttttggaggagatcaaggagcaagaggtggtggataaggtgatggagacccttgacaatgatggagacggagagtgcgactttcaggaatttatggcctttgtagcaatggtcaccaccgcttgtcatgaatttttcgagcacgagtag

SEQ ID NO: 204155 - DNA, 288 bp, synthetic construct
  misc_feature 1..288: note = Description of Artificial Sequence: Synthetic coding sequence
  source 1..288: mol_type = other DNA
atgaccgagctggagaccgccatgggcatgatcatcgacgtgttcagcaggtactccgggtctgaagggtcgacccagacactgaccaagggtgagcttaaggttctgatggagaaagagctacccggattcctccagagcggcaaagacaaggacgcggtggacaaactcctcaaggatctcgatgccaatggcgatgctcaggttgatttcagcgaattcatagtctttgtcgccgctataacatcggcatgccataagtacttcgaaaaggccggactcaagtag

SEQ ID NO: 204156 - DNA, 300 bp, synthetic construct
  misc_feature 1..300: note = Description of Artificial Sequence: Synthetic coding sequence
  source 1..300: mol_type = other DNA
atgcccacccagctggagatggccatggacaccatgatccggatcttccatagatattccggcaaagaacggaaacggttcaaactgtctaagggcgagttaaaactactgctgcaaagagaactcactgagttcctctcatgccagaaagagacccagctcgtggacaagatagttcaagatctggatgccaacaaagataacgaagtggatttcaacgagtttgttgtgatggtcgcagccctcacggtggcctgcaacgactacttcgtggagcagttaaaaaagaaggggaagtag

SEQ ID NO: 204157 - DNA, 300 bp, synthetic construct
  misc_feature 1..300: note = Description of Artificial Sequence: Synthetic coding sequence
  source 1..300: mol_type = other DNA
atgcccacccagctggagatggccatggacaccatgatccggatcttccacaggtacagtggtaaagaaaggaagagatttaagcttagtaagggcgagctgaaattgctcctgcaaagagaattaaccgagtttctgagctgtcagaaggaaacacagctggtggataaaatcgtgcaggacctcgacgctaataaggacaatgaagtagatttcaacgagttcgtcgtgatggtagcggccctgacggtcgcctgcaatgactacttcgttgagcagctgaagaagaaaggtaagtag

SEQ ID NO: 204158 - DNA, 1029 bp, synthetic construct
  misc_feature 1..1029: note = Description of Artificial Sequence: Synthetic coding sequence
  source 1..1029: mol_type = other DNA
atgatgtgcagccgggtgcccagcgagcagagcagcggcaccagcctgttacccaaagacggggccccgtttagctgggatagcctcgacgaagacggtctggacgactctcttctggaactctccgagggagaagaagacgacggagacgtgaactatactgaagaggaaatcgatgccttactgaaagaagacgacccctcttatgagcagtccagcggagaggacgacggtggtcatgtcgaaaaaggcgagcggggttctcaaatcctgctcgacacaccaagagaaaagaactcttcatacagcctgggacctgtggcagagactccagacctctttaagctcccacaactaagtacttccagcggccacggaccggcccacacgaaaccactgaacaggcgcagcgtccttgagaaaaacctaatcaaggtgacagtagcaccattcaatccgaccgtttgtgacgcactgctggataaggacgaaactgatagtagcaaagataccgagaagctatcgtctttaggggaggagatgcgggaagatggccttagcccaaatgagtctaaactgtgcacggagagcgaaggaatctcccccaataactcagcttggaacggcccacaactttctagcagcaacaacaacttccagcagacagttagcgacaagaatatgcctgactccgaaaacccgactagcgtgttttctaggataagcgaccattccgagacaccgaacatggaattatcttgccggaacggtggcagccataagtcatcttgcgagatgcgcagcctcgtcgtaagtaccagtagtaacaagcaagacgtactgaacaaagattctggtaagatgaagggacacgaacgccgtctaggaaaggttattcccgtgctgcagactaagacccgcaccaacgtccccactttctcgcaaagcaaccttgagcagcagaagcagttatacctgcgttccgttattgcccatatagaagacccagaggatacgaatcaaggctag

SEQ ID NO: 204159 - DNA, 1227 bp, synthetic construct
  misc_feature 1..1227: note = Description of Artificial Sequence: Synthetic coding sequence
  source 1..1227: mol_type = other DNA
atgatgtgcagccgggtgcccagcgagcagagcagcggcaccagcctgcttcctaaagatggcgcgcccttttcctgggatagccttgacgaggacggcctggatgattcactcttagagctctccgagggtgaggaggatgatggtgatgtgaattacacggaggaagagatcgatgctctcctgaaagaggacgatccaagttacgagcagtcaagcggagaggatgacgggggccacgtcgaaaagggcgaaaggggtagccagatcctcttggacacccctcgtgagaaaaatagctcatactcactcggccccgtggccgagactcccgatctgtttaaacttccccagctgtctacgtcctctggtcatggccctgcgcacacaaaacctctgaatcggcgaagtgtgttagagaagaatctgataaaagtgaccgtggctccatttaaccccacggtctgcgacgcgctccttgataaggacgaaacggatagcagcaaagacacggagaagcttagcagtctcggggaggagatgcgcgaggatggattgtcgccaaacgagagcaagttatgtaccgaatcggaaggcattagccccaacaactcagcctggaatggccctcagttgtcttcgagcaataataatttccaacagacggtgagtgacaagaacatgccagattccgaaaatccaacttctgtgttctcccgcatttcagatcactcagagacgccaaacatggaattgagttgccggaacggcggatctcacaagagttcatgcgaaatgaggagcctagttgtctcaacctcttcgaataagcaggacgttttgaataaggacagtgggaaaatgaagggacacgaaagaagattggggaaggttatacccgtactccagaccaagactcgaacaaacgttcccacttttagccagtctaacctggagcagcaaaagcagttgtacttgaggagcgttatcgcccacattgaagacccagaagataccaaccaggggataagcggggagctctgcgctctgatggatcaggtgcaccatatgcagcacagtaagtggcaacatccttccgacttgactacgaggaattacgccaggagacagaaacacctccagcggtattctctcactcagtgggtggatcgaaatatgcgatcccatcaccgcttccagagactccctgacttctcctacagttag

SEQ ID NO: 204160 - DNA, 1227 bp, synthetic construct
  misc_feature 1..1227: note = Description of Artificial Sequence: Synthetic coding sequence
  source 1..1227: mol_type = other DNA
atgatgtgcagccgggtgcccagcgagcagagcagcggcaccagcttgctccccaaggacggcgccccgttcagctgggacagcctggacgaagatgggctcgatgattccctgctcgagttatcagaaggagaggaagatgatggggacgttaattatactgaagaagaaatcgacgcactgcttaaagaagacgatccatcctacgaacaatcaagcggggaagacgatggtggccatgttgaaaagggggaaagaggtagtcagatactgctggatacccctcgcgagaagaactcctcgtattccctgggccctgtggccgagactcccgatctatttaagttaccacaactgtctacctctagcggacacggcccagcccacactaagcccctgaataggcggtctgtgttggagaagaacttgatcaaggtcacagtcgctccctttaaccccaccgtctgcgatgcgctattagataaggatgagacagactccagcaaggataccgagaaactgagctcattaggcgaggagatgagagaagacggactcagccctaatgaaagtaagctgtgcacagagtcagaaggaatttcccccaataacagtgcctggaacgggccccagctgagttcaagcaacaacaattttcagcagacagtgagtgataaaaatatgcccgactcagaaaaccctacctcagtgttctcgcgaatttccgaccattcagaaacaccaaatatggaactttcatgcagaaacggaggatcccacaagtctagttgcgaaatgaggagcttggtggttagcacctcctccaacaagcaggatgttcttaataaagattcgggcaaaatgaagggccatgaaagacgcttagggaaagtgattcccgtgctccagactaagacaagaaccaacgtgcctaccttttcccagagcaacctggagcagcagaagcagctgtatctccgaagcgtcattgcgcacatagaggaccctgaagataccaaccaaggaataagtggcgagctgtgtgctctgatggatcaggtccaccatatgcagcactccaaatggcaacacccctctgacctcactacaagaaattatgcaaggaggcagaaacacctacagcggtactcactgacacagtgggtggatcgaaatatgcgttctcaccacaggtttcagagattacccgattttagctattcttag

SEQ ID NO: 204161 - DNA, 1026 bp, synthetic construct
  misc_feature 1..1026: note = Description of Artificial Sequence: Synthetic coding sequence
  source 1..1026: mol_type = other DNA
atgatgtgcagccgggtgcccagcgagcagagcagcggcaccagcctcctgccgaaggatggcgctcctttttcgtgggacagtctcgacgaggacggccttgacgattctctgctggagctgagcgagggcgaagaggacgacggtgatgtcaattatactgaggaggaaatagatgcactcctcaaggaagacgatccatcatatgagcagagctcaggagaagatgacggtggtcacgtggaaaaaggggagaggggtagtcagattcttctcgacactccacgagaaaagaactcatcttatagcctcggccccgtcgctgagacaccagatttgttcaagttaccccagctttccaccagctctggccatgggcctgctcacacaaaaccactcaataggaggtcagtcttagagaagaatctgatcaaagtgaccgtagccccctttaatcctactgtatgcgacgcactgctggacaaggacgagaccgatagctcgaaagatactgagaaactgagctccctgggagaagaaatgcgagaggacggcctgagtcccaatgagtccaagctctgcactgagtctgaaggaatcagtcctaataattccgcatggaacggcccccaattatccagctcgaataacaatttccaacagaccgtgagtgataaaaacatgccggacagcgagaacccaacctctgtcttctcgcgaatctccgatcactcagagacaccaaatatggagctctcttgtcggaatggcggctcgcacaagtctagctgtgagatgcggtctctggtggtgtccacttcttctaacaaagacgtgttgaacaaagactctggcaagatgaaaggacacgaacgccgtctcggaaaggtcatcccagtgcttcagacaaaaacacggaccaacgtgccaacctttagccagtctaatctggaacagcaaaaacaattatatctgaggtcagtgattgctcatatcgaagaccccgaggacaccaatcagggatag

SEQ ID NO: 204162 - DNA, 441 bp, synthetic construct
  misc_feature 1..441: note = Description of Artificial Sequence: Synthetic coding sequence
  source 1..441: mol_type = other DNA
atgatgtgcagccgggtgcccagcgagcagagcagcggcaccagcctgctgccgaaagatggtgctcctttctcatgggattctctggacgaggatggtctcgacgatagtctcctcgaactctccgagggcgaggaggatgacggagacgtgaactacaccgaagaggaaatcgatgctttgctgaaagaggatgacccatcgtacgagcaatcctcaggggaagacgacggcggccatgtcgaaaagggagaaagaggatcccagattttactagataccccccgggaaaagaacagctcctactcactcggacctgtcgctgagacacccgatctgtttaaactgccgcaactctcgacctcttctgggcacgggcccgcccacaccaaacctttaaatcgcaggagtgtactcgagaaaaatctgataaaagtttag

SEQ ID NO: 204163 - DNA, 363 bp, synthetic construct
  misc_feature 1..363: note = Description of Artificial Sequence: Synthetic coding sequence
  source 1..363: mol_type = other DNA
atgatgtgcagccgggtgcccagcgagcagagcagcggcaccagcctgctgcccaaggacggggcccccttctcatgggattctttggatgaagatgggctggacgatagtctcctggagctcagcgagggcgaggaggacgacggtgacgttaattacactgaggaagagattgacgccctccttaaggaggatgatcccagttacgaacagtcatctggtgaagacgacggcggccatgtcgagaaaggagagaggggcagccagatcctcttggacactccccgtgagaagaattcttcatactctctcggccctgtggcagagacacccgatctgtttaagctgccccagctctcctag

SEQ ID NO: 204164 - DNA, 126 bp, synthetic construct
  misc_feature 1..126: note = Description of Artificial Sequence: Synthetic coding sequence
  source 1..126: mol_type = other DNA
atgatgtgcagccgggtgcccagcgagcagagcagcggcaccagcctcctcccaaaggatggggcccctttttcatgggatagcttggatgaggacgggttggacgatagtctgcttgagctgtag

SEQ ID NO: 204165 - DNA, 18 bp, synthetic construct
  misc_feature 1..18: note = Description of Artificial Sequence: Synthetic coding sequence
  source 1..18: mol_type = other DNA
atgatgtgcagccggtag

SEQ ID NO: 204166 - DNA, 393 bp, synthetic construct
  misc_feature 1..393: note = Description of Artificial Sequence: Synthetic coding sequence
  source 1..393: mol_type = other DNA
atgatgtgcagccgggtgcccagcgagcagagcagcggcaccagcctcctgcctaaggatggcgcacccttttcctgggacagtctggatgaggacggcttagatgatagcctcctcgagttatctgagggggaggaagatgatggagatgtgaattacacagaggaagagatagacgccctcctcaaggaagacgacccctcctatgagcagtcctccggcgaagacgacggggggcacgtcgaaaaaggggagaggggatcacaaattctgctcgacaccccacgcgagaaaaactcttcatattcactcggtcccgtagccgaaaccccggacttgttcaagctaccccagctgagcacgagttctggacacgggccggcccacacgtag

SEQ ID NO: 204167 - DNA, 1026 bp, synthetic construct
  misc_feature 1..1026: note = Description of Artificial Sequence: Synthetic coding sequence
  source 1..1026: mol_type = other DNA
atgatgtgcagccgggtgcccagcgagcagagcagcggcaccagcctcctcccaaaggatggagcaccattttcctgggatagccttgatgaggacggcctggacgatagcctcttagagctgagtgagggcgaagaggacgatggcgacgtgaactataccgaagaagagatagacgccttactcaaagaagacgacccgagctatgaacaatccagtggagaggatgacggcgggcacgtcgagaagggcgagcggggtagtcagatactcctggacaccccacgagagaagaattcttcttacagccttggccctgtcgccgaaacaccagacctcttcaaactccctcagctgagcacttcatccggccacgggcctgctcacaccaagccattgaaccgaagatccgtgctagagaagaatctgatcaaggttacagtggcacctttcaatcctaccgtctgcgacgccttgctcgacaaggacgaaacagattcttcgaaggatactgagaaattatcgtctcttggagaagagatgagggaagatggactgtccccaaacgaaagtaagctgtgtaccgagagtgaaggcatctcccccaataattcagcgtggaatggtccccagctgagtagcagtaacaataattttcagcaaactgttagcgacaagaacatgcctgattccgagaaccctacgagcgtgttctcccgaattagcgaccactccgagacgcctaacatggagctaagttgcagaaacggggggtcccacaagtcgtcatgtgaaatgcgctctctggtggtatcgaccagctctaacaaggacgtactcaataaggactcggggaaaatgaagggacatgagcgcagactgggaaaggtgattccggttctgcaaaccaaaacccggacgaatgtgcctacgttctcccagagcaaccttgagcaacaaaaacagctctacctgagaagcgtcattgctcacattgaggacccagaggataccaaccagggttag

SEQ ID NO: 204168 - DNA, 516 bp, synthetic construct
  misc_feature 1..516: note = Description of Artificial Sequence: Synthetic coding sequence
  source 1..516: mol_type = other DNA
atgatgtgcagccgggtgcccagcgagcagagcagcggcaccagcttgctcccaaaggatggggcacccttttcttgggatagcctcgatgaggacggcctggacgacagtttacttgaactgtccgaaggggaggaggacgatggcgatgtgaattacacagaagaggagattgatgcactgttaaaggaagatgatccctcatacgaacagagtagcggtgaggacgacggagggcacgtcgagaaaggcgaacgcggcagccaaattctgctcgatacaccacgggagaaaaattcttcctacagtctgggtccagtcgctgaaacccccgatttatttaaattaccacagctgagtacctcttccgggcacgggcctgctcacacaaagccacttaataggcggagtgtccttgagaaaaatctgatcaaagtgaccgtagcaccgtttaaccccaccgtctgcgacgcgctgctcgataaagatgagaccgactctagtaaagacacatag

SEQ ID NO: 204169 - DNA, 1764 bp, synthetic construct
  misc_feature 1..1764: note = Description of Artificial Sequence: Synthetic coding sequence
  source 1..1764: mol_type = other DNA
atggccaccgccgcctacgagcagctgaagctgcacatcacccccgagaaattctacgtggaggcctgtgatgacggagctgatgatgtattgaccatcgaccgggtgtcgactgaggtcacactcgcggtgaagaaggacgtgccgccaagtgccgtgaccagaccaatctttgggattctgggaactatccacctagtcgcggggaactacctaatcgtcattacaaagaaaattaaagtcggggaatttttcagccacgtggtgtggaaggctactgattttgacgtactttcatacaaaaagactatgctccatcttaccgatattcagctccaggataataagactttcctagcgatgctgaatcacgttcttaatgtggatggcttttatttctctacaacttatgacctcactcataccctccagcgactcagtaacactagtcccgaattccaggagatgtccttacttgaacgagctgatcagcgattcgtgtggaacgggcatctcctcagagaactgtctgctcaaccagaagtgcaccgctttgccctgccagttctgcacggattcatcaccatgcattcctgctccattaacgggaaatacttcgactggatcctgatcagtcggcgctcttgcttccgcgcgggggtccgttactatgttcgcggcattgattctgaggggcacgccgccaactttgtcgagactgaacaaatcgtgcattacaacggatccaaagcctcgttcgttcagactcggggatccattcccgtgttttggagtcagaggccgaatctaaaatacaaacctttgccccagatatcaaaggttgcaaatcatatggatggatttcagcggcattttgatagccaggtcatcatctacggcaagcaggtgattattaaccttatcaatcagaaaggctcggagaagcctctggaacagaccttcgcaaccatggtatcctctctcgggtccggaatgatgcggtacatcgcgtttgatttccataaagagtgcaaaaacatgcgctgggatagactatcaatcctgttggaccaggtggcggagatgcaagacgaactctcgtactttcttgtcgatagtgccgggcaggtcgtcgccaatcaggagggcgtgttcagatctaattgtatggactgtttggacagaacaaacgtgattcagagtttgctcgcaaggagaagcctgcaagcccagctccagcggttgggcgttctgcacgtcgggcagaagctggaagaacaggatgaatttgagaagatctataaaaatgcttgggccgacaatgctaacgcatgtgctaagcagtacgcgggcactggggctctcaagacagatttcacaagaacgggcaaaagaacccaccttgggctgatcatggatggatggaacagcatgatcagatattataaaaataactttagcgacggatttcgacaagattctattgatctctttctcggtaattactccgttgacgagctcgagagtcattcacctctgagcgtaccgcgcgattggaaatttctcgcgttacctataattatggtggtcgcattttctatgtgtattatctgccttctcatggctggcgatacatggacagagacattggcctatgtcctcttctggggcgtggccagcatcggcactttcttcatcatcctttacaatggaaaagattttgtcgacgccccacggctcgttcagaaagagaagatcgattag

SEQ ID NO: 204170 - DNA, 1581 bp, synthetic construct
  misc_feature 1..1581: note = Description of Artificial Sequence: Synthetic coding sequence
  source 1..1581: mol_type = other DNA
atgtggaagctggtgatgatggagcagatgacctacctgcccctgaccgtgtgtccgcagcggctgccgctccagagcagaaagatgttcctgttgcaactctctcaggatcagtatctcgtctactgggcccagtcaatttggtggcagctccaggacaataaaacctttctggccatgctcaaccatgttctcaatgtggatggtttctatttctcaactacatatgacttaacccatacactccagcggctcagcaacacatcccctgagttccaggaaatgtctctcctggaacgcgctgaccaaaggtttgtgtggaatggccacttgctgagagagttgagtgctcaacccgaggtacatcggtttgccctgccagtgctgcatggctttattaccatgcactcttgcagcatcaatggtaagtacttcgattggatcctgatttcacggcggtcttgctttcgggctggtgtgcgatactacgtcagagggatcgactctgagggccacgcggctaactttgtcgaaaccgagcagatcgtgcattataacggtagtaaagcttcgttcgtccagaccaggggatctatccccgtcttttggtcacagcggcccaacctgaagtacaagcctctccctcagatctccaaagtggccaaccacatggacgggttccaaaggcattttgacagtcaggtgattatctatggtaagcaagtaataattaatctcattaaccagaagggctctgagaagccgcttgagcagacctttgctacaatggtgagcagtctgggcagcgggatgatgcgatatatcgctttcgattttcacaaagagtgtaagaacatgaggtgggaccgcctcagtatactgttggatcaggtagcagaaatgcaggatgagctcagctattttctggtggatagcgctggccaggtggtggctaatcaggagggggtcttccgcagcaattgtatggactgccttgacagaaccaatgtcatccagtctctcctggcccgccgttccctgcaagcacaattacagagactcggtgtgctgcatgtcgggcaaaagttggaagaacaggacgaatttgaaaagatttataaaaatgcctgggccgataacgccaacgcatgcgcaaagcagtacgctggtacgggagccctgaagaccgatttcacgaggacggggaaacgcactcacttaggcctaatcatggacggctggaactctatgattagatattacaagaataatttcagcgatggttttagacaggatagtattgatctttttctcggcaactattcggtcgatgagcttgaaagccactcgccactctcggttccccgtgattggaaatttctggccctgcctattatcatggttgtggcgttcagcatgtgcatcatttgtctgttaatggctggagatacgtggactgaaactctcgcctatgtcctgttctggggggtggcctccattggaacattctttattattctgtacaacggtaaagacttcgtcgatgctccgagactggtacagaaagaaaagatcgattag

SEQ ID NO: 204171 - DNA, 2901 bp, synthetic construct
  misc_feature 1..2901: note = Description of Artificial Sequence: Synthetic coding sequence
  source 1..2901: mol_type = other DNA
atgttctggaagttcgacctgaacaccaccagccacgtggacaagctgctggataaagaacacgtgacccttcaggaactgatggacgaggatgacatcttgcaggagtgcaaggcccaaaaccaaaagctgctggattttctgtgtagacagcagtgcatggaggaactggtatcactgatcacgcaggatccccctctcgacatggaggagaaggtccgctttaaatatccaaatacggcctgcgaacttctaacgtgtgatgtgcctcagattagcgatcgcttgggcggggatgagtcgttgctgtctctgttatatgacttcctggatcacgaacccccacttaatcccttgttggcaagttttttctcaaaaaccatcgggaatttgattgcccgaaagacagaacaggtgatcaccttcctgaagaagaaagataagttcattagcttagtgcttaagcatatcggcaccagcgccctcatggacctgcttttgcgcctagtgtcttgcgtagaacctgccgggctccgccaggatgtgctgcactggctgaatgaagagaaagtcatccagagactggtggagctcatccatcccagccaagatgaagataggcagtcaaacgcttcccagacactgtgcgacatcgtaaggctaggtcgtgatcagggctcacagctccaggaggcactggaacctgaccccctgctgactgccctggaaagtcaggattgcgtggagcaactgttaaagaatatgttcgacggcgaccggacagagtcttgccttgtcagtgggacacaggtcctgcttaccttgctggagacacgaagagtaggcacagagggcttagtcgattcgttttcacaggggttagagaggagctatgccgtttcgtcttcagtgctacacggaatcgaacctaggctcaaggattttcaccagctcctgctcaatcctccgaaaaagaaagccatcctgacaacaatcggagttctggaggagccgctgggtaatgcaagattacatggtgctcgcctcatggccgccctcctacatacaaacaccccctcaattaaccaggagctatgcagattgaacaccatggacctcctgcttgacctgttttttaagtatacctggaataattttctgcactttcaggtggagctttgtattgcagccattctttcccacgcggctcgcgaagagcggactgaggccagcgggagcgagagccgggtggagccaccccatgagaatggaaaccgctcattggagaccccacaacccgcagcctcccttcccgacaacaccatggtgacacacctgtttcagaaatgctgtcttgtgcagcgaatcctcgaggcctgggaggccaacgaccatacacaggctgccgggggaatgcgtcggggaaacatgggacatctgacacgaatcgccaacgcagtggtacagaatctggagaggggcccagtgcaaacacacatttctgaagtgatacggggcttgcctgctgattgccgcggcagatgggagtcctttgttgaagaaactctaaccgagaccaaccgaagaaacaccgtggacctagtgtccacacatcacctccatagcagctctgaggacgaagacatcgaaggagctttcccgaacgagctgagcctacagcaggctttttctgactaccagatacaacaaatgacagccaatttcgtggaccaatttggatttaacgatgaggaatttgcagaccaagatgataatattaatgcacctttcgatcggatagccgagattaactttaatatcgacgccgacgaagatagtcctagcgccgcactgttcgaagcatgctgttctgatagaatccagccctttgatgacgatgaagatgaggatatctgggaagactcagatactcgctgtgctgctcgtgttatggcccgtccccgattcggagctcctcacgccagcgagtcatgttctaagaatggaccggagcggggtggacaggacggaaaagcctccctggaagcacacagagacgctcctggcgcaggagctccccctgccccaggcaagaaggaagcacctccagtagagggggattcagagggagccatgtggaccgccgtgtttgacgagcccgcaaatagcactcctactgctccaggtgtggtgagggatgtgggctcttcagtctgggctgcagggacctccgcccccgaagagaaaggatgggccaagtttactgatttccagcctttttgttgttcagaatcaggaccacgatgttcaagtcctgtggatacagaatgttcccatgctgagggttcacgatcccagggcccagaaaaggcatcccaagcctcatatttcgctgtatcacccgctagcccctgtgcatggaacgtctgtgtcacaagaaaggctcccttactcgcaagcgatagctcatctagcggaggcagtcacagcgaggacggagatcagaaagcagctagtgcaatggatgccgtgtcacggggcccagggagggaggccccaccactacctacagttgctcgaactgaggaggctgtgggccgggtgggctgcgctgatagtagactcctaagtccagcctgtccagctcccaaagaggttacggcagctcccgctgtagcggtcccacccgaagccactgtcgctattacaacagctctgtcgaaggccggccctgctatcccgacacctgctgtctcctcggcactggccgtggcggtgcctttagggcccattatggcagtgaccgcagccccagccatggtggctactttaggcactgtgaccaaggatgggaaaaccgatgcaccacctgaaggagcggcactgaatggaccggtatag

SEQ ID NO: 204172 - DNA, 2217 bp, synthetic construct
  misc_feature 1..2217: note = Description of Artificial Sequence: Synthetic coding sequence
  source 1..2217: mol_type = other DNA
atgagccggcggagccagcggctgacccggtacagccagggcgacgatgacggcagttcatcttctggtgggagctctgtggcgggctctcagtcaaccttattcaaggactcacccctcaggaccctgaagcggaaaagctccaacatgaagaggctctcccccgcacctcaactgggccctagtagcgatgcccatacgtcttactatagcgagtccctggtgcacgaatcttggtttcctccccgaagctctctcgaggagttacacggcgacgcaaattggggagaggacttacgcgtgcgacggcgcagaggcaccggaggctctgagagcagccgtgctagcggactggttggccggaaagctaccgaggactttcttggctcctcaagcggatactcatccgaggatgactatgtggaggactcagaaggtcgcgggtcaaaggtcacggagaccgaacccgtctcctctttccctgcaggctacagtgacgtggaccaacagtcttcatcgtcaagattgcgctctgctgtcagccgtgccggttccttactgtggatggttgctacaagccccggacggctgttccgcctcctatattggtgggcgggaaccacctggtatcgcctaacgacagccgcctcattgctggatgtatttgtcctcactcgccgattctcctcgctgaaaacatttctgtggttccttctccctctactgctgctgacctgcctgacctatggagcttggtacttctatccttatggtctgcaaaccttccatcctgctcttgtgagctggtgggccgcgaaggactctagaagaccagacgaagggtgggaggctagggattcttcgccacactttcaagccgagcagcgagtgatgagccgcgtccactcattggaacgccggcttgaggcgctcgcagctgagttctcttctaattggcagaaggaggctatgaggctggagcgattggaactccgccaaggagctccgggtcagggcggaggcgggggtctttcccatgaggacaccctggccctgttggaaggcctggtatccaggcgcgaagcagccctcaaggaagactttcggcgggagacagccgcccggattcaggaggagctctctgcgttgcgcgccgagcatcagcaggactctgaggatttgtttaagaagattgtgagagcaagtcaggagtctgaggctcggatccaacagcttaaatcagagtggcagagcatgacccaggagtcctttcaggaaagttcagtgaaagaactacggcgtctggaggaccagctggcggggttgcagcaggaattggccgcactggccttgaagcaatctagcgtggcagaggaagtcggactcctcccccagcagatccaggcggtcagagatgatgtagaatctcagtttccagcttggatatctcaattcttagccagagggggcggggggagagtgggattactccagcgagaggaaatgcaggctcaactgagggaactggagtctaaaattctaacacacgtcgccgagatgcagggaaaatcggctcgtgaggcggctgctagcctctcactgacactacagaaagagggagtcataggagtaacagaggagcaggttcatcatatcgtgaaacaggcgctccagagatactcggaagatcgcatcggactcgccgactacgctctggagtccggcggagcctccgtgatctctacacgctgttctgagacctatgaaacgaagacagccctgctgtccctgttcggcatccccttgtggtatcatagccaatccccgcgtgtcattcttcaaccagacgtgcatccaggaaactgttgggcattccagggaccacagggttttgccgttgtgcggctctcagcaagaattcggccgactgcggtgactttggagcatgtgccaaaagccctttcccccaattccacgataagcagtgcccccaaggacttcgcaatattcggatttgatgaagacctgcagcaggagggcactctcctgggtaagttcacctatgatcaagacggcgagcctatccagaccttccattttcaggccccgaccatggctacttatcaggtagtggagctgcgcattctcactaattggggccatccagagtacacgtgcatttaccggttccgcgttcacggagagccagcgcattag

SEQ ID NO: 204173 - DNA, 2154 bp, synthetic construct
  misc_feature 1..2154: note = Description of Artificial Sequence: Synthetic coding sequence
  source 1..2154: mol_type = other DNA
atgagccggcggagccagcggctgacccggtacagccagggcgacgacgacggctccagttcaagcggaggctcttccgtggccgggtcccagagcacactcttcaaggattcaccgctgagaactttgaagcgtaaatcttctaatatgaagcgattaagtcccgcccctcagctgggtcctagtagcgatgcgcacacatcttactactctgagagcctcgtgcacgagtcctggtttccccctcgcagctcactggaagaactgcatggtgacgcaaattggggagaggatctgcgggtgcgacggaggaggggtacagggggatccgagtcttcacgggcttctgggttggttggccgtaaagccactgaggatttcttgggtagctcttccggctacagttcagaggatgactatgttgggtatagcgatgtggatcaacagtcttcctcctccaggcttcgctcggcagtctcccgagctggcagtctgctgtggatggtcgctacgtcacctggacgactctttcgcctgttgtattggtgggccggcactacctggtatagactgacaaccgccgccagtctgctcgacgtctttgtgcttactcgtagatttagttcactgaaaacattcctctggttcctgctgccgttgctcttactcacgtgcttgacctacggggcctggtatttctacccttatggcctgcaaacattccaccccgcgttggtatcctggtgggcggccaaggatagtaggcgaccggatgagggatgggaagctcgcgattcgagtccacactttcaggccgagcagagagtgatgagtcgcgtgcactctttagagcgaagactcgaggccctagcagcggaattctcctctaactggcagaaagaggcgatgcggctggagcgcctcgaacttcggcagggagcccccggccagggcggcggaggtggtctgtcacatgaggacacgctcgctcttctggaagggctggtctcaagacgcgaggctgctttgaaagaggatttcaggcgcgaaaccgccgctcgtatccaggaagagttatcggcacttagggcagaacatcagcaagacagcgaggacctgttcaaaaaaatagtgagggctagccaagaatccgaggctcgcattcaacagctcaaatccgaatggcagagcatgacccaggagtcattccaggaatcatccgtgaaggaactacggaggctcgaggaccagctagctggcttgcaacaagagctggccgctctagctcttaaacagtcctctgtcgctgaggaggttgggctgctcccccagcagattcaagccgtgagggacgatgtggagtcacagtttcccgcatggatcagtcagtttctcgccagaggaggcggggggcgtgtcggactgctgcagcgagaagaaatgcaggcacagctccgagaacttgagagtaagatcctcacccatgtcgcggagatgcagggaaaaagcgctcgcgaagccgccgctagtctctctctgacattgcagaaggagggtgtcattggggtgacagaagaacaagtgcatcacatcgtgaaacaggccctgcagcgctactctgaagaccgcataggtctcgcggactatgcacttgagtctggaggcgctagcgtaatttctacgagatgctcagagacatatgagaccaagactgctctgctgtccctattcggtattccactgtggtatcactctcaatcaccgcgcgtgatactccagcctgatgtgcaccctggtaattgttgggctttccaagggccacaaggctttgcggtggtgagattatccgcacgcatcagacccaccgctgtcaccctggagcacgtgcccaaggccctgagccccaactcaaccatctctagcgcccccaaagatttcgcgatcttcggtttcgacgaagatttacagcaagaaggaacgcttctgggcaagttcacttatgatcaggatggtgagcccatccagacttttcatttccaagctcccactatggcaacctatcaggtggtcgaactccgtatcttgacgaactgggggcaccctgaatacacatgtatctaccgctttcgggttcacggggagcccgctcactag

SEQ ID NO: 204174 - DNA, 2154 bp, synthetic construct
  misc_feature 1..2154: note = Description of Artificial Sequence: Synthetic coding sequence
  source 1..2154: mol_type = other DNA
atgagccggcggagccagcggctgacccggtacagccagggcgacgacgacggctcctctagttccggcggctcctctgttgctggaagtcagagtactttgtttaaagattctcctctgcgtacactgaaacgtaaatcctctaacatgaagagattgtccccagccccacagcttggcccttcatcggacgcacacacgtcttactactccgaatctctggtccacgaatcctggtttccacccagaagttccctggaggagctgcatggggatgcaaactggggtgaggacctccgtgtgaggcgcagacgtggaactggtgggagtgaaagcagccgggcctcaggcttagtcgggcgcaaggccacagaggactttttaggatcctcttccggttactctagcgaagatgattacgtgggatattctgatgtagaccagcagagcagttcaagccggttgcgttccgccgtctcacgtgccggtagcctgctatggatggttgcaacttctcccggtcgtctgtttcgattattatactggtgggccggcacaacctggtacagactgacgactgctgcatcacttctggatgtcttcgtcttgacccgcaggttttcaagcctgaaaacatttctctggtttctcctcccacttttactcctaacctgcttgacctacggagcgtggtacttctacccatatggcctgcaaacattccatcctgctcttgtttcctggtgggctgcaaaagattccagaagacccgatgaggggtgggaggcccgcgactcatcccctcacttccaggcggagcagagggtgatgtctagggtccatagtctggagaggagacttgaggcactagcagccgagtttagctctaactggcagaaggaggcaatgcggttggaacggttagagctgcggcagggcgcgcccggacaaggggggggaggtgggctctctcatgaagataccttagcactcctggaggggctggtttctagacgcgaagcagcccttaaggaggactttcgtcgggagactgctgcaaggattcaagaggagctgagcgcccttagagccgagcatcagcaagacagcgaggacctgttcaagaagattgtaagagcttcacaagaaagcgaagcccggattcagcaattgaagtccgagtggcagtctatgactcaggagtcattccaggaaagttcagtgaaagaactcaggagattggaggaccagttggccggtctccagcaagaacttgccgccctcgcccttaaacagtcatcagtggcagaggaagtggggttacttccacagcaaatccaggccgtgagggacgatgtcgagagtcaattccctgcatggatcagccagtttctcgccagaggggggggaggacgggtgggtttgctccagagagaagagatgcaagcccagctgagggagctcgaatcaaagatcctgacccacgtcgctgagatgcagggcaaaagcgcgcgggaggcagccgccagtctctcccttacactgcagaaagaaggcgtgattggtgttactgaggaacaagttcaccacatagttaagcaggcattgcagcggtacagtgaggatcggattggcttagcagactacgccctggagtctggaggggcgtctgttatatccacgcggtgtagcgaaacctatgagacaaagactgcattgctcagcctgtttggcatacccctttggtaccattcacagtctccgcgcgtaatcttgcagcctgacgtgcaccccggtaattgttgggccttccagggtccacaggggttcgcggtggtgcgtctgagtgcgcgcattcgaccaacagcagtgacgctcgaacatgtaccaaaggccctgagtcccaattccaccatctccagtgcacccaaggattttgcgatattcggattcgatgaggatctgcagcaggaaggaactctgctcggcaagtttacctacgaccaagatggcgagcccatccagacttttcattttcaggccccaacaatggccacgtatcaggtcgttgaactcagaatcctgactaattggggacaccctgaatacacctgcatatatcgcttccgcgtgcacggagaacccgcccactag

SEQ ID NO: 204175 - DNA, 2121 bp, synthetic construct
  misc_feature 1..2121: note = Description of Artificial Sequence: Synthetic coding sequence
  source 1..2121: mol_type = other DNA
atggtgagcccccccagcgccggccagcggctgcggggcgtgcccgtttgggccgcaggagctttcagattttcaagcggggaagagagtacaagccatctgattatgagtcgccgatcccagaggctgacgcgctatagccagggtgacgacgacggcagctccagtagcggaggaagctcggtagctggaagtcagtccaccctgttcaaggattctccacttaggactctcaagcgaaaaagctctaacatgaagcgtctcagccccgctcctcagctagggcctagctccgatgcgcacacatcatattacagtgagagtctcgtgcacgagtcttggttcccacctcggtcatcgctcgaggaactgcacggcgacgctaactggggctattctgacgtagaccagcaatcgtcatcaagcaggttaaggtctgcggtttcaagagctggctctctgctctggatggtcgctacatctcccggaagactgtttagactgctatattggtgggcagggaccacttggtaccgactgacaactgcggcctctctgctcgatgtgttcgtcctgacccgcagattctcttcactgaagacgttcctctggtttctgctgccacttcttctgctgacttgcttgacctacggcgcctggtacttttatccgtatggtctccagacgtttcatcccgccctggtcagctggtgggctgcgaaggattcacggaggcccgatgaaggctgggaggccagagactcgagccctcacttccaggccgagcagcgggtaatgtcgcgggtacactctcttgagagacgacttgaagctttggcagctgagttcagctcaaactggcagaaagaggccatgaggctcgagaggttggaattgagacagggtgctcctggccagggcgggggaggcgggctgagccacgaggacacattagcgctcttagaaggcctcgtttcacgccgcgaggcagccctcaaggaggactttcggcgcgaaaccgctgcaagaatacaggaggaactgtcggctctaagagccgaacatcagcaggattctgaggatctattcaagaagatcgttcgggccagccaggagtccgaggctaggatccagcagctgaaatcagagtggcaatctatgacgcaggagagtttccaagaaagttccgtaaaggaattaagacggctggaggaccaactggcgggacttcagcaggaactggctgccctggccctaaaacagtctagcgtcgcagaagaggtgggattactcccccagcaaatccaggccgtgcgggatgacgtagaatctcagttcccggcatggatctctcaatttttggctcgtggtggaggaggccgggttggtctactgcaaagagaagaaatgcaagcccagctgcgagaattagagtctaagatcttaacccacgttgccgaaatgcaaggaaagagcgccagagaggcggccgcaagcctgtccctcactctgcagaaggaaggtgtgattggggtgactgaggaacaggttcaccatatcgtgaaacaagcccttcaacgctacagcgaagatagaattggcctggctgattacgcattggagtctggaggggcgtccgtgatcagcacgaggtgtagcgaaacctatgagaccaaaacagcactgctttccctcttcgggatcccactctggtatcattcccagtcgcctagagtgatcttgcaacccgacgtacaccctggaaattgttgggcctttcagggcccccaaggatttgctgtggttagactcagcgccaggattcgtccaacggcagtaacactggaacacgtccccaaagccctgtctcctaactcgacaattagcagtgccccaaaagattttgccatatttggctttgacgaagacttgcagcaggaaggtacactcctcggtaaattcacctatgatcaagacggggaaccgatacagacgtttcattttcaggcccccactatggctacctaccaggtagtggagctgcgtatattaactaactgggggcatcccgagtatacctgcatctaccgtttccgggtgcatggagagcccgcccattag

SEQ ID NO: 204176 - DNA, 375 bp, synthetic construct
  misc_feature 1..375: note = Description of Artificial Sequence: Synthetic coding sequence
  source 1..375: mol_type = other DNA
atgagccggcggagccagcggctgacccggtacagccagggcgacgatgacggttcatctagcagtggagggagctccgtcgccggatcccagagtactctgttcaaagacagccccctgcgcacactgaagcggaagagctccaacatgaaacgtcttagtcctgcaccacagcttggcccctctagcgacgcccacacaagctactactcagagagcctcgtgcacgagtcatggttcccccccagaagctctctagaggagttgcacggagacgccaactgggatcccacattccagaagctgctagaggcacagaaatcgccttggtttttccccgcccaagtccggacatgtggatgtgggggaggttag

SEQ ID NO: 204177 - DNA, 384 bp, synthetic construct
  misc_feature 1..384: note = Description of Artificial Sequence: Synthetic coding sequence
  source 1..384: mol_type = other DNA
atgagccggcggagccagcggctgacccggtacagccagggcgacgacgacggaagttcgtcatccggaggttcatcagttgcgggctcacagagcaccctgtttaaagattcccccttacggaccctcaagaggaaaagctcaaacatgaaaagactgagccctgcaccccagcttggaccatcatccgacgcacatacctcttactacagcgagagtcttgtgcacgaaagctggttccccccaaggagttctcttgaggaattacacggggatgccaactggggttattcagacgtggaccagcaatcttctagcagcaggctgcggagcgccgtgagtcgcgcaggctctctgttatggatggtcgcaaccagcccctag

SEQ ID NO: 204178 - DNA, 333 bp, synthetic construct
  misc_feature 1..333: note = Description of Artificial Sequence: Synthetic coding sequence
  source 1..333: mol_type = other DNA
atgagccggcggagccagcggctgacccggtacagccagggcgacgacgatggatcatctagttcgggggggtcctctgttgccgggtctcagtcgacactctttaaagactcgcctctgaggacactaaagaggaagagttctaacatgaaacgacttagccctgccccgcaactgggaccgagcagcgacgcccacacctcatattacagcgaatcccttgttcatgagagttggtttccgccaaggagcagcttggaagagctccacggtgatgcaaattggggggaggacttaagggtgagaaggcgacgcggcacgggaggatcttag

SEQ ID NO: 204179 - DNA, 675 bp, synthetic construct
  misc_feature 1..675: note = Description of Artificial Sequence: Synthetic coding sequence
  source 1..675: mol_type = other DNA
atgagccggcggagccagcggctgacccggtacagccagggcgacgatgatggctcatcctccagtggcggaagcagtgttgctgggtcacagtcgaccctcttcaaagattctcctctccgcacattgaagagaaagtcttcaaacatgaagagattgagccccgctccacagctgggcccatcgtcagatgcgcatacctcatactactccgagtccctggttcacgagtcttggttcccacccaggagcagtctggaggaactgcatggcgacgcaaattgggggtactccgatgtggaccagcagtcctcatctagccggttaaggtccgccgtctcacgcgccggaagtctgctgtggatggtggcaacctcgccagggcgactatttagactcctttactggtgggccgggaccacatggtaccgactcactacggcggctagtctgctggacgtgtttgtgctaactaggcgattctcttctcttaagactttcctttggttcttgctcccactattgctacttacatgccttacatatggtgcctggtatttttatccttacggcctacagaccttccaccccgctctggtgtcgtggtgggctgcaaaagattcccggaggccagacgaaggctgggaggctcgcgatagtagtccacatttttag

SEQ ID NO: 204180 - DNA, 306 bp, synthetic construct
  misc_feature 1..306: note = Description of Artificial Sequence: Synthetic coding sequence
  source 1..306: mol_type = other DNA
atgagccggcggagccagcggctgacccggtacagccagggcgacgacgacggctcttcaagcagtggggggtcctcagttgccggcagtcagtcaacactgtttaaggattctcccttacgaacccttaaacggaagtcttctaatatgaaaaggctaagccctgcacctcagctggggccttccagcgacgctcacactagttactactcagaaagcctcgtgcacgagagttggttccctccgagatcaagcctagaggaacttcatggggatgctaactggggcgaagacttaagggtctag

SEQ ID NO: 204181 - DNA, 435 bp, synthetic construct
  misc_feature 1..435: note = Description of Artificial Sequence: Synthetic coding sequence
  source 1..435: mol_type = other DNA
atgagccggcggagccagcggctgacccggtacagccagggcgacgatgacggcagctcatctagtggtggatcctccgtcgctggctcgcagagcacactgtttaaggacagccctcttagaactctcaagagaaaatctagcaacatgaaaaggttgtctcccgcaccacagcttggtccctctagtgatgcccacacatcttactattctgagtccctagtgcatgaaagttggttcccaccaagatcttcccttgaagaactccacggggatgccaactggggggaagaccttagggtgcggaggcgaaggggtacgggaggaagcgagagctctcgagcctcagggttagtgggacgcaaggccacagaagatttcctgggatcaagtagtggctattcctctgaggatgattacgttgggagaaggtag

SEQ ID NO: 204182 - DNA, 618 bp, synthetic construct
  misc_feature 1..618: note = Description of Artificial Sequence: Synthetic coding sequence
  source 1..618: mol_type = other DNA
atgagccggcggagccagcggctgacccggtacagccagggcgacgacgacggatctagcagttcaggaggaagttccgtggcaggtagtcagtccacattattcaaggactcgccccttagaactttaaaacggaaatcttctaacatgaagcgcctgtcacctgcaccccagctcggcccttcgtcagatgctcatactagctactactctgaaagtctcgtccacgagtcatggttcccgcccaggtcctcccttgaggaactgcacggagacgctaattggggtgaggacctgcgagtccggagacgcagggggacaggcggttctgaatcttcaagggcatcaggcttggtgggccgcaaggccactgaagatttcttgggttcctcatcaggatacagttctgaagatgactatgtaggatattccgacgtagaccagcagtcctcctcctcacggctcaggtccgctgtgtcacgggccggatccctgctttggatggtagcaactagtcccggcaggctctttcgtttgctgtactggtgggccggcacaacttggtatagattaactactgcagcaagtctactggacgtattcgtgctgacgaggtag

SEQ ID NO: 204183 - DNA, 1140 bp, synthetic construct
  misc_feature 1..1140: note = Description of Artificial Sequence: Synthetic coding sequence
  source 1..1140: mol_type = other DNA
atgccccggagcagccggagccccggcgaccccggcgccctgctggaggatgtggcccacaacccgcgtcctaggcgcatcgcgcaaaggggaagaaacacttccaggatggccgaggatacaagccccaatatgaacgataatatcctgctgccagtacgcaacaatgatcaagccctcgggctgactcaatgtatgctggggtgcgtgtcttggtttacatgtttcgcttgcagtttacgcacgcaggcgcaacaagtgttgttcaatacctgtaggtgcaaactgctctgtcagaagctcatggagaagaccggcattttgcttctatgcgcatttggattctggatgtttagtatccacctaccaagcaagatgaaggtgtggcaggatgactcgattaatggacctttgcagagcctgagattgtatcaggaaaaagtgaggcatcacagtggagaaattcaggatctgcggggatccatgaaccagttaattgcaaaactgcaggaaatggaagcgatgagcgacgagcaaaaaatggcccaaaagatcatgaaaatgatccacggcgattacatcgagaagcccgactttgccttgaagtcaatcggtgcctccattgactttgagcatacatccgtgacttataaccacgagaaggcccatagttattggaactggatccaactatggaactatgcccagccaccagatgtgattttagagcctaatgtaaccccggggaactgttgggcgtttgagggcgatcgcggccaagtgaccatccagcttgcgcagaaagtgtacctttctaacctgaccctgcagcacattccaaaaactatttccctgagcggcagccttgacacagcacccaaagacttcgtgatttatggcatggaggggtcccccaaggaagaggtttttcttggagccttccagttccagcccgagaacatcatccagatgttccccctccaaaatcaacctgcccgggcattctctgcggtcaaggtcaaaatcagcagtaactggggcaaccccggattcacatgtctgtatcgcgtgagagtgcatgggtctgttgcgcctccaagagagcaaccacaccagaatccttatcctaagcgtgactag

SEQ ID NO: 204184 - DNA, 369 bp, synthetic construct
  misc_feature 1..369: note = Description of Artificial Sequence: Synthetic coding sequence
  source 1..369: mol_type = other DNA
atgccccggagcagccggagccccggcgaccccggcgccctgctggaggatgtcgcacacaacccacgtccacgacggatcgcgcaacgaggcaggaatacctcacgtatggctgaggatacatcccccaacatgaacgacaacattctgctgcccgtgaggaataatgaccaagccctgggtttgactcaatgcatgctggggtgcgtctatgcgtcatgctgtgcccgctctagctggcggcgtcaggcattttgttcgagcgtgttatccgtctgcccacgggcactgccgtctccccgatggcgatatccatgggctcttgctctgatcatagggcattgggcacgtcactgtactgcaacttag

SEQ ID NO: 204185 - DNA, 1065 bp, synthetic construct
  misc_feature 1..1065: note = Description of Artificial Sequence: Synthetic coding sequence
  source 1..1065: mol_type = other DNA
atgccccggagcagccggagccccggcgaccccggcgccctgctggaagacgtcgcccataatccaagaccccgcagaattgcacagaggggcaggaataccagtcggatggcagaggatacctctccgaatatgacctggttcacttgcttcgcgtgcagccttagaactcaggcgcagcaggtgctgttcaatacctgtaggtgcaagctgctttgtcagaagctgatggagaaaaccgggattctgctgttgtgcgcatttgggttctggatgttcagcatccacctcccttccaagatgaaggtttggcaggacgactccatcaacgggcccttgcaatccctcagactgtaccaggaaaaggtgcgacaccactctggggaaatccaggatctgagagggtcaatgaatcagctgatcgcaaagttacaggaaatggaggctatgtccgatgagcagaaaatggcgcagaaaatcatgaaaatgatccatggggattacattgagaagcctgactttgccctgaaaagcataggtgccagtatcgactttgaacatacttcggtgacctacaaccacgagaaggcccactcttactggaactggattcagctgtggaattacgcccagccaccagatgtcattttggagcctaacgtaactccgggcaattgttgggcttttgagggagatcgtgggcaggtgaccatccaacttgcacagaaggtttacttatcaaacctgaccctgcaacacattccaaagactatctccctatctggctcgctggatactgcccctaaggattttgtgatctacggtatggaaggctctccgaaggaggaagtttttctcggcgcctttcaatttcaacccgagaacattattcaaatgtttcccctgcagaaccagcccgcacgggcatttagcgccgtcaaggtcaaaatctcctctaattggggcaatcctggctttacctgcctttaccgtgtgagggtgcatggaagcgtggcgcctccgcgagagcagccccaccagaatccttaccctaaaagagactag

SEQ ID NO: 204186 - DNA, 459 bp, synthetic construct
  misc_feature 1..459: note = Description of Artificial Sequence: Synthetic coding sequence
  source 1..459: mol_type = other DNA
ggcgccctgctggaggacgtggcccacaacccccggccccggcggatcgcgcaaagggggagaaatacatcacggatggccgaagatacttcacctaatatgaacgacaacatcttactgcctgtcaggaataacgatcaggctctgggattaacacagtgtatgttgggatgcgtcagttggtttacttgttttgcctgttccttgcggacacaggcacagcaggtcttgttcaatacatgcagatgtaaacttctgtgccagaagctgatggagaaaaccgggattctgctcctctgcgccttcggcgtgtcacaaggcccggcacagagtcaggtagaagtctccctgggacccggcactgattacagaacattgggtaaaacactccattgtcatgtgacacaatttccccacttgccagacggctgctgctgcgaaaactacgagatgaagtag

SEQ ID NO: 204187 - DNA, 387 bp, synthetic construct
  misc_feature 1..387: note = Description of Artificial Sequence: Synthetic coding sequence
  source 1..387: mol_type = other DNA
atgagcgagggcggcggccaggtgagctgcatcttcgccgcccccacaaggctgtgcagatggcccgctttaattgaatgcggggttaatcttacccagcccctgtgtgagtggatgatccaggttgcacgagaccgcaccctcagtcttgcttgggaagttgcaagccttctgacactctcatccagcgaagtggggctcgaaggcgtagggaccatttggccctcgtcctacagttcggaggagtctagccgtaacggcgctgagcaggggcggcagctgagcatcgaaggcccatttcagggacaaaattgcccgagccacccagccgccgccctaccattgcccatgcggggtgaatcacaggctacctcatgccaggtttag

SEQ ID NO: 204188 - DNA, 3975 bp, synthetic construct
  misc_feature 1..3975: note = Description of Artificial Sequence: Synthetic coding sequence
  source 1..3975: mol_type = other DNA
atgagccggcggaagcaggccaagccccagcacttccagagcgacccggaagtggcaagcctccctagaagggatggggacacggaaaaggggcaacccagcagaccgactaagagcaaggacgcacatgtgtgcggtcgctgctgtgccgagttctttgaattaagtgacctgctgttacacaagaaaaattgtactaagaaccaattggtgctgatcgtcaatgaaaacccggcgagtccacccgagacgttcagcccttcacctccccccgacaacccagacgaacagatgaatgacaccgtcaacaaaactgatcaggtagactgttcggatttgagcgaacacaacggtttagaccgcgaagagagcatggaggtcgaggcgcccgtggctaacaagtctggctccggaacctcaagcggttctcattcgtccacggctccgtcatccagcagcagcagcagttccagctccggcgggggcggcagtagctctaccggaaccagcgcaataacaacatccttgccccaactgggagacttaacgacactaggaaacttctccgtgataaactccaacgtgattattgagaatctccagagtacgaaggtcgcagtcgctcagtttagccaggaagctcgttgtggaggtgctagcgggggaaagctggcagtgcctgcactcatggagcaactgctggccctgcagcagcagcagattcatcagctccagctgatagaacaaattaggcatcagattttactgctggccagccaaaatgcagacctccccacgagctcctcaccaagccaggggaccctccgcacctctgcaaaccccctgagtacgctgtcttctcacctgagccagcagctggctgccgccgccggacttgcccagtctcttgcatcgcagtcggcatctatttccggggtgaagcaactgccccctattcagctcccccagtctagttccgggaatacaattatcccctccaactccggtagttcccctaacatgaatatcctcgccgctgctgtgactacgccgtcaagcgagaaggtggcctcctcagctggagcttctcatgtgagcaatcctgctgtcagcagctcaagcagccccgcatttgcaatttctagtctgcttagccccgcctcgaaccccctcctaccccagcaagcctctgcaaattctgtgtttccttcaccactgcctaacatagggactacagcagaagacttgaactctctcagcgctctggcccagcagcgtaaaagcaagccccctaacgtgactgctttcgaggctaaatccacaagcgacgaggctttcttcaaacacaaatgccggttttgtgcaaaggtattcggatccgactccgccctacagatccaccttcggtcccatactggtgagcgcccctttaagtgtaacatctgcggcaatcgcttcagcactaaagggaacttaaaagttcattttcagagacataaagaaaaatatccgcacatccaaatgaacccttatccggtccctgaacacctcgacaatatcccaacatctacaggcatcccctacggcatgagtattccacctgagaaacccgtgacatcttggctggacaccaaacctgtgttgccaaccttgaccacttctgtgggactccccctcccccctaccttaccatcactgatccccttcatcaaaaccgaggagccagctcctatccccatctcacactcggccacatcgcccccaggtagcgtgaaaagcgatagtgggggaccagagtcggccacacggaatctgggggggctgcccgaggaggccgagggctccaccctccccccttcagggggtaaaagcgaggagtctgggatggttactaactccgtacccacggctagcagcagcgtcctttcttccccggccgccgattgcgggcctgctggctccgccacaacatttacaaatcctctgctcccacttatgtcggaacagtttaaggcaaaatttccctttgggggactgctggactctgctcaggccagtgaaacttcgaagctccagcaactcgtggaaaatatcgataagaaagctacagatcccaacgagtgtattatttgccacagagttctgtcctgccagtccgcactgaagatgcactaccggactcacacaggggaacgcccctttaagtgtaaaatatgcggacgagctttcaccaccaagggaaaccttaaaactcattattccgtgcatagagcaatgcccccgctgcgagtccagcactcctgccctatatgtcagaaaaagtttactaatgccgtggttttgcaacagcatatacgtatgcatatgggtggccaaatacccaatactcccgttcccgatagctactccgagagcatggaatccgataccgggagctttgatgaaaaaaacttcgatgatctggataacttctctgacgagaatatggaggactgccccgagggaagcatcccagatacgccaaaaagcgctgacgccagtcaggattccctgtcctccagcccactccctctggagatgtccagtatcgccgcactagagaatcagatgaagatgattaacgcgggcctggcggagcagcttcaggcttcccttaaatctgttgaaaacggaagcattgaaggcgacgtgttgaccaacgatagcagttccgtgggaggagacatggagtcacagagcgccggttctccagcaatctctgagtccacatcttcaatgcaggctttgagccctagcaacagcacccaggagtttcataaatcaccatccattgaagaaaagccacagagagcagttccatccgagttcgccaatgggctgagcccaacaccggtgaacgggggagcccttgacctaacgtcttctcacgccgaaaaaataatcaaggaagactcgctggggattctgtttcccttcagagatagaggaaaatttaagaatacggcctgtgatatctgtgggaagacttttgcttgtcagagcgcgctcgacattcattacagatcgcataccaaagaacgacctttcatctgtaccgtgtgcaaccggggttttagcaccaagggaaacttgaagcaacatatgctgacgcaccagatgagggacctgccaagccaattgtttgaaccatcgtcaaacttggggcccaaccagaactccgccgtcatccctgctaactctctgtcctctttaatcaagaccgaggtcaatggcttcgtgcacgtttcacctcaagactcaaaagatacccccacctcacatgttccatctggtcccctgagctcctcagcgacaagcccggtgctgcttcccgctttaccgaggaggacccctaaacagcattactgtaacacctgcgggaagactttttcttctagcagcgcactacagatccatgagaggacacacactggggagaagccattcgcttgtactatctgcggaagggcatttactactaaaggaaatctgaaagtccatatgggtactcatatgtggaactccacacccgccaggcgaggacgcaggctttctgtcgacggcccaatgacctttctgggcgggaatcctgtcaaatttccggagatgttccagaaagacctcgccgcacgatcggggtccggtgatccatcctctttttggaatcagtacgctgcagcactgagcaacggactagcaatgaaagctaatgagatttccgtaattcagaatggtgggattccccccattcccgggagtctgggttcagggaattcctcacctgtgagcggcctgactggaaacctggagagactgcagaacagcgaacccaatgcacccctggcaggccttgagaagatggctagtagcgaaaacggaactaacttccggttcacccgttttgtggaggactctaaggagatagttacaagttag

SEQ ID NO: 204189 - DNA, 3684 bp, synthetic construct
  misc_feature 1..3684: note = Description of Artificial Sequence: Synthetic coding sequence
  source 1..3684: mol_type = other DNA
atgaacgacaccgtgaacaagaccgaccaggtggactgcagcgacctgagcgaacataacggcctggatcgggaggaatcgatggaggtcgaggctcccgtcgcgaataagtcaggcagcgggacaagctctggcagccatagctccacagcccccagcagtagtagtagtagttcttctagcagcggcggcgggggttcaagttccacagggacgtctgctatcacaacgagcctgcctcagctgggagatttgacaaccctcggtaactttagtgtgatcaactctaacgtgattatcgaaaatcttcagagcacaaaagttgccgtggcgcagttcagtcaggaagctcgatgtggcggggcgtctgggggcaaattagccgtgcccgccctaatggagcagctgctcgccttacagcagcaacaaatccaccaactgcagttaattgagcaaataagacaccagatcctgctgctggcctctcagaacgctgatctcccaacatcaagctctcctagccagggcacactgcggacgagcgccaaccctctgagcaccctaagctctcacctttcccaacagcttgctgctgcggccggtcttgctcagagtctggcttctcaaagcgcctccattagcggtgttaaacagctgcctcccatccagcttccgcagtcatcttcaggcaacacaatcatccccagcaattccgggtcaagccctaatatgaacattctggcagccgccgtcactaccccttccagcgagaaagttgcttcgagtgctggggcgagccacgtgagtaatccagctgtgagttcctcatctagcccagcctttgccatctcatcgctgctgtccccagcctctaaccccttgttgcctcagcaggcttcagccaacagtgtattcccttcccctttgcccaatatcgggaccacagcagaggacctcaacagcctgagcgccctggcccagcagaggaaatcaaaaccgcccaatgtcacggcgttcgaggctaagagcacctccgacgaggccttcttcaaacataaatgcaggttttgtgccaaggtctttggatcggacagtgccctccagattcacctgaggtctcacaccggggaaagaccctttaagtgtaacatttgtggtaaccggtttagtacgaaaggaaatctgaaggtgcacttccagcgccacaaagagaaatatcctcatattcagatgaacccataccccgtgccggagcatttagacaacatccctactagtaccggaattccatatggaatgtccattcccccggagaagcccgtgacctcctggcttgatactaaaccagtgctgcccaccctcaccacctcagttgggttaccactcccacctaccctgccaagtctcatcccctttatcaaaaccgaggaacctgcccccatccctatctcgcacagcgccactagccccccaggctcagtgaagtcagatagcggagggcccgagtccgccacacgtaacctcgggggcctcccagaagaagctgagggctctactttacctcctagtgggggaaaatccgaagaatccggcatggtgactaactcagtcccgacagcctcgtcctctgtactttcaagcccggcggctgactgcggtccagccgggagtgccaccactttcactaacccccttctgccactgatgagcgaacagttcaaagcgaagttcccatttggaggtctgcttgattctgcacaagcctccgagacctcgaagttgcagcagctggtagagaatattgataagaaggccacggatccaaacgaatgtattatatgtcatagggtgttgagttgtcagtctgctttaaaaatgcattacaggacccataccggggagcgcccatttaaatgtaagatctgtggccgcgcctttacaacaaaaggtaatcttaaaacacactacagcgtgcaccgtgctatgcccccgttacgtgtgcagcattcttgccctatctgccaaaaaaagttcacaaatgccgtggtcttacagcagcatatcaggatgcatatgggcgggcagattcccaacacacccgttcctgacagctatagcgaatctatggaaagcgacacaggctctttcgacgagaagaatttcgacgacctagacaattttagcgacgaaaacatggaagactgccctgagggttctattccagataccccaaagtctgccgatgcttcacaagattccttgagttcatccccactgcccctggagatgtccagcatcgcggctctcgaaaatcaaatgaagatgattaacgcagggttggcggagcaactgcaagcaagcctaaagtccgtggagaacggcagtattgagggagatgtattaaccaatgatagctcaagtgttggcggcgatatggagagtcagtctgccggatctcctgcgattagtgagtccactagtagtatgcaggctctgagtcctagcaattctacacaggaatttcataaaagcccctcaattgaagagaaacctcaacgcgcggttccctctgaattcgccaacggcctgagcccgacccccgtgaatggcggggccctggatctcacttcctcccatgcagaaaagattattaaggaagattctctggggattttattcccattccgggacagaggaaagtttaagaacaccgcgtgtgacatctgcggcaaaacttttgcctgtcagtcggccctggatatccactacagatctcacacgaaggaacgccctttcatctgcacagtgtgtaaccggggattctctacgaaaggaaatcttaagcaacacatgttaacacatcagatgagggacttaccctctcagctcttcgaaccctcatccaaccttggacctaaccagaattcagctgtgatccctgcaaatagtctgtcatcactgatcaaaaccgaggtgaatggatttgtgcatgtgtccccgcaagactcaaaagacacgccgacctctcacgtgcctagcggtccactgtcgtcctcagccacttcccctgttctgcttcctgctctacccagaaggacgccaaaacaacattattgtaatacatgcgggaagaccttcagcagttcttcagccctgcagatacatgagcgcactcacaccggtgagaagccatttgcttgtacgatctgtggtagggctttcacaactaaagggaaccttaaagttcatatgggcacgcatatgtggaactccaccccagcccgcagaggccgcagactttcagtcgacggtcccatgaccttcctcggaggaaatcccgtcaagttcccagagatgtttcaaaaggaccttgcagctaggagcggcagcggcgatccgtcatcattttggaatcaatacgccgccgccttgagcaacgggcttgccatgaaggcaaatgagataagcgtcattcagaatggggggatcccacccataccagggtctttgggctcgggaaactcctctccggtgtctggcctcaccggcaacctcgagaggttgcagaatagtgaacctaacgcaccgttagccggactagagaagatggcctcgtccgagaacgggaccaattttaggttcacacgttttgtcgaggatagtaaggagattgtgacctcatag

SEQ ID NO: 204190 - DNA, 3867 bp, synthetic construct
  misc_feature 1..3867: note = Description of Artificial Sequence: Synthetic coding sequence
  source 1..3867: mol_type = other DNA
atgagccggcggaagcaggccaagccccagcacttccagagcgaccccgaagtagcctcattaccgcgacgagatggcgataccgaaaagggtcagccaagtaggcccactaagtccaaggacgcacacgtatgtggacgatgttgcgccgaatttttcgagctttctgatcttctcttgcacaagaaaaactgtacaaaaaaccaactcgtcctaatcgtgaacgagaatcctgcgtcgccccccgagacctttagccccagccctcctcctgacaaccccgacgaacagatgaatgatacagtgaacaagaccggtagtcacagcagcactgcaccctcgtccagctcctcatcctcctcttctagtggtggcggtggatcgagttccacggggacaagcgcgataacaacgtctctcccacaactgggtgatctaaccaccctggggaatttttctgtgataaacagcaatgtaataatagagaacctacagagcactaaagtggccgttgcacagttctcccaggaggccaggtgtggcggcgcctctggcggcaagctggccgtgcccgctctaatggagcagcttttagctctgcagcagcagcagattcaccagttgcaactgatagaacagatccgtcaccagatcttgctgcttgcctcccaaaatgccgatttgcctaccagtagtagcccgtctcaaggtacactcaggactagcgcaaatccactgagtaccctgagttcgcatctgagtcagcagcttgctgcggccgcagggttagcccagtcccttgcatcccagtctgcttcaatatctggagttaagcagttaccaccaatccagctgccgcagtcatcctcaggcaataccattatcccatctaatagcggttcaagccctaacatgaatattcttgcagcagctgttaccactccttctagcgaaaaagtggcaagctctgcaggagcatcacatgtcagcaaccctgcagtttcttccagcagctcccctgccttcgccatttcctcactcctgagtccagcaagcaatcccctgcttccccagcaggcctccgctaatagcgtgtttccgagcccactacccaacattgggacaactgcagaggatctgaattccctttcagccctcgcgcagcagagaaaaagtaaaccgcccaacgttaccgccttcgaagcaaaaagcacatcggatgaagctttcttcaagcacaagtgcagattttgcgcaaaagtgttcgggagcgattcagcactgcaaatccacctcaggtctcacacgggggagagaccattcaagtgcaacatctgcgggaatcgtttcagcactaaaggtaatcttaaagtgcatttccagagacacaaggagaagtatcctcatattcagatgaacccctacccagtacccgagcacctggataatatccccacctccaccgggatcccttacggtatgagcatacctccggagaagccagtgacctcatggctcgacactaagccagttctgcccaccctcactacatccgtgggccttccacttcccccaacactcccatccctgattccattcatcaagaccgaggagccagcacctattccaattagtcacagtgccactagtccacctgggtctgtgaaatctgattcagggggcccagagtctgctaccagaaatctaggaggcttacccgaggaggccgaagggagtaccctgccaccatccgggggaaaatctgaagagagcggcatggtcaccaacagcgtgcctacagccagcagcagcgtgctgtccagccccgccgcagattgcgggcctgctggctccgccacgacgtttacaaaccctcttctgccgcttatgagcgaacaattcaaggccaagttccccttcggcggactgcttgatagtgcacaagcttcagaaacgtctaagttgcagcaactcgttgagaacattgacaaaaaggccaccgatcccaatgagtgcatcatctgccatagggtcctttcttgccagtccgccctaaagatgcactacagaacccacaccggcgaaaggccctttaaatgtaaaatatgtgggcgcgcttttacaaccaagggcaatctgaaaacacactattcagtgcacagagccatgccgccgcttcgcgtgcaacattcgtgccccatatgccaaaagaaattcacaaatgccgtcgttctgcagcagcacatccgcatgcacatgggtggacaaattcctaacacacctgttcccgacagttattcagaatctatggagagcgatacaggcagctttgatgaaaaaaacttcgacgacttggacaactttagcgatgaaaacatggaagactgccctgagggcagtatacctgacacccccaaatcagccgacgcttcacaggattcgctttcctcctcaccgctgcctctggagatgtcgtccattgccgctctggagaaccaaatgaagatgattaacgccggccttgcagagcaacttcaggcctcactgaagagcgttgagaacggctcaatcgagggcgacgtactgaccaatgacagttcaagcgtggggggcgatatggagtcccagtcagcaggctcgcctgccatctctgagagcacatcctccatgcaagctctgtccccgagcaatagcacacaggaatttcacaaaagtccctccatcgaggagaaacctcagcgcgccgtgccgtcagaattcgcgaacggacttagcccaacccctgtcaatggaggcgccctggacctgaccagtagccacgctgagaagatcatcaaggaagattcactgggtatcctcttcccttttcgggatcggggcaaattcaagaacaccgcctgcgatatctgcggcaaaacttttgcttgtcagtccgccttggacatccattatcgctcccatactaaagagcggccattcatatgcaccgtgtgcaaccgcgggtttagcacaaagggtaatttgaaacaacatatgttgactcaccagatgcgggacctgccttcccagctttttgagccttccagcaatctcggacccaaccagaattctgcagtcatacccgcaaattcactgagttcgctcattaagactgaggtgaacggatttgtccacgtatccccacaggattccaaagacacaccaacctcacacgtcccaagcggacccctgtcatcctcagctactagcccagtactactgccagcccttcctcgccgcaccccaaagcagcactactgcaatacgtgcggaaagactttttcctcgagtagcgccttgcagattcacgagaggacccacacaggtgaaaagcctttcgcctgcaccatctgtgggagagcctttaccaccaagggaaatctgaaggtgcacatgggaacccacatgtggaactccacacctgcacgacggggtaggcgtctcagtgttgatggtccaatgaccttcctgggcggcaatccggtgaaattccctgaaatgtttcaaaaggatctggccgcacgttctggcagtggcgacccaagctcgttttggaaccagtacgccgctgcattgtcaaacggcctcgccatgaaggccaatgagatttcagtcatccagaacggggggatcccccctattccagggtctctgggctccggtaatagctctccagtgagcggccttactgggaatcttgaacggttgcagaatagcgaacccaatgcaccgttggcgggactggagaaaatggcctcaagcgagaatgggactaattttcgtttcaccagatttgttgaggattcaaaggagattgtgaccagctag

SEQ ID NO: 204191 - DNA, 444 bp, synthetic construct
  misc_feature 1..444: note = Description of Artificial Sequence: Synthetic coding sequence
  source 1..444: mol_type = other DNA
atggtgcacatgggcacccacatgtggaacagcacccccgcccggcgggggagaaggcttagcgtcgatggcccaatgacttttctcggggggaacccagtcaaatttccagagatgttccagaaagaccttgctgccaggagcggcagtggcgacccgtcctctttttggaatcagtacgcagcggcattgtctaacgggctcgcgatgaaagccaacgagatcagtgtcatccagaacggcggaatccctccaattcctgggtctctcggctccgggaatagcagccccgttagcggcctgaccggtaacttggagagactgcaaaactcagagcccaatgcaccactcgctggcttggagaagatggcctcaagtgaaaacggaacaaattttcgttttaccagattcgtggaggattctaaggagatcgtgacctcatag

SEQ ID NO: 204192 - DNA, 3024 bp, synthetic construct
  misc_feature 1..3024: note = Description of Artificial Sequence: Synthetic coding sequence
  source 1..3024: mol_type = other DNA
atgagccggcggaagcagcggaagccccagcagctgatcagcgactgcgagggcccctctgccagtgagaacggagatgctagcgaggaggaccacccccaggtctgcgccaagtgttgcgcccagttcacagatccaaccgagttcctcgcccaccagaacgcgtgtagtacagatccccccgtgatggtcatcatagggggccaagaaaatccgaacaattcatctgcctcgagcgaaccccgccctgagggccacaacaatccacaggtgatggacactgagcacagtaaccctccagacagcggatcgtcagtgccgacggaccctacatggggtcccgagcgtcgaggcgaagagtcgcctgggcacttcctggtcgcagctactggtacagctgccggcggtggagggggcttgatcctagctagcccaaagctgggggcaacacccttgcctccggagtcaacccctgcccctcctcctccccctccgccacccccgccccccggggtcgggtccggtcacttgaacatcccactgatattagaggagctgcgggtactacagcagcgccaaattcaccaaatgcaaatgacagaacaaatctgtcgccaggtgctgctcctggggtctctaggacaaaccgtcggagcaccagcctctccttctgagttaccaggtactgggacagcatcctcgactaagccactgctgcctctcttctcacccatcaagcccgtgcaaacgagcaaaacactcgctagttctagcagcagcagctcaagctccagcggcgcagagaccccgaaacaggcctttttccatctgtaccatcctctgggctctcagcaccctttttctgcggggggagttggccgtagccacaagccaacacctgcccctagccctgccctgcccgggagcacggatcaactgattgctagcccgcatcttgctttcccatcgaccaccggtctgcttgccgcccagtgcctcggcgctgctcggggcttggaagcaaccgcctcccccggactcctgaagccaaagaatggttcgggagaactgagctatggggaggttatgggcccccttgaaaagccagggggccgacacaaatgccgattttgtgccaaggtgttcggctcggactcagcattacagatccacctgagaagtcacacaggagaaagaccttataagtgcaacgtatgcgggaaccgcttcacgacccgaggcaatctaaaggtccacttccaccgacaccgcgaaaaataccctcatgtccaaatgaaccctcatcctgttccagagcaccttgattacgtgattactagctccggcctcccctacgggatgtcggtgcccccggagaaggccgaggaagaagctgccactccaggtggcggtgtagaaaggaagcctctcgtagccagcaccactgcactgtctgcaacagagtccttgactctcctttccacttctgcgggtacggccactgctcccgggctgccagcattcaacaaatttgttctgatgaaggccgtggaaccaaagaacaaggcagatgaaaataccccccccggatccgaggggtccgctattagcggggtagctgaatcttccactgccacccgaatgcaattatcaaaactcgtaactagcctgcccagctgggcacttctgaccaatcattttaaaagcacaggtagcttcccttttccctacgtactggagccgctgggggccagtcctagtgagacttccaagttacagcaactcgtggaaaaaatcgatcgccagggtgccgttgcagtcacaagcgctgcctccggggcgcccactacaagcgccccggccccgtcttcctctgcatcatctggacccaatcagtgcgtgatctgcttgcgtgtgctgagttgccccagggccctcaggctccactacgggcagcacggaggagagcgacccttcaagtgcaaagtgtgcggcagagccttcagcacccgcggcaacctccgggcacatttcgtgggtcacaaggcatccccggctgctagggcccaaaatagttgccccatctgtcagaagaagttcacaaacgctgtcacattacagcaacacgtgcggatgcatctgggagggcaaattcctaatgggggaactgccctgccagagggtggtggggccgctcaggaaaacggcagcgagcaaagcacggtgtctggcgctggcagcttcccccagcagcagtcacagcagccatcgcccgaagaggaactgtccgaggaagaggaggaggaggatgaggaggaggaagaagacgtaacagacgaggacagcttagctggacgaggaagcgaaagcggaggagaaaaagccatctctgtgaggggcgattccgaagaggcaagcggggccgaggaggaggttggaactgtggcggccgcagcaaccgctggaaaagagatggattcaaacgaaaaaaccacacaacagtcctcgttgccacccccccctcctccagatagcctggaccagcctcaacctatggaacaggggtcgtccggcgtcctgggaggcaaggaagaaggaggtaagcccgagcgcagctcctctccagcctcagcactcaccccagagggagaggccacctccgtgaccctggtggaggagctatctctgcaagaagctatgcgcaaggagccaggcgagagcagctcccgtaaggcatgcgaagtgtgcggccaggcgttcccgtcgcaggctgctctggaagaacatcaaaagacacaccctaaggagggcccgctcttcacctgcgtgttctgtcggcaaggctttctggaaagggcaactctcaaaaagcatatgctgcttgcccatcatcaggtgcagcctttcgccccccatggaccccagaacattgccgcattgtctttggtgccaggttgtagtccttcgattacctccaccggactgagcccctttcctaggaaggatgatccaacaataccttag

SEQ ID NO: 204193 - DNA, 1827 bp, synthetic construct
  misc_feature 1..1827: note = Description of Artificial Sequence: Synthetic coding sequence
  source 1..1827: mol_type = other DNA
atgagccggcggaagcagcggaagccccagcagctgatcagcgactgcgaagggccgtccgcgtccgagaacggcgacgcttcggaggaagatcacccccaggtttgcgccaagtgctgtgctcagttcacagaccccaccgagttcctagcacaccaaaacgcgtgctccaccgatccacccgtaatggtcatcatcggaggccaggaaaacccaaacaacagctccgcgtccagtgagcccagacccgagggccacaacaaccctcaggtcatggatacagaacacagcaatccacccgactccggctcatcagtgcccaccgatccaacatggggacccgagcgaaggggggaggaatctcccggacactttttagtggccgccacagggacagctgcaggtggcggtggcggactgatcctggcgagcccaaaacttggggctaccccactgccacccgaatcaacccccgcaccccctcctcctcccccaccccctcctccccctggggtgggttctggccatctaaacatacccttgattcttgaggagctgagggtcctgcaacaacgccagattcatcagatgcaaatgacagaacaaatctgcagacaagtgctgttactcggcagtctggggcaaacagttggcgcgcccgcaagtccatccgagttacccggaactggtactgcctccagcaccaaaccgctacttcccctcttctcaccaattaaaccagtacagacttctaagactctggcatcctcttccagttcatcttcctcttcttcaggtgccgaaacacccaaacaagcttttttccacctgtaccacccacttggtagccagcacccattctcggcagggggcgtcggcagatcccacaaacccactccagcaccctctcctgctctgcccggcagcacagatcaactcattgcctccccccatctcgctttcccctctacgaccggattgttggccgcacagtgtcttggagctgcacgcggtctggaggcgactgcttctcctggccttttgaagccaaaaaatggctccggtgagctctcatatggagaagtgatgggcccactcgagaagcccggcggccggcataaatgccggttttgcgctaaggtctttggatcagattctgccctgcagatccacctacgctcccacacgggagagagaccttataagtgcaatgtgtgtggtaataggtttacaacaaggggtaatttgaaggtgcactttcataggcatagagaaaagtacccccacgtccagatgaatcctcaccctgtgccggagcacctggactacgtgataacttcgtccggattgccttatggaatgagcgtgcctccagaaaaagccgaggaagaagctgccacacccggggggggcgtggagcggaaaccacttgtcgcatccacgacagccctgtcagccacagagtccctgaccctattgtcaacatctgctggcaccgctaccgccccggggctaccggcattcaacaaatttgtacttatgaaagccgtggagccaaagaacaaggctgatgagaataccccacccggaagcgaggggagcgcaatttccggcgttgctgagtctagtaccgccacccgtatgcagttgtcgaagctggtgacaagtttacctagctgggcgctgcttacaaaccacttcaaatccactggaagctttccatttccctacgtgcccgaagaggtgcaccagtgttgccacagtgccgccgcttgccctgatgcacccggcgggcctgacccacaacgctggtactgcactccctag

SEQ ID NO: 204194 - DNA, 3687 bp, synthetic construct
  misc_feature 1..3687: note = Description of Artificial Sequence: Synthetic coding sequence
  source 1..3687: mol_type = other DNA
atgagccggcggaagcaggccaagccccagcacctgaagagcgacgaggaactgctgcccccagacggcgcaccagaacacgccgcccccggggaaggcgcggaagacgcagacagcgggcctgagtctcggagcgggggggaagaaacatcagtgtgcgaaaagtgttgtgctgagttcttcaaatgggccgacttccttgagcatcaaaggtcgtgcactaaattaccacccgtgcttatcgtccacgaagatgcccctgcacccccccccgaagatttcccagaaccctcccccgcctccagtccgtctgaacgggctgaatccgaagccgcagaagaggccggagctgagggcgcggaaggtgaggcgagaccagttgagaaagaagcagaacccatggatgccgagcccgccggtgatacacgcgccccaagacccccccctgccgctcccgcaccacctaccccggcctacggcgcccccagcacgaatgttacgctggaagctcttcttagcactaaggtcgctgtcgcgcagttttctcagggagccagggccgccggtgggtctggagccggaggaggcgtcgcggcggccgccgtgcccttgattttggaacaactcatggcccttcaacagcagcagattcaccagcttcagctgatcgagcaaatccgaagtcaggtagccttgatgcagagaccacctcctcgccccagcctctcaccagccgcagcgcccagcgctccagggccagcgcccagccagctgccaggcctggctgccttacccctgtcggccggtgccccggccgcagcaattgccggtagcggtccagccgcccccgcggctttcgagggcgcccagccactatctaggcccgaatcaggggccagcacacccggaggtcccgccgagccaagcgcaccagccgcaccctccgccgcccccgctcccgccgcaccagccccagctcctgccccccagtcagctgcttcttctcagccccagtccgcaagtaccccccccgcacttgcaccaggctccttgctgggagcagccccgggtcttccaagtccactcctcccgcagacaagcgcctccggtgtgatttttcctaatcctctggtgtctatagctgccacagcaaacgctctagacccgctaagtgcacttatgaagcacaggaaaggcaaacccccgaacgtgagtgtctttgaaccaaaggcatccgctgaggatccattcttcaagcataaatgccggttttgcgccaaagtgtttggttcagactctgctcttcagattcacttgagaagccataccggcgagcggccctttaagtgtaatatctgtggcaataggttcagtacgaaaggcaacctgaaggtgcattttcaaagacacaaggagaagtatccccatatacagatgaatccttaccctgtacctgagtacctagataacgtgcctacctgttcaggcatcccatacggcatgtccctcccgcctgagaaaccagtgaccacttggctcgactcaaagcctgtgttgcccactgtacccacctctgttggactgcagctgccaccaactgtgccaggagcccacgggtacgctgatagtccctctgcaacgcctgcatctcgcagtcctcagagacccagtccggcatcttctgaatgtgcatccttgtctcctggattgaaccatgtggagtctggcgtctctgccactgcggagagcccccagagcctgctgggggggcctccgctgacgaaagcagagcccgtctctctgccttgtacgaatgcccgggcaggcgacgcacccgttggggctcaggcttcagctgcccccacgagcgtagacggggccccaacatcgctgggctccccggggcttccggccgtgagtgagcagttcaaagcccaattcccgttcggaggactcctggactccatgcaaactagcgagacctctaaactgcagcagctggtggaaaatattgataagaagatgacagatcccaatcaatgtgtgatctgtcatagagtcctcagctgccagagtgcacttaaaatgcattaccgcacgcacactggcgagagaccctttaagtgcaaaatttgcggtcgagctttcactaccaagggcaatttgaaaacccattttggtgtgcaccgcgccaagcctcctctccgcgtgcaacactcctgccctatctgtcagaagaaatttaccaacgccgtcgtgctgcaacagcacataaggatgcacatgggaggacagattcctaacacacccctgccggaggggtttcaggacgcgatggattctgagctcgcatacgacgataagaatgccgagaccctgtctagctacgacgatgatatggacgagaactccatggaggacgatgccgaactgaaggatgccgcaaccgatccagctaagccacttctcagttatgccgggagctgcccaccttccccaccatctgtgatttcgtccatcgcggcccttgaaaaccagatgaaaatgatagattccgttatgtcgtgtcagcagctgactggattgaaaagtgtggagaacggctccggggagtctgaccgcctgtcaaatgactccagctctgcagtgggagatttagaatcaaggtccgcaggctcaccagccctttctgaaagctctagtagccaggcactaagcccagctccctcgaatggcgagtctttcaggtcaaagtcacctggactaggggcaccggaagaaccgcaggagatacccctgaagactgaacgtccagactcacctgcggccgctcccggtagcggaggcgcccccggccgagcgggcattaaggaagaggcccccttctccttactgttcctctctcgggagcgagggcctagccagagtacgccaagtttgattagttccgcggctcccactatgatcaaaatggaagtgaatggacatggaaaggcaatggctctgggagaaggaccaccccttcccgccggcgtgcaggtgcctgcaggcccccagactgtcatgggccccgggttggctcccatgcttgcccccccgccccgtcggacaccaaagcagcataactgtcagagctgtggtaaaacattttctagcgcctccgccttgcagatccatgagcgcacccacacaggggaaaagccatttggctgtaccatatgcggaagagcttttacaaccaagggcaatctgaaggttcatatggggacgcacatgtggaacaacgccccagctcggaggggaagaagattgtcagtcgagaatccaatggccctgctcgggggggatgccctcaagttcagtgaaatgtttcagaaggatctggctgctcgtgcgatgaacgtggacccgagtttttggaaccaatacgctgccgcaatcacaaatggtctcgctatgaagaacaacgagatctccgtcatccaaaacggaggcattccgcagctccctgtcagcttaggcgggagtgccctgccccccttggggtcaatggctagcggaatggacaaagcccgcaccggaagctctccacctattgtctcccttgacaaggctagtagtgaaacggcagctagccgccccttcaccagattcatagaggataacaaggaaataggaattaactag

SEQ ID NO: 204195 - DNA, 3903 bp, synthetic construct
  misc_feature 1..3903: note = Description of Artificial Sequence: Synthetic coding sequence
  source 1..3903: mol_type = other DNA
atgagccggcggaagcaggccaagccccagcacctgaagagcgacgaagaactgcttcccccggatggcgcccccgaacacgccgcccctggggagggggccgaggatgccgatagcgggcctgaaagtcgcagtggcggcgaagaaacctcagtctgtgaaaagtgctgcgccgagttttttaagtgggctgactttctggaacaccagagaagttgtactaagcttccccctgtgttgattgtccacgaggatgcgcccgccccaccaccagaagatttccctgaaccgagtcccgcttcctctcctagtgagagagctgaatctgaagctgccgaagaagcaggcgcagaaggagcggagggtgaagccagacctgtggagaaagaagcagaacctatggacgccgagcctgctggtgatacccgcgcgcccaggcccccccctgcagctccagcgcctccaacacctgcttatggagctccttcgactaacgtcacgctggaagcactgctcagtacaaaggtagccgttgcgcagttttcacaaggggcacgagcggccgggggctcaggagcagggggcggcgtagcagctgctgccgttcctctcatcttagagcagctgatggccctgcagcagcagcagattcaccaactgcagttgatagaacaaattaggagccaagtggccctgatgcagcgcccccccccgagaccctcattatcccccgccgcggctccttccgctccgggacccgctccttcacagctacccggtctggccgcgctgcctctctccgctggagcccccgcggctgccatcgccggctccggccctgccgcccccgctgcatttgagggagctcagccgttatctcgaccagagtccggcgcatccacacccggaggcccggcggagcctagcgccccagccgcaccaagcgctgcacccgctcctgcagctcccgctccagccccagctccacaatcggccgctagctcacagccccagtccgcttccactccccctgcgctagccccgggttccctcctgggcgcagcaccaggactgccctcacccctgctaccccagaccagtgcatctggggtgatcttccctaaccccctagtgtcgatagctgctaccgccaacgccctggatcctttgtccgcattgatgaagcacagaaaaggaaaacctccgaatgtgtcagtgttcgagcccaaggcctctgcggaggaccccttctttaagcataagtgcaggttctgcgcaaaagtgttcggtagcgacagtgccctgcagattcacttgcggagccatacaggagagagaccatttaagtgtaacatttgtggtaatcgtttcagcaccaagggtaacctgaaggtgcacttccaacgtcataaagaaaaataccctcacattcagatgaatccctaccctgtccctgagtatcttgacaacgtgcccacttgctctggaattccgtatggcatgagcctgccacccgaaaagcccgtaacaacctggctggactcgaagccggttctgccaaccgtgccaacatctgtaggccttcagcttcctcctaccgtgccaggagctcacggttatgctgacagtccatcagctacccctgccagccgctctccacaaagaccatctcctgcctcaagcgaatgcgccagtttgtctccagggctcaatcacgttgaatctggtgtgtccgcaaccgccgaaagcccccagtcactgctgggcggcccacccttgacaaaggccgagcctgtatcgcttccgtgcacaaatgctagggcaggagacgccccggtaggtgcccaagctagtgccgctcctacttccgttgacggagcacctacttcccttggatcaccagggctgcctgcagtttccgagcagttcaaagcccaattcccctttggtggtttacttgacagcatgcagacgtctgaaacttctaaactgcagcagctcgtggagaatatcgacaaaaaaatgacagatcctaatcagtgcgttatctgtcatcgagtgctatcgtgccagtccgccctcaaaatgcattaccggacccataccggcgagagaccattcaagtgtaaaatctgtggcagggctttcacaaccaaggggaacctaaagacacacttcggcgtccatcgggcaaagcctcccctcagggtacagcactcttgtcctatctgtcagaaaaagtttaccaatgctgtggtactgcagcagcacattagaatgcacatgggcggacagatacccaatacgccacttcctgaggggtttcaggacgctatggacagcgagcttgcatacgacgacaagaatgccgaaactctgtctagctatgatgacgatatggatgagaactccatggaggacgacgccgaacttaaagacgctgccaccgatccggccaaaccgctcctcagctatgccgggtcttgccccccatctccacctagtgtgattagcagtattgcagccctggagaatcagatgaaaatgattgactctgtgatgagctgtcagcaacttacaggactcaagagcgtcgagaacggaagcggtgaatccgaccggctgagcaatgactcatctagcgcagttggggacctggagtcccggtccgcgggctccccagccctgtccgagagttcatcaagccaagcgctgagcccagcgccatccaatggcgagtcttttcggtctaaatctccgggactcggcgctcctgaagagccgcaggaaattccactgaaaacggagagaccggactcacccgcagctgccccaggatccggaggcgcccccggtcgtgcaggtattaaggaagaagcacctttctcgctgttattccttagcagagagcggggaaaatgcccctccaccgtgtgcggtgtgtgtgggaagccattcgcttgcaagtctgcgctggagattcactaccgctctcataccaaggaaaggccatttgtctgcgccctctgcaggcgcggctgtagcaccatgggtaaccttaaacagcacctcctgactcatcggttaaaggagctgccttcccagctatttgaccctaactttgccttaggacctagccagtctacaccaagtctcatctcatccgcggcacccacgatgatcaaaatggaggtgaacggccacggcaaagctatggcactcggtgagggaccgcctctccctgccggggtccaagtacccgctggaccccagacagtaatggggcctggactggctccgatgctcgctccccccccacggcgaaccccgaagcaacacaattgtcagagctgcggcaaaacatttagtagtgcctcagctctccagattcacgagaggactcacaccggcgagaagccttttggttgtaccatttgcggtagggcattcaccactaaggggaacctgaaagtgcacatgggaacacacatgtggaataatgctcctgcaagacgggggcgcaggctgtctgtcgaaaatcccatggccctcttagggggtgatgcattaaagttctctgagatgttccagaaggatctcgccgcccgcgcaatgaacgttgacccgtcgttttggaatcaatatgcagccgcgattaccaacgggctggcaatgaaaaataatgaaatctccgtgatacagaatggaggcattcctcaacttccagtaagtctcggaggctccgctctgcctcctctggggagcatggctagtggcatggataaagccagaaccggaagtagcccaccaatagttagcttggacaaggctagttctgaaacggccgccagccgccccttcacacggtttatagaggacaacaaagagatcggcattaactag

SEQ ID NO: 204196 - DNA, 2883 bp, synthetic construct
  misc_feature 1..2883: note = Description of Artificial Sequence: Synthetic coding sequence
  source 1..2883: mol_type = other DNA
atgagccggcggaagcaggccaagccccagcacctgaagagcgacgaggagctgttgcctccggatggcgccccagagcacgcagccccgggggagggggcagaagatgctgacagtgggcctgagtcaaggtccggcggggaagaaactagcgtctgcgagaagtgctgcgcagaattctttaagtgggccgattttctggagcaccaacgctcatgtacaaagctaccccccgttttgattgtgcatgaagacgcaccccctgggctgccctcaccactgcttcctcagacatcagctagcggggtgatatttccaaaccccctagtaagtattgcagccaccgccaatgccttagatccgttgtccgccctgatgaagcaccggaaggggaaaccccctaacgtatctgtgtttgagccaaaagcatctgccgaagaccctttctttaagcataagtgccgattttgtgcaaaggttttcggatcggattctgctttacagatccatcttcgttctcacaccggtgagaggcctttcaagtgcaacatatgtggtaatcgctttagtaccaagggcaacttgaaggtgcattttcagcgccacaaagagaagtatcctcacatacagatgaacccctaccccgtacccgaatacttagataacgtacccacatgttctggtattccctacggaatgagcctgccccctgagaagccggtgaccacttggctcgactcaaaaccagtccttccaacagtgcctacaagcgtcggccttcaacttccacctacagtgcctggggcccacggctatgctgactctccttccgcaactccagcctcccgctccccccaacggccaagtcccgcttcatctgagtgcgcatccctatctcccggactgaatcacgtcgagagtggcgtatcggccactgccgaatccccccagtctcttcttggggggcccccactgacaaaggctgagccggtgtcactaccctgcacgaacgcccgggctggcgatgccccagtgggagcacaagctagcgctgcaccgactagcgtcgatggtgccccaacttcactgggatcccccggactaccagccgtctccgagcagtttaaggcgcaatttcctttcggtggattgctggactctatgcagacctcggagacttctaaacttcaacagctggtggagaatatcgacaagaagatgacggatccaaatcagtgcgttatctgccatcgggtgttaagctgccagtccgcgttaaagatgcattaccgaacacacacaggcgagcggccgtttaagtgtaagatctgcggcagggcctttaccacaaaaggtaatctgaagacccactttggtgtgcaccgagcaaagccacccctgagggtccagcatagctgccctatttgtcagaagaaattcaccaatgccgtggtgttgcaacagcatatacggatgcatatgggcggacagattcccaacaccccgctgcctgaaggcttccaggatgcaatggattctgaactcgcttatgatgacaagaatgccgaaacactttcatcttacgacgacgatatggacgagaacagtatggaagatgatgcagaactgaaagacgcagccaccgacccagctaagcctttactaagctatgccggttcctgccctccttctcccccctctgtgatcagtagtattgcagctctggagaaccagatgaaaatgatcgatagtgtcatgagctgccaacagttaactggcttaaagtctgtagagaacggctctggggagtccgatcgcctctcaaacgatagctcctccgcagtgggggatcttgagtcacggtccgcgggctctcccgctttgtcagagtccagtagcagccaggcacttagcccggctccgagcaacggagaatcattccgcagtaagagtccagggctaggtgccccggaagaaccgcaggaaattccattgaaaactgagcgtccagactcacctgctgcagctcccggatcagggggcgctcctggaagggcaggtatcaaagaggaggccccgttttccttgttatttctgtcacgagagagaggacccagccagtccacccctagtcttatcagcagcgccgctcccaccatgatcaagatggaagttaacggacacggcaaagcgatggccctgggcgagggccctcccctgccggcgggggtgcaggtgccggcagggccccaaacagtgatgggccctggactggcacctatgttggcccctcctccgaggagaacccctaagcaacataattgccagtcttgcggcaaaactttctctagtgcttctgcgctccaaatccacgagcgcactcataccggagaaaaaccttttgggtgcactatttgtggacgtgcctttaccacaaaaggcaatctgaaggtgcatatgggcacacatatgtggaacaacgctccagctagacgggggcggcgactcagcgtggagaacccaatggcattgctgggaggagacgcactcaaatttagcgaaatgtttcagaaagatctggccgcccgggctatgaatgtggaccccagcttctggaatcagtacgccgctgctatcactaatgggctcgccatgaaaaataatgaaatttcggtgattcagaatggcgggatcccccagttaccggtttctctgggtggctcggccttaccgccactggggagcatggcttccggtatggataaggctcgaactgggagctcccctcctatagtttctctggacaaggcgtcttcagagacggctgcaagtcggccgttcacaagattcatcgaggacaacaaggaaatagggatcaactag

SEQ ID NO: 204197 - DNA, 516 bp, synthetic construct
  misc_feature 1..516: note = Description of Artificial Sequence: Synthetic coding sequence
  source 1..516: mol_type = other DNA
atggtgcggccccccgtggtgccccggcggccccccgcccacatcagtagcgtgcggcaggcttctactcaggtccctcgtacggttccccacacacagagggtggccaacatagggacccagactactggcccttctggcgtgggatgttgtacccctggaagacctcttttgccttgcaagtgcagttctgcagcccattccacgtatagggttcaggaacctgcggtgcatattcccggccaagagccactcaccgcctccatgctcgcagctgctcctttacacgaacagaaacagatgatcggggagcgcctttacccgctcatccacgacgtgcatacgcagttggccggtaagataaccggtatgctgttggagattgacaatagcgagctactgttaatgctagagtctcctgaaagcctgcacgctaaaaagcggaaatcaagtctcccttggctcccaaagggccagtgcttctggcttagcgcgttgcggccatgtaaactttag

SEQ ID NO: 204198 - DNA, 831 bp, synthetic construct
  misc_feature 1..831: note = Description of Artificial Sequence: Synthetic coding sequence
  source 1..831: mol_type = other DNA
atgagccggcggaagcaggccaagccccagcacatcaacagcgaggaggatcaaggcgagcaacagccccaacagcagactcccgaatttgcagacgcagcccctgccgctcccgccgccggtgaactaggccggagttcccttccaagcacctttatcagggcaccccccacatacgtcaaggtggaagtgcccggtactttcgtgggcccatccacactttctccgggcatgacccctttacttgccgcccagcctcgccgacaagccaagcagcacggctgtactcggtgcgggaaaaatttctcctcggcgtctgcactacagattcatgaaaggacgcacacgggggaaaaaccctttgtttgtaacatatgtgggagggcgtttactactaaagggaatctgaaggttcattacatgacccacggggctaacaataattcagctcgacgaggccgaaagctagctatcgaaaacaccatggctttactggggacagacggtaaacgcgtgtctgaaatttttcccaaagaaattctcgccccatctgtgaatgtggatccagtggtgtggaatcagtatactagcatgctgaacggcggtctggccgtgaaaacgaacgagatctctgtgatacaaagcgggggggttccgactctgccagtgtccttaggtgccacatcagtggtcaacaatgccacggtcagcaaaatggatgggtctcagtcggggatcagcgctgatgtggaaaaaccttccgccacggatggagtacccaagcaccaattccctcactttttggaagaaaacaagatagccgtgtcctag

SEQ ID NO: 204199 - DNA, 1851 bp, synthetic construct
  misc_feature 1..1851: note = Description of Artificial Sequence: Synthetic coding sequence
  source 1..1851: mol_type = other DNA
atgagccggcggaagcaggccaagccccagcacatcaacagcgaggaggaccagggcgagcagcagccacagcagcagactccggagtttgcagacgcggcgccggcagccccagcggcgggggaattgggagctccagtgaaccatcccgggaacgatgaagtcgcatcagaagacgaagccaccgttaagagactccggcgggaggaaactcatgtgtgcgagaagtgctgcgccgagtttttttccatctccgagttcttggaacataagaagaattgtacaaaaaaccctcccgtgctgattatgaatgacagtgagggccctgttccctcagaggacttttccggcgccgtgctgagccatcagcccacatcacctgggtccaaggactgccacagagagaacggcggatcatcagaagacatgaaagaaaagcccgacgcagagagtgtggtctacctgaagacagagactgcactgccccccaccccacaggacatcagctacctcgccaaggggaaagttgctaataccaatgtaacgctccaggcactgcgtggcacaaaggtcgccgtgaaccagcgctcagccgatgctctgcctgcaccagtgcctggagccaattccatcccatgggtccttgagcagattctgtgtctgcagcaacagcagttgcagcagattcagctcacagagcaaattagaatccaggtcaatatgtgggcctctcacgcccttcactctagtggcgcaggcgccgacacactgaaaactttgggatcacacatgtcccagcaggttagcgcagccgtggctctgctgtctcagaaagcagggtcacagggactttctctcgacgcactcaagcaggccaaactgccccatgccaacatcccctccgccacctccagcctgagtccaggattggcccctttcacactcaaacctgatggtactagagttctgcctaacgtgatgtcccgtctgccgagtgccttacttccacaagcccctggcagcgtgcttttccaatccccattcagcaccgttgcgttagacacgtccaagaagggcaagggaaagccaccgaatatatcggccgtggatgtcaagcccaaggacgaggcagctctgtataaacacaaatgtagatcatccctcccatcaacttttattagggctcccccgacatatgtaaaagtggaagtgcccggcaccttcgtgggaccatcaactctcagtcctgggatgacccccctcctggccgctcagccgcggcggcaagccaaacagcacggatgcaccagatgcggaaagaacttctcgtctgcttccgctctgcagattcatgaaagaacacacaccggtgagaagccattcgtgtgtaacatctgtggacgtgccttcacaactaaaggaaacttgaaggtgcactacatgacacatggcgccaataataattccgctcgacggggaagaaagctggccattgagaacactatggccctgttgggtaccgacggcaagcgcgtttccgagatctttcctaaggagattctagcccctagcgtcaatgtggatcctgtcgtctggaatcagtacactagcatgttgaatggaggcttggcagttaaaaccaatgagataagtgtgattcagagcggcggggtgcctactttaccagtgtccctgggcgccacttctgtggttaataacgctacagtgtctaagatggatggcagtcagtcaggaatctccgccgatgtggagaagccatcagcaaccgacggcgtccctaaacaccagtttccccatttccttgaggagaacaagattgcagtctcatag

SEQ ID NO: 204200 - DNA, 2781 bp, synthetic construct
  misc_feature 1..2781: note = Description of Artificial Sequence: Synthetic coding sequence
  source 1..2781: mol_type = other DNA
atggtgatggccgacggcccccggcacctgcagcggggccccgtgagggttggattttatgatattgagggcactttaggcaagggcaactttgccgtcgtgaagctgggtcgccacagaattaccaaaaccgaagtggccatcaagataatagacaaatcgcagctggatgctgtcaacttggagaaaatctacagagaggtgcagattatgaaaatgctggaccatccgcacattataaagttataccaggtgatggagacaaagtccatgctctacttagtaactgagtatgcgaagaatggagagatttttgactatcttgctaatcacggcagacttaacgaatcagaagcaagacggaagttttggcaaatcctgtccgctgtagattactgtcatgggcgcaaaatcgtccaccgcgacctgaaagccgaaaatctcttactcgataacaacatgaacatcaaaatcgctgactttgggttcggtaacttcttcaaatccggggagttgctggcaacttggtgtgggagcccaccttatgcagcccccgaggtcttcgagggtcagcagtacgagggaccccaacttgatatatggtcaatgggcgtcgttctttatgttcttgtatgtggagccctgccttttgacggtcccaccctgcccattttgcgccagcgggtgttggaaggcaggttccgtatcccctattttatgtcggaagattgcgaacatctaatccgtagaatgttggtgctcgacccttctaagcgcctgacaatcgcgcaaatcaaggagcataagtggatgctcatcgaggttccggtgcagcgtccagtactgtacccacaggaacaggaaaacgagccaagtattggcgaattcaacgagcaagtactgaggttgatgcatagcctcggcatcgatcagcaaaagactatcgaatcgctgcagaacaaatcatataatcatttcgctgccatctacttcctgctcgtggaaagactcaaatcacatcgctcctcattccccgtggagcagagactagatgggagacagcggagacccagcaccatcgccgagcagaccgtagcaaaggctcagaccgtgggcttgcccgtcaccatgcactcccccaatatgcggttactgaggtcagccctgctgccacaggctagtaacgtggaggccttttcgtttccagccagcggctgtcaagccgaagctgcgtttatggaggaagaatgtgttgacacccctaaggtgaacggatgcctacttgatccggtgcctcccgtgctcgtccggaagggctgtcagtcactgccctcaaacatgatggagaccagtatcgacgagggactggagacagagggggaagcggaggaggatcctgcacacgctttcgaggcgtttcagagcacgcgttccggacagcggaggcacaccctgtccgaagttactaaccagctggtagtgatgcccggcgccggcaaaatcttttctatgaatgactccccaagcctggattccgtcgattcggagtacgacatgggttccgtccagcgggatctgaacttccttgaggataatccaagtttgaaagatatcatgcttgccaaccagccctcacctcgcatgaccagcccattcatatctctccgccccaccaaccccgccatgcaggctctatctagtcaaaaacgtgaagtgcataaccgatccccagtatctttcagagagggccgacgcgcctcagatacatccctcacacagggcatcgtagcttttagacagcacctccagaatctagctcggaccaagggaatccttgagctgaacaaggttcagctcctctatgaacagattggacctgaagctgatcctaatcttgcacccgctgctccacagctgcaggatttggcttcttcttgtccgcaggaggaggtttcacagcaacaggagtccgtcagcaccctgcctgcttcggtccacccccaactctccccaaggcaaagcctcgagactcaatatttgcagcaccgactgcaaaagcccagtttgctgagcaaagcccagaacacttgtcagttgtactgcaaagaacctccacgcagcctcgaacagcagctgcaggaacacagacttcaacagaagcgtctctttctgcagaaacagtcccagctccaggcatacttcaaccagatgcagattgctgagagctcttaccctcaaccctcacagcagttaccactacctaggcaagagaccccaccaccctcccagcaggcccctccattctcccttacccagccactctcgccggtcttagaaccgtcatccgaacagatgcaatattcacctttcctgagccaatatcaggagatgcagttacagccactgccaagcacgagtggccccagggccgcaccacccctccctacacaactccagcagcagcaacctccccccccacctccaccccctcctccccgacagcccggggccgcccccgctccactgcagtttagctatcagacctgtgagctgccgtccgccgcgagccccgcgccagactaccctacaccatgccagtacccagtggatggcgcccagcagtccgatctgaccggaccggattgcccgcgatcacctggcttgcaagaagcaccctcctcatacgatcccttagctctgagtgaactccccggtctgtttgattgcgagatgcttgatgcagtcgatcctcagcacaacggctacgtgctggtgaattag

SEQ ID NO: 204201 - DNA, 1881 bp, synthetic construct
  misc_feature 1..1881: note = Description of Artificial Sequence: Synthetic coding sequence
  source 1..1881: mol_type = other DNA
atgcagcgggccgacagcgagcagcccagcaagcggccccggtgcgacgatagcccgcgaactccgtctaataccccatctgccgaggccgactggtctccgggactggaactgcaccctgactataaaacttggggtccggagcaggtgtgttcttttctccggcgtggtgggttcgaagaaccggtcttacttaagaacatacgggaaaacgaaattacaggagctttgctcccttgtctcgatgaatcacggttcgagaacctgggggtgagttctctcggcgaacgcaagaagcttctcagttatatacaacgcctagtccaaatccacgtggataccatgaaggtgatcaacgaccctatacatgggcatattgagctacaccccctccttgtacgaatcatagataccccacaattccaaagattaaggtatataaaacagctgggtggcggctattatgtatttcctggggcttcccacaataggtttgaacacagtttaggcgtaggctatctggctggatgcttagtgcatgccctgggggagaagcagccggagcttcaaatcagcgagcgcgacgttctgtgcgtgcagattgcagggctgtgccacgatcttggacatgggccctttagtcatatgttcgatggccgcttcattcccctggcccgacccgaagttaagtggactcacgagcagggcagtgtgatgatgtttgaacatctcatcaattccaatggcatcaaaccagtaatggaacaatatggtctgatccctgaggaagatatctgctttatcaaggaacagattgtaggaccactggaatcacctgttgaggatagtttatggccttataagggccgcccagagaacaaaagcttcttatatgagattgtttctaataagaggaacggtatcgacgtcgacaaatgggattactttgcccgggactgtcaccacctggggattcagaacaatttcgactacaaaaggttcatcaagtttgctcgggtgtgtgaagtggacaatgagctcagaatctgtgctcgcgacaaagaagtcggcaacctgtatgacatgtttcacactcggaattctctccatagaagggcataccagcacaaggtgggcaacatcattgacaccatgattacagacgcatttttgaaggctgatgattatattgagattaccggcgctggcggtaagaagtacagaatttccaccgcaattgatgatatggaggcctacacaaagctcactgataatatctttctggagatcctttattccactgatcctaagttaaaggacgctcgcgagattctgaaacaaatcgagtaccgaaacttattcaagtacgtcggcgagacgcagccaactgggcagattaagataaaacgggaggactatgaatcactgcccaaggaggtagcgtctgcgaagcccaaggtgctgctggacgtgaagctcaaggcggaggatttcattgtggacgtgataaatatggactatgggatgcaggaaaaaaatccgatcgatcatgtgtctttctactgtaagaccgctcccaatagggcaattagaatcaccaagaatcaggtttcacagctgttacccgaaaagttcgccgagcaactgatccgggtctactgcaaaaaggtagataggaagagcctctacgctgcccgccagtactttgtgcagtggtgtgccgacagaaacttcaccaagccgcaggacggagatgtcatagcccctcttattacacctcagaagaaagaatggaatgactcaacctccgtacagaatccaacacgtttgagggaagccagcaaatcaagggtacagctgtttaaagacgatcctatgtag

SEQ ID NO: 204202 - DNA, 513 bp, synthetic construct
  misc_feature 1..513: note = Description of Artificial Sequence: Synthetic coding sequence
  source 1..513: mol_type = other DNA
atgttcgacggccggttcatccccctggcccggcccgaggtgaagtggacacacgaacaaggctccgttatgatgttcgagcacctcattaactccaatggaattaagcccgtcatggagcagtacggtttgatacccgaagaggacatttgctttataaaagaacaaattgtcggacctctggaatctcccgtagaggactccctgtggccttacaagggccgaccagagaacaagagctttttatatgagattgtctccaataaacgaaatggcattgatgttgataagtgggattattttgctagagattgccaccatctgggcatccagaacaattttgactataagcggttcattaaattcgcaagggtgtgcgaggtggacaatgagctgcgcatatgcgcacgcgataaagaggtgggaaacctgtatgatatgtttcacactcgcaactctttgcacaggcgcgcctatcaacacaaagtgggaaacatcatagataccatgtag

SEQ ID NO: 204203 - DNA, 1326 bp, synthetic construct
  misc_feature 1..1326: note = Description of Artificial Sequence: Synthetic coding sequence
  source 1..1326: mol_type = other DNA
atggagatccggctggacaccctgagcgccagcctgggccggagcagtaccctgaataattgtaatctagaggataaactggcatggtatgaaggcgaggcctatatgtggcaccactggaagccttttcctgagaaccctttatggacctgtctggatttccagatcgcgcaggtgggtccctgggatcattgctcttcttgcatcaggcatacccggctgaagtcatcctgttcagatatggatttgctgcatagttggcggtcgtcatctttcgggaatttcgatcgctttcgcaataacagcctgtccaaacccgacgacagtacagaagcacatgaaggggaccctaccaacgggagcggcgaacaaagcaagacaagtaataacgggggcgggttagggaagaaaatgagggcaattagttggaccatgaaaaagaaggtggggaaaaagtacattaaggctctttctgaggaaaaagacgaggaggacggcgagaacgcccacccataccgcaactccgaccccgtcatcggcacacacaccgaaaaggtctctctgaaggcttctgatagcatggactcactgtattcaggtcagagcagctcctccggaataaccagctgttctgacggcacctccaaccgggattcattccgcctcgacgacgacggtccgtattcagggcccttttgcggacgtgcccgggtgcacactgacttcactccatcaccctatgatacagatagcctcaaaatcaaaaaaggggacatcattgacattatatgcaaaacccccatgggaatgtggacagggatgctgaacaataaagtcggcaactttaaattcatatatgtggatgtcattagcgaggaggaagctgctccaaagaaaatcaaggctaaccgccgaagcaattctaaaaagtctaaaacacttcaggagttcctggagcggattcacttacaggagtatactagtactctgctgttgaatggatatgaaaccctggaggatctgaaggacatcaaggaatctcacctcatcgagcttaacatcgaaaaccccgacgatagacgtagattactctccgcagccgagaattttctggaggaggaaattatccaggaacaggagaatgagcccgaacctctgtctctgagtagcgatatttctctgaacaagtcccaattagacgactgcccacgcgactcaggctgctacatttcctcaggaaactcagataatggaaaagaagacctggaatctgaaaatttgtcagacatggtgcacaagatcatcataaccgagccaagcgattag

SEQ ID NO: 204204 - DNA, 618 bp, synthetic construct
  misc_feature 1..618: note = Description of Artificial Sequence: Synthetic coding sequence
  source 1..618: mol_type = other DNA
atgctgaagcggaagcccagcaacgtgagcgagaaggagaagcaccagaaacccaaaaagggggacatcattgatattatctgcaagaccccaatgggcatgtggaccgggatgcttaataacaaggtaggcaatttcaagtttatatacgtggacgtgatttcagaggaagaagctgcgcctaaaaagatcaaggcgaacaggagatccaatagtaagaaatccaagaccttgcaggagtttctcgaacggattcacctgcaggagtacacttcgaccctgctcctgaacggttatgagactttggaagacctcaaagatatcaaagagtcacatctcattgagcttaacattgagaatcctgacgaccgaagacggctcctctctgccgccgaaaatttcctcgaagaggaaatcattcaggaacaggagaacgaaccagaaccactgtctctctccagcgatatctctctgaataaaagccagctggacgattgcccaagggatagcggatgttacatttccagtggtaactctgacaacggtaaagaggaccttgaatcagaaaatctgagcgatatggtccacaaaataatcataacggaaccaagcgactag

SEQ ID NO: 204205 - DNA, 1122 bp, synthetic construct
  misc_feature 1..1122: note = Description of Artificial Sequence: Synthetic coding sequence
  source 1..1122: mol_type = other DNA
atgctgaagcggaagcccagcaacgtgagcgagaaggagaagcaccaaaaacccaaacgctccagctcctttggcaacttcgatcggttccgcaacaactcactcagcaagcccgacgactcaaccgaagcacatgagggcgaccctaccaacggttccggggaacagagcaagacaagcaataacgggggcggtttgggaaagaagatgagagctatcagctggacgatgaagaaaaaagtgggcaagaagtatatcaaagccctttctgaagagaaagacgaggaggacggagaaaatgctcacccctacaggaacagtgatcccgtaattggaacccacaccgaaaaggtttcactcaaagcatctgactctatggatagcctctattctggccaaagttcatcctctggcatcacgtcttgttccgatggtacttcaaatagagattccttccgcctcgacgatgacgggccgtactccgggcctttttgtggccgcgcaagagttcatacagacttcacgccatccccctacgatactgattcactgaaaataaagaaaggtgacattatcgacattatctgtaagactccaatgggaatgtggaccggcatgctgaacaacaaagttggcaacttcaaattcatctacgtggacgtgatttcagaagaagaagccgcccctaaaaagatcaaagctaaccgtcgatccaactccaagaaatcgaagacactgcaggaattcctggagcggatccatctgcaggagtatacatctacgctgcttttgaacggctacgaaaccttggaagacctgaaagatattaaggagtcacaccttatcgaacttaatatcgagaaccccgacgaccggagacggttgctgtcggccgctgaaaacttcctggaagaggaaatcatccaggagcaggaaaacgagcctgagccactgagcctctcatcagatatctctctcaataaatctcagctggacgattgccctcgggactccggctgctacatcagctccggtaacagcgataatgggaaagaagacctggagagtgagaacttaagcgacatggtgcacaagattataatcactgagcctagcgactag

SEQ ID NO: 204206 - DNA, 1008 bp, synthetic construct
  misc_feature 1..1008: note = Description of Artificial Sequence: Synthetic coding sequence
  source 1..1008: mol_type = other DNA
atgggcagcgccagccccggcctgagcagcgtgagccccagccacctcttgctgcctccagacaccgtgtcacgtacaggtttggaaaaagctgctgccggagcagtcggtctcgagaggagggattggagccccagtcctcccgccacgccggagcagggactgagcgctttctaccttagctattttgatatgttatatccggaagatagctcctgggcagcaaaggctccgggcgccagcagtcgggaggaaccgccagaggagccagaacagtgtcctgtcatagacagtcaggcccccgcagggtcccttgacctggtgcctggcggtcttaccctcgaggagcatagcctcgagcaggtccagtcgatggtggtcggggaggttctaaaagacattgaaactgcgtgtaagcttctgaacatcaccgcagatcccatggactggtctccttcaaacgtgcaaaagtggctcttatggaccgagcatcaatatagacttcctccgatggggaaagcctttcaagaactggccggaaaagaactgtgcgctatgtctgaagagcaatttcggcagcggtcacccctaggcggcgacgtgttgcacgcccaccttgacatatggaagtctgcagcctggatgaaagaaaggacgagcccaggcgccatccattactgcgcatccacttcagaggagtcctggaccgattctgaagtggactcctcttgctccgggcagcctattcacttatggcagttcctgaaggaactcctgctgaagccgcattcctacggcaggttcattaggtggcttaacaaggaaaagggcatcttcaaaatcgaggatagcgcacaggtcgcccgactctggggaattcgtaaaaacaggcctgctatgaactatgacaaactgtcacgatctatcaggcagtactataagaagggaatcataaggaaacctgacatttcgcagcggctggtgtaccaattcgttcacccaatctag

SEQ ID NO: 204207 - DNA, 960 bp, synthetic construct
  misc_feature 1..960: note = Description of Artificial Sequence: Synthetic coding sequence
  source 1..960: mol_type = other DNA
atgggcagcgccagccccggcctgagcagcgtgagccccagccacctcttactccccccagacacagtgagtaggaccggcctcgagaaagcagctgccggcgcagtcgggctagagcgccgtgactggtcgccctcgccccccgcaacccctgaacagggtttgtctgccttctatttatcctatttcgacatgctttacccagaggattcctcctgggccgctaaggcccccggagcaagcagccgtgaggagccccctgaggaaccagagcaatgccccgtgattgactcacaggcaccagcaggatccctcgacctcgtacccggcgggctaactctggaagaacactccctggaacaggttcagtccatggtggtgggcgaggttctgaaggacatcgagaccgcgtgtaagctgctcaacatcacagccgaccctatggattggtccccatctaacgtgcaaaaatggctgctttggactgaacaccagtatcgattgccacctatgggcaaggcttttcaggaactggcaggtaaggagctatgcgcaatgtccgaggagcagtttcggcagagaagtccccttggaggtgacgtgctgcacgcccacctcgatatatggaaatcagcctccacgtcggaggagtcttggactgactccgaggtcgatagttcttgttcaggacaacccatacacctctggcagttcctgaaggaacttctgctgaagccacactcttatggccgattcattcgatggttaaataaggagaaaggtattttcaagattgaggactccgcccaagtggctcgtctgtggggcattaggaagaatcggccggccatgaactacgacaaattgtctcgcagcattagacagtattacaagaaaggtattataaggaagcctgacatctcccagagattagtctatcagtttgttcacccaatttag

SEQ ID NO: 204208 - DNA, 1218 bp, synthetic construct
  misc_feature 1..1218: note = Description of Artificial Sequence: Synthetic coding sequence
  source 1..1218: mol_type = other DNA
atggccgccagcggcaagaccagcaagagcgagcccaaccacgtgatcttcaaaaagatctcacgtgacaaatctgtaaccatctatctaggaaaccgcgattacatcgaccacgtctcccaggtccaacccgtcgacggcgttgtacttgtcgatccagatctggtcaagggcaagaaggtctatgttacactgacctgtgctttccggtacggccaagaggacatcgatgtgattggactgacattcaggcgggacctatactttagtcgcgttcaagtgtacccacctgtgggcgcagcctccactccgacaaagctgcaagagagcttgctgaagaaattgggctcaaacacataccctttcttgctgacgttccctgattacctgccctgctctgtaatgctgcagccagccccccaggattcagggaaatcgtgcggtgtagacttcgaagtcaaggctttcgccacagattctaccgacgcggaggaagacaaaatccccaaaaaatcatcggtgagattgctaatcaggaaagtacaacacgcccctctggagatggggccacagccacgggctgaggccgcctggcagttcttcatgtctgataagcctctgcatctcgctgtgtcgctcaacaaagagatctactttcatggagaaccaatcccagtcaccgtgacggtcactaataatacagaaaagacagttaagaaaattaaggcctttgtcgagcaagtagccaatgttgtcctctactcttcagattactacgttaagccagtagcaatggaggaggcacaggagaaagtccccccaaatagtaccctgactaaaacactgaccttgctacctcttcttgccaacaatcgagagcgccggggcatcgctctcgatggtaagataaagcatgaggatacaaacctggctagctccaccataattaaggaaggcatagaccggaccgtgctggggatattagtgtcttaccaaataaaagtgaaactgaccgtgtctggaatgaccggtcgtcaaaaagcatcagaagtggctactgaagtgccattccgactgatgcacccacagcctgaggatcccggtcaattcagttaccaggacgccaacctggtctttgaggaattcgccaggcataatctcaaagacgccggcgaggctgaggaaggaaagcgcgataaaaatgatgtcgatgagtag

SEQ ID NO: 204209 - DNA, 1218 bp, synthetic construct
  misc_feature 1..1218: note = Description of Artificial Sequence: Synthetic coding sequence
  source 1..1218: mol_type = other DNA
atggccgccagcggcaagaccagcaagagcgagcccaaccacgtgatatttaaaaagatctcacgcgataaatccgtcacgatatatcttggtaatcgggactacattgatcatgtttcgcaggtacagccagtggacggcgtcgtactggtcgacccagacctggtgaagggtaagaaggtctatgtcaccctaacgtgcgcattccgatatggacaggaggatattgacgtgatcggactcacctttcggagggatctctatttctcccgtgtccaggtctaccctccggtgggcgcagccagtacgcccacaaagctccaggaatctttactgaaaaagctcggcagcaacacttacccatttttgctgacctttcccgactacctgccttgtagtgtgatgctgcaacccgcaccacaagattctggcaaatcttgtggcgtggatttcgaggtgaaggctttcgccacagactcaacggacgccgaggaggacaaaatacctaaaaagagcagcgtcaggcttctgattcgtaaagtgcaacacgcccccctagagatggggccacagccacgggccgaggcagcatggcagttctttatgtctgataagcctctgcatcttgcggtctcattgaacaaagagatttatttccacggagaaccaatccccgttacggtgaccgtaaccaacaataccgagaagacggttaagaagataaaggcttttgttgagcaggtggccaatgttgtactgtactctagcgactattacgtgaagcctgtagcgatggaggaggctcaagaaaaggtgccacccaattccacattgactaagacacttacgctcctcccgctgctcgcgaacaatcgcgaaaggcgcggcattgcccttgatggaaaaatcaagcatgaagacactaatcttgccagctcgaccataataaaagaaggcatagaccgaactgttttggggatcctggttagctatcagatcaaggttaaattgaccgtttccgggtttctgggcgaacttacctcgagcgaggtagctactgaggtcccttttaggctgatgcaccctcaacctgaggatcctgccaaggagagctaccaagacgccaacctggtgttcgaggagtttgctcggcacaatcttaaggacgctggggaagctgaggagggaaaacgagacaaaaacgacgtggacgaatag

SEQ ID NO: 204210 - DNA, 510 bp, synthetic construct
  misc_feature 1..510: note = Description of Artificial Sequence: Synthetic coding sequence
  source 1..510: mol_type = other DNA
atggccgccagcggcaagaccagcaagagcgagcccaaccacgtgatcttcaagaagatctcacgagacaaatccgtgaccatttatttaggcaatcgcgactacatcgatcacgtctcacaagttcagcccgtcgacggtgtagtgctcgtcgatccagatctggttaagggaaaaaaagtctacgtaacactcacttgtgcctttcggtacggccaggaggacatagacgtgatcggcctaaccttcagaagagatctgtacttttctagggtacaggtctatccacccgttggcgccgcctccacccctacaaagctgcaggaatctctgctgaagaaacttggctccaatacctaccccttcctcctcacttttccggactacctgccctgtagtgtgatgcttcaacctgccccacaagattcaggaaagtcttgcggggtcgacttcgaggtgaaagctttcgcaaccgattctaccgacgctgaagaggacaagatcccctag

SEQ ID NO: 204211 - DNA, 708 bp, synthetic construct
  misc_feature 1..708: note = Description of Artificial Sequence: Synthetic coding sequence
  source 1..708: mol_type = other DNA
atgctgcagcccgccccccaggacagcggcaagagctgcggcgtggatttcgaagtaaaggctttcgcgactgatagcaccgatgcagaggaagataaaattcccaaaaaatcaagtgtgcgcctgctgatccgaaaagtccagcacgctcctctcgagatgggcccccagccaagggccgaggccgcctggcaattctttatgtctgacaaacctcttcacctggctgttagcctgaacaaggagatttacttccacggcgaacctatcccggtcaccgtgactgtgacaaacaacacagaaaaaaccgttaaaaagatcaaagccttcgtcgagcaggtcgcaaacgtggtcttgtattccagcgattactacgtgaagccagtggccatggaggaagcacaggagaaagttcctccaaatagtaccctaacgaaaacgctgacactcttgccattgcttgccaacaaccgggaacgacgaggtatcgcattagacggaaagatcaagcacgaggacactaatctggcgtcctccacaatcattaaagagggcattgatcggacagttctaggaattctagtgagctatcaaatcaaggttaaattgactgtttccggatttctgggggagctgacgagtagcgaggtagcgaccgaggtaccatttcggttaatgcacccccagcctgaggacccaggaaagtag

SEQ ID NO: 204212 - DNA, 204 bp, synthetic construct
  misc_feature 1..204: note = Description of Artificial Sequence: Synthetic coding sequence
  source 1..204: mol_type = other DNA
atggccgccagcggcaagaccagcaagagcgagcccaaccacgtgatttttaagaagatttcgagagacaaatccgtctccggagcacaagtgacgatatatctcgggaaccgggattatatcgaccatgtgagccaggttcagcctgtcgacggggtagtcctggtcgaccccgatttggttaagggaaaaaaggttagttag

SEQ ID NO: 204213 - DNA, 633 bp, synthetic construct
  misc_feature 1..633: note = Description of Artificial Sequence: Synthetic coding sequence
  source 1..633: mol_type = other DNA
atggccaccgagaccgtggagctgcacaagctgaagctggccgagctgaagcaggaatgtctggccaggggactcgaaaccaagggcatcaagcaggacctgatccaccgcctgcaagcatacctcgaggaacatgccgaggaggaagcgaacgaggaggatgtcctcggcgatgaaacagaagaagaagaaaccaagccaattgaactaccggtgaaagaagaggagcctccggaaaagacagtggatgtggctgcggagaagaaggtggtcaagattacgtctgagattcctcagaccgagcggatgcagaaaagagccgagaggtttaacgtcccagtgtcgctcgaaagcaagaaagcagcaagagctgctcggttcggtatctccagcgtgccaacaaagggcctgagttcagacaataagcctatggtcaatcttgacaaactgaaagaacgagcacaaaggtttggactgaacgtatcctccatcagccgtaagtccgaagatgatgagaaactcaaaaagaggaaggagaggtttggcatcgttacttcctctgctggaacggggactacagaggatacggaagcaaagaagagaaagcgagctgaaagatttggcatagcctag

SEQ ID NO: 204214 - DNA, 453 bp, synthetic construct
  misc_feature 1..453: note = Description of Artificial Sequence: Synthetic coding sequence
  source 1..453: mol_type = other DNA
atggaggaggagaccaagcccatcgagctgcccgtgaaggaggaggaaccccctgaaaagaccgtagacgtggcagctgaaaagaaggttgtaaagatcacaagcgagatacctcagacagaaaggatgcagaaaagagcggaacgcttcaacgtcccggtctcacttgagagcaagaaagccgcccgggccgcccgttttggcatttccagcgtccctaccaaagggctgtctagcgataataagccgatggttaacttggacaagctaaaagagagagcccaaagattcggtctcaatgtgagctctatcagccgcaaaagtgaggacgacgaaaaactcaagaaacggaaagagcgcttcggcattgtgacctctagcgcaggcaccggcaccacagaagatacagaagcaaaaaagagaaaaagagctgagagatttggcatagcatag

SEQ ID NO: 204215 - DNA, 633 bp, synthetic construct
  misc_feature 1..633: note = Description of Artificial Sequence: Synthetic coding sequence
  source 1..633: mol_type = other DNA
atggccaccgagaccgtggagctgcacaagctgaagctggccgagttaaaacaggagtgccttgctagaggcctggaaacaaaaggtatcaagcaggacctgatccatcggcttcaggcttatctcgaggagcacgccgaagaagaggcaaacgaggaagatgtgctcggtgacgagaccgaggaggaagagactaagcctattgaacttcctgtgaaagaagaggagcctcctgaaaaaactgtagacgtagccgctgagaagaaggtcgttaagatcacatcagagattccgcagaccgagaggatgcaaaaaagagcggagcggtttaacgtgcccgtgagcctggagagtaaaaaggccgctcgcgccgcacggttcggcattagtagcgtgcctactaagggcctgtcatctgataataagcctatggtcaacctggataagttgaaagagagagcccagcgcttcggcctgaacgtttcatccataagtcggaagagcgaagacgacgaaaagttaaaaaaacggaaggagcgttttggaatcgtgacaagtagcgcaggcactggcactacggaagacacagaagctaagaaaaggaaacgggccgaacgctttgggattgcttag

SEQ ID NO: 204216 - DNA, 879 bp, synthetic construct
  misc_feature 1..879: note = Description of Artificial Sequence: Synthetic coding sequence
  source 1..879: mol_type = other DNA
atggccggcaagaagaacgtgctgagcagcctggccgtgtacgccgaagatagtgagcccgagagtgacggcgaagccggcattgaggccgtgggctccgccgcagaggagaaaggcggcttagtatctgacgcctatggtgaggacgatttctctcgcctgggcggcgacgaggatggctacgaggaggaagaggatgagaattcgagacagtccgataacacagaggcagagaagcgtgatcctcaagagttggtggctagtttttctgaaagagtacgtaacatgtcccccgacgagattaaaatcccccccgagccacctggcaggtgctccaatcatctgcaggataagattcaaaaactttacgaacgcaagattaaggaaggcatggacatgaactacattatccaacggaagaaggagttcaggaacccatctatctacgagaaattaatacagttttgtgctatagacgagttgggcacaaattaccctaaagacatgtttgatccacacggttggagcgaagattcctactatgaggccctcgccaaggcccaaaaaatagagatggacaaattggagaaggccaaaaaggagagaacaaagatcgaattcgtgaccggcacaaagaagggaactaccaccaacgccaccagcaccacaaccactacagcttctactgcagtcgccgacgcacaaaagcgaaaatctaagtgggatagcgccattccagtgactaccattgcccagccgaccattctgactactacagccacccttccagccgtcgtcacggttacgacgagcgcttcgggctctaaaacaaccgtgattagtgctgtgggcacaattgtcaaaaaagctaagcagtag

SEQ ID NO: 204217 - DNA, 927 bp, synthetic construct
  misc_feature 1..927: note = Description of Artificial Sequence: Synthetic coding sequence
  source 1..927: mol_type = other DNA
atggccggcaagaagaacgtgctgagcagcctggccgtgtacgccgaagactccgaacccgagtctgacggcgaagccggcattgaggccgtagggtcagccgccgaagagaagggaggcttggtcagcgacgcgtacggagaagacgacttttccaggctggggggggatgaggacggctacgaggaggaggaggacgagaattccaggcagtctgaagatgacgactccgagaccgagaaacctgaggccgatgaccctaaggacaatacagaagcagagaaacgtgaccctcaggaactggtggccagtttctccgagagagtgagaaacatgagcccagacgagatcaaaataccaccagagccgccaggcagatgcagtaaccacttgcaggacaagatccaaaaactgtatgagaggaagattaaggaaggcatggatatgaattacattatccagcgcaagaaagagtttagaaatcccagtatctacgagaaactcattcagttctgtgccattgatgaactgggaaccaattatcccaaagacatgtttgaccctcacggctggagcgaagattcgtactacgaggcactggctaaggcacaaaagatcgagatggataaattagaaaaggcaaagaaagaacgtactaaaattgagtttgtgactggcactaagaaaggcactaccactaacgccacatccactactaccaccaccgctagcactgcggtcgctgacgcccagaaacgaaagagtaaatgggattccgccattcctgtaactaccatcgcacagcccaccattctgactacaaccgcgaccctgccagcggtggtgactgtgacgacaagtgcctcagggtcgaagacaaccgttatctccgcagtcggaacgatcgtgaaaaaagccaaacaatag

SEQ ID NO: 204218 - DNA, 507 bp, synthetic construct
  misc_feature 1..507: note = Description of Artificial Sequence: Synthetic coding sequence
  source 1..507: mol_type = other DNA
atggccggcaagaagaacgtgctgagcagcctggccgtgtacgccgaggattccgagcccgaatccgatggagaggcaggtattgaagccgtgggatcagcagctgaggaaaagggaggactggtcagcgatgcttacggtgaggatgatttttctcggctcggtggcgacgaggatggctacgaagaggaggaggatgagaattccaggcagtccgaggacgatgactctgagacagagaagcccgaggccgatgaccctaaggataacactgaagcagaaaaaagggatcctcaggaattagtggcgagcttctccgaacgggttaggaacatgagccctgatgagataaagattcccccggaacccccggggaggtgttccaaccacctgcaggataaaatccagaaactgtatgagagaaagattaaagaaggcatggatatgaactatattatacaaagaaaaaaagaattccgaaaccccagccaggggcctgagaactag

SEQ ID NO: 204219 - DNA, 927 bp, synthetic construct
  misc_feature 1..927: note = Description of Artificial Sequence: Synthetic coding sequence
  source 1..927: mol_type = other DNA
atggccggcaagaagaacgtgctgagcagcctggccgtgtacgccgaggactccgaacctgagtccgacggagaagccggaatcgaagccgtcgggtctgctgctgaggaaaaaggcgggctcgtgtccgacgcctatggcgaggatgatttcagccgcctcgggggagatgaagatggctatgaggaggaggaggacgagaattctcgacagtccgaggatgatgatagtgagactgaaaagcccgaagccgacgatcctaaggacaacactgaggccgagaaacgcgatccccaggaattagtagcgagcttttctgagagagtacgcaacatgagccccgatgaaatcaagattccaccagaaccgcccggaaggtgtagcaaccacctacaggataagattcagaagctgtacgagcggaaaatcaaagagggaatggacatgaactacatcatccagcggaagaaggaattccggaacccaagcatctatgagaagctcatccagttttgcgcaatcgacgagctggggactaactacccgaaggatatgtttgaccctcacggctggtcagaggacagctactacgaggctctagcgaaagctcaaaaaatcgagatggacaagctggaaaaagctaaaaaagagaggacaaaaatagagtttgtaacaggcactaaaaaagggaccaccaccaatgctacctctacaacaaccaccacagctagtacggctgtggccgacgcccagaagcgcaagtcgaaatgggattccgccattcccgtgacaactattgcacagccaactatactcacgacaacagccacactgccagctgtcgtgaccgtcacaacgtccgcctccggcagcaagacgaccgtcatatccgccgtggggacgatcgtgaaaaaggcgaagcagtag

SEQ ID NO: 204220 - DNA, 366 bp, synthetic construct
  misc_feature 1..366: note = Description of Artificial Sequence: Synthetic coding sequence
  source 1..366: mol_type = other DNA
atgagcttcatcttcgagtggatctacaacggcttcagcagcgtgttgcagttcctgggtctttacaagaaatctggcaaactcgtgttcctgggccttgacaacgccggtaaaaccacactgctgcacatgctaaaagatgatcgactcggtcaacatgtcccaacgctgcaccctacgagcgaggaactgaccattgcaggcatgacctttacaactttcgatctgggagggcacgaacaggcccgccgtgtgtggaagaattacctacctgccatcaatgggatcgtcttcctggtcgactgcgccgaccactcaagacttgtcgaaagtaaggtggaactgaatgtgtgttttgtgctctag

SEQ ID NO: 204221 - DNA, 597 bp, synthetic construct
  misc_feature 1..597: note = Description of Artificial Sequence: Synthetic coding sequence
  source 1..597: mol_type = other DNA
atgagcttcatcttcgagtggatctacaacggcttcagcagcgtgctgcagtttctggggctatacaaaaagtcaggaaagctcgtgtttctgggcctcgacaatgccggtaagacgactctactgcacatgctgaaggacgaccgactgggccagcacgtcccgacactgcatccaacatctgaagagttaacaatagcagggatgaccttcacaacctttgacctaggcggccatgagcaggctcggcgggtgtggaaaaactatctccctgctatcaatggtatcgtttttctggtcgattgcgcggatcattcaagacttgtcgagagtaaagtggagctgaatgccctaatgaccgacgagacaattagtaacgtccctatcttgattcttggcaataaaatcgacaggaccgacgccattagcgaggagaagttgagggaaatattcggtctttacggacaaactaccggaaaggggaatgtgacattgaaggagcttaacgcacgacctatggaggtctttatgtgtagcgtgttgaaacggcaaggatatggggaaggattccgatggctgtcccagtatatcgattag

SEQ ID NO: 204222 - DNA, 597 bp, synthetic construct
  misc_feature 1..597: note = Description of Artificial Sequence: Synthetic coding sequence
  source 1..597: mol_type = other DNA
atgagcttcatcttcgagtggatctacaacggcttcagcagcgtgctgcaatttctggggctgtacaaaaagtccggtaagttggtgttcctgggcctggataacgccggaaagaccaccctgctccatatgctgaaggatgacaggctgggacagcacgtgccaaccctgcatcctacaagtgaggagctaacgattgcaggaatgacgttcaccaccttcgacctgggaggccacgaacaagctcgtcgagtgtggaaaaactatctgcccgcaattaacggtatagtatttctagttgattgcgcagatcacagcaggctcgtggagagcaaggtagagctgaacgccctcatgaccgatgaaaccatctccaacgttcctattcttatcctggggaataaaatcgacaggactgacgctataagtgaggagaaactgcgcgagatcttcggtctttatggtcagacaacaggtaagggcaatgtgaccttgaaagaactcaacgcgaggcccatggaggtatttatgtgctctgtactcaaacgacagggctacggagagggcttccgatggctgagccagtacatagactag

SEQ ID NO: 204223 - DNA, 597 bp, synthetic construct
  misc_feature 1..597: note = Description of Artificial Sequence: Synthetic coding sequence
  source 1..597: mol_type = other DNA
atgagcttcatcttcgagtggatctacaacggcttcagcagcgtgctccaattccttggtttatataagaaaagcggcaaactagtatttctggggttagacaacgccggcaagaccacacttctgcatatgctaaaggacgaccggctgggccagcacgtgccaacactccatccaacttcagaagagctaactattgctgggatgacgtttacaacgttcgacttaggaggtcacgaacaggcaagacgagtgtggaaaaactacttgccggccatcaacggcattgtatttctggtagattgtgctgatcactctagactggtcgagagcaaggtagagttaaacgcattgatgacggatgagaccataagtaacgtgcctattctcatcctgggcaacaaaatagatcggaccgatgcgatcagtgaggaaaaactgagagagatattcggactgtacggacaaacaacgggtaaaggtaacgtgaccctcaaggaattaaacgccaggccaatggaagtcttcatgtgttccgtcttgaaacgtcagggttatggggagggctttcggtggcttagtcagtacatcgactag

SEQ ID NO: 204224 - DNA, 597 bp, synthetic construct
  misc_feature 1..597: note = Description of Artificial Sequence: Synthetic coding sequence
  source 1..597: mol_type = other DNA
atgagcttcatcttcgagtggatctacaacggcttcagcagcgtgttgcagtttctcggactttacaaaaaaagcgggaagctggttttcctcggcctggacaatgcagggaagacaacgctgttgcacatgctgaaggacgatcgcttgggacagcatgtcccaacgctccatccgacgtcagaggaactgactattgcgggcatgacattcaccacatttgatctgggtggccatgaacaggccagacgcgtgtggaaaaactacctaccagccataaacggcatagtattcctggttgactgtgctgatcactcgaggctggtagagtcaaaagtggagctgaatgcactcatgaccgatgagacaatctcaaatgtgccaatcctgatactgggcaacaagattgaccgaaccgacgccatctccgaggaaaaacttcgggaaattttcggcctctatggtcagaccaccggcaaagggaatgtgactctaaaagagctaaatgccagaccgatggaggtatttatgtgcagcgtgttgaagcggcagggttacggagaagggttccgatggctctcacagtatatcgactag

SEQ ID NO: 204225 - DNA, 354 bp, synthetic construct
  misc_feature 1..354: note = Description of Artificial Sequence: Synthetic coding sequence
  source 1..354: mol_type = other DNA
atgggcctgagcttctggtggaccgtgcagatcatcctggccagctggaatccgaagctgtcacttatgatctattgttcttcgctcttgactcttgccccaaatgctcttatgacagacgaaacaatcagcaacgtgccaatactgatacttggaaacaaaatagatagaacagacgccatctccgaagagaaactccgagagatctttggcctgtacggacagaccacgggaaagggtaacgtgacgcttaaggagcttaatgcccgtcccatggaggtgttcatgtgttctgtcctgaaacgccagggctacggtgagggattcaggtggctgagccaatatatcgattag

SEQ ID NO: 204226 - DNA, 597 bp, synthetic construct
  misc_feature 1..597: note = Description of Artificial Sequence: Synthetic coding sequence
  source 1..597: mol_type = other DNA
atgagcttcatcttcgagtggatctacaacggcttcagcagcgtgctacagttcctgggtctgtataagaaatcaggtaagctagttttcctcggcctggataacgccggtaagaccaccctgcttcacatgttgaaagacgacagactcggccagcacgtgcccactctccaccccacctccgaggaattaacaatcgccggaatgaccttcacaaccttcgatttgggcgggcacgagcaggctagacgtgtgtggaagaactacctgccagctatcaacgggatagtgtttttggtggattgcgctgaccacagccgtctcgtcgaaagcaaagtcgagcttaatgccctgatgacagacgagaccataagcaacgtgccaatcttgatcctgggaaataaaatcgatcggactgatgctatctcagaggagaagcttagagagatcttcggactctacggccagacgacaggaaagggcaacgtcaccctaaaggaattgaatgcacggcccatggaggtctttatgtgttctgtgctgaaaaggcaaggatatggtgaaggattcaggtggctttcacagtacatcgattag

SEQ ID NO: 204227 - DNA, 348 bp, synthetic construct
  misc_feature 1..348: note = Description of Artificial Sequence: Synthetic coding sequence
  source 1..348: mol_type = other DNA
tgaagcttctggtggaccgtgcagatcatcctggccagctggaaccctaagctaagccttatgatctactgctcctccctactaacgctcgcacctaatgcccttatgactgatgagaccatttctaatgttcccatcctgatactcggcaacaaaatagatagaacagatgcgattagtgaagaaaaactccgggagattttcggcctgtacggccagacaaccgggaaggggaatgtaacccttaaagagttgaatgccaggcctatggaggtgtttatgtgcagcgtcctgaagaggcagggttacggtgaaggattccgatggctgtctcagtacattgactag

SEQ ID NO: 204228 - DNA, 468 bp, synthetic construct
  misc_feature 1..468: note = Description of Artificial Sequence: Synthetic coding sequence
  source 1..468: mol_type = other DNA
atgctgaaggacgaccggctgggccagcacgtgcccaccctgcacccaacatctgaagaactgactatagccggtatgacctttactacatttgacctcggagggcacgagcaagcaagacgggtatggaaaaactacctccccgcaatcaatggtatagtgttcctcgtagattgcgccgatcactctagattggttgaaagtaaagtggaacttaacgccttaatgacagacgaaacgatatccaacgtgcccatcttaattctcggtaacaagatcgatcgtacagatgctatctccgaagaaaaactaagggagatctttggcctctacggacagactacaggcaagggcaatgtgacacttaaagagctcaacgcgagaccaatggaagtgtttatgtgctcggttctcaagaggcaggggtacggcgaagggtttcgctggctatctcagtacatcgattag

SEQ ID NO: 204229 - DNA, 393 bp, synthetic construct
  misc_feature 1..393: note = Description of Artificial Sequence: Synthetic coding sequence
  source 1..393: mol_type = other DNA
atgaccttcaccaccttcgacctgggcggccacgtgcaggcccggagggtatggaaaaactatctgcctgctatcaatggaatcgttttcctggtcgattgtgccgaccacgagcgactactagagtccaaggaagagctggacagtctcatgacagatgagactatcgctaatgtcccgatcctcatcctcgggaataagatcgataggccagaggctatcagcgaggaaagactcagagagatgtttgggctctacggccagacaaccggcaaggggtcaatctccctgaaggagttgaacgcgagacctctggaggtctttatgtgttctgtgctcaagagacagggatatggtgagggctttcgctggatggcacagtatattgattag

SEQ ID NO: 204230 - DNA, 597 bp, synthetic construct
  misc_feature 1..597: note = Description of Artificial Sequence: Synthetic coding sequence
  source 1..597: mol_type = other DNA
atgagcttcatcttcgactggatctacagcggcttcagcagcgtgcttcagttcttgggcctgtacaagaagactggaaaactggtgttcctggggttagacaacgctggtaagaccactctactccacatgctgaaggatgacagactcggccagcacgtccctactctgcacccaacatccgaagaacttaccatcgcaggtatgacattcactacgttcgacctggggggacacgtacaggcccgcagggtgtggaaaaattatcttccggccatcaacggcatcgtgttccttgtggactgcgcagaccacgaaaggctgcttgaatctaaagaggaactggactcactcatgactgatgaaacaattgccaatgtccccatcctcatcctcggcaacaagattgatcgtcctgaggccatctccgaggagaggctgagagagatgttcggactctatgggcagactaccggtaagggatccatatccctgaaggaattgaacgcgcgcccactggaggtctttatgtgcagcgttctgaagcggcagggatacggagaaggatttcggtggatggcccagtacatcgattag

SEQ ID NO: 204231 - DNA, 597 bp, synthetic construct
  misc_feature 1..597: note = Description of Artificial Sequence: Synthetic coding sequence
  source 1..597: mol_type = other DNA
atgagcttcatcttcgactggatctacagcggcttcagcagcgtgctccaatttttgggattgtataagaagacaggtaaactggtgtttctgggactggacaacgccggtaagacaacacttctgcacatgctcaaggatgaccgactgggacagcacgtacctaccttgcaccctacatcagaggagctcactatcgccggcatgactttcaccacatttgatctgggcgggcacgtacaggccagaagggtgtggaagaactacctccctgcaatcaatgggatcgtcttcctggtcgactgcgccgaccatgagcgattgttggaaagtaaggaagagctggatagtttaatgacagacgaaactatcgcaaacgttcccatccttattctgggtaacaaaatcgaccgacctgaggccatatcagaggagcgtcttcgcgaaatgttcggtttatacgggcaaacaactggcaaaggatctatcagccttaaagagttgaatgcgcgaccactggaagtattcatgtgttctgtgctgaagcgtcaggggtatggtgaggggttccgatggatggctcagtacattgattag

SEQ ID NO: 204232 - DNA, 312 bp, synthetic construct
  misc_feature 1..312: note = Description of Artificial Sequence: Synthetic coding sequence
  source 1..312: mol_type = other DNA
atgagcttcatcttcgactggatctacagcggcttcagcagcgtgcttcaatttctaggcctttacaaaaagaccgggaaactggtatttttaggactggacaacgctggtaagaccacccttttgcacatgctgaaagacgaccgcttgggtcaacacgtgcctacactccatccaactagcgaggaattgaccatcgcaggcatgacttttactacatttgatctcgggggccatgtgcaggcacggcgcgtctggaaaaactacctgcccgcaataaatggcattgtattcttggtggattgcgcttag

SEQ ID NO: 204233 - DNA, 393 bp, synthetic construct
  misc_feature 1..393: note = Description of Artificial Sequence: Synthetic coding sequence
  source 1..393: mol_type = other DNA
atgaccttcaccaccttcgacctgggcggccacgtgcaggcccggagagtgtggaagaactacctgccggctattaatggcatcgtcttccttgtggactgcgctgaccacgagcgcctactggagagcaaagaggagctagatagcctgatgactgatgagaccatcgccaacgtccctattctaatcctgggaaacaagatagaccgacctgaggccattagcgaagaaaggcttagagagatgtttggactgtacggacaaactactgggaagggctccatttctctcaaggagcttaacgccagacccctggaggtgttcatgtgttcagtgctgaagcgacaggggtatggtgaaggctttagatggatggcacagtacatagactag

SEQ ID NO: 204234 - DNA, 513 bp, synthetic construct
  misc_feature 1..513: note = Description of Artificial Sequence: Synthetic coding sequence
  source 1..513: mol_type = other DNA
atgagcttcatcttcgactggatctacagcggcttcagcagcgtgctgcagttccttgggctgtataaaaagaccggaaagctcgtttttcttggcctcgataacgctggcaagaccactctgctgcatatgctcaaagatgatcgtctggggcagcacgtgcccaccttgcatccaacaagcgaggaactcacaatcgctgggatgacgtttactacatttgacctcggtggccacgtgcaggcacgacgcgtgtggaagaattatctccccgcaattaatggcatcgtattcctggtggactgtgccgaccatgagagacttttggagagcaaagaggaactcgactcgctaatgactgatgagacaattgctaatgtgcctatcctgattctgggaaacaaaatcgacaggcccgaagccattagcgaggagaggctacgggagatgtttgggctctatggccagacgactgggaaaggctctatcagcttaaaagaactgaatgcctag

SEQ ID NO: 204235 - DNA, 393 bp, synthetic construct
  misc_feature 1..393: note = Description of Artificial Sequence: Synthetic coding sequence
  source 1..393: mol_type = other DNA
atgaccttcaccaccttcgacctgggcggccacgtgcaggcccggcgtgtgtggaagaattacctgcctgccatcaatgggatcgtattcctcgtagattgtgctgaccacgaaaggctgctcgagagcaaggaagagctggactccctaatgaccgatgaaacgatagcaaatgtgcctatactcatcctcggaaacaaaatagataggcccgaggcgatctccgaagagagattgcgggaaatgtttgggctatatggccaaacaacaggcaagggatcaattagccttaaggagctgaatgccagaccattagaggtgtttatgtgtagcgtgctgaaaagacagggctacggagaaggttttagatggatggcccaatatattgactag

SEQ ID NO: 204236 - DNA, 393 bp, synthetic construct
  misc_feature 1..393: note = Description of Artificial Sequence: Synthetic coding sequence
  source 1..393: mol_type = other DNA
atgaccttcaccaccttcgacctgggcggccacgtgcaggcccggagagtttggaaaaattacctgcctgccattaatggcatagtctttctagtcgactgcgcagatcacgagcggttacttgagagcaaagaggagctcgatagtctcatgaccgatgagacaattgctaacgtgcctatcttgattctcggcaataagatcgaccgccctgaggcgatcagcgaagaaagacttagagagatgtttggcttgtacgggcagacgactgggaagggctcaatcagtctaaaagaattaaatgccaggccacttgaggtgttcatgtgcagcgtgctgaagcggcagggatatggcgaaggattccgatggatggcacagtacatagactag

SEQ ID NO: 204237 - DNA, 2796 bp, synthetic construct
  misc_feature 1..2796: note = Description of Artificial Sequence: Synthetic coding sequence
  source 1..2796: mol_type = other DNA
atgcgggccctggtgctgctgggctgcctgctggccagcctgctgttctctggccaggccgagctgcaggtctctgcttcaggcggcactgaagacgtgggaaacttgctcgaaaatcatttttcagcgggggatgcctcccttgaagaaaaagaaagagccctgtacgctgacaccgccccacaagataaaaaactcttactgcactatccagacggtagggaggctgaatctcctaaaaagacccccgcctccgccgcatccgctggcccggatcccgaggcttctctgagcaatgccagcgccaccgagtctccccctcctggagagagggacgacagagatgctgcgggacccggcgaggagaaaaatggaccacctgtcgctagcgcccttcctcccggaggagcaaaagggccagttgaagaggagtggccagaaccctccagcggagaaggtcaaggcgaggaggaaaccggatttggactccctaccgagggtacggcctctggggaagctggggggcaggccgggggacacgagttaccagaggaagtgcaagaagtccagggcgacagtctcgtgcagggcgccgtggctggtacagccgagccaaaggcagagggcgccagtccacatagcgagggggatggcgtagggccactgaacgcggaagcggaaggcagccctgggccaggcgaggagcctgccgtccctgagggagccccagacgttgccgctgttggcggagagtccgaaccagacatcgatacccaggcttctgagggaacagaagatcagggagagccaggccccgccgctgaggcttctgccgaacccggaggtgcccagagcgtcaaggccggcgataccgaggagaaccagtcccccgaaatgacagaagaggacgccgatgaggcgagcagcgaggaggagagcggcgacggatctgggtcagaggaggagggtggcgttccatccgaggaggaatcggaggaagattcaggtgacggcgcatcatctgaagaggccgaaggcgcttccgaggaggcgactgagccacaggaagcaggagagccgcaggaagcccgagagccccaggaaggaggcgacctacaggaggctgaagagtcccaggaaggcggggatccccaggaggcagaggagccccaagagggcggcgcaccgcaggagggcggcgagccccaagaggggggggaccctcaggaggcaagagagccacaggaggcgcgcgagccccaggaaggggccgagcttcccgaggctaccggcacgaccagccatagagatcgcggcgcccagcccggacctgaggaactgaacaccgagtctatgggaagcgagaccctggatatgaaggcagaagagccagaagagggacaccagcgcgagagcccgataatcgttgcccaagaagaaacagaagatgcaaatgaagaggcgccactaagggataggtctcatatcgaaaaaacgctgatgttgaatgaggataagccaagtgatgattatagcgcggtgctgcagcgattaagaaagatataccatagcagcattaagcctctggaacagtcatataaatataatgagctgcgccagcatgaaattacggatggagagatcacctccaaacccatggtcctcttcttggggccctggagtgtaggcaagtccaccatgatcaactacctgctgggtctggagaatacgaggtaccagctatacaccggtgccgagcccacaaccagtgagtttacagtcctgatgcacggaccgaagttgaaaaccatagagggcatcgtcatggccgccgactcagcacgtagctttagccctttggagaaatttggccagaacttcctcgaaaaactgattggaattgaggtcccccacaagttgcttgagcgagtgacctttgttgacaccccggggatcatcgaaaatcggaaacaacaggaacgaggataccctttcaacgacgtgtgccagtggttcatcgaccgcgctgatcttatcttcgtagtattcgacccaacaaaactggatgttggattggaactggagatgttgttcagacaacttaaggggcgggaatcccagatcagaatcatattgaacaaggccgataacctggcaactcagatgctaatgcgtgtgtacggtgccctgttctggagtctcgcccccttaattaatgttacggagccccctcgggtgtatgtgagtagcttctggcctcaggaatataagcccgacacccatcaggaacttttcctgcaggaagaaattagccttctggaagatctgaatcaagtcatcgagaatcgccttgaaaacaagatcgcttttattcggcagcatgccattagggtccggatacacgcactcctggtggatcgctacctccaaacttacaaggacaagatgaccttcttttctgacggagagctagtgttcaaggatatcgttgaagatccagataaattctacattttcaagacaatcctcgccaagaccaacgtgagcaagttcgacctaccaaatagagaggcatacaaggacttttttggaattaatcccatttcttcctttaaactgttgtcgcagcagtgtagctatatgggcggatgctttctagaaaagatcgagcgggccataactcaggaactgcctggactactcggttctctagggctgggaaagaatccaggggccctgaactgcgacaagacagggtgtagtgaaacccctaagaatcgatacaggaagcactag

SEQ ID NO: 204238 - DNA, 1422 bp, synthetic construct
  misc_feature 1..1422: note = Description of Artificial Sequence: Synthetic coding sequence
  source 1..1422: mol_type = other DNA
atgcgggccctggtgctgctgggctgcctgctggccagcctgctgttttctgggcaggcggaggagaccgaggacgccaacgaggaagctccactgcgggatcgatcccacatcgagaaaacccttatgctaaacgaagataagccttcagatgactatagtgctgtcctccagaggctaaggaagatataccactcatctattaagcctctggagcaatcttataaatacaatgagctgcgacagcacgagatcaccgacggcgaaataacctcaaagcctatggtcttgtttctcggcccctggtcagttgggaaatccaccatgattaactatctgttaggcctggagaacactcgctatcaactctacacgggcgcagagcctacaactagcgaatttacagtgctcatgcacggccccaaactcaaaaccattgaaggcatcgtgatggccgcagactccgccaggagctttagcccactggagaaatttgggcagaactttctggagaagctgatcgggatcgaggtgcctcacaaattgctcgagcgggtgacttttgtggacactcctggcattatcgaaaatcgaaagcagcaggagagaggatatccgttcaacgacgtttgccagtggttcatcgatagggccgatcttatctttgtagtattcgatccaaccaaattggacgtgggcctcgaactcgaaatgctctttcgccagctcaaggggcgggagtcccagatccgcatcatcctgaataaagctgacaatctggcaacgcagatgctaatgcgcgtgtacggcgcactcttctggtctctcgcacccttgatcaatgtgaccgagcctccaagagtttatgtcagctcattttggcctcaggagtataagccggatacccaccaggagcttttcttgcaggaggagataagtctcctggaggacttgaatcaggtgattgagaatagactggaaaacaagattgccttcataaggcagcacgccatcagagttagaattcacgctcttctggtggatcgctacctccagacctacaaagataagatgacatttttctccgacggcgaacttgtttttaaagacattgtggaagacccagataaattttatatctttaaaaccatcctggcaaaaaccaacgtaagtaaattcgacctgccaaatagggaggcctataaagacttttttgggatcaacccaatctctagtttcaagcttctcagtcagcagtgtagctacatgggagggtgcttcctggagaagattgagcgggccataacgcaggagcttccagggctgctcggctctctgggcttggggaagaatccaggcgcactgaactgcgacaagaccggctgcagcgagaccccaaagaatagatataggaagcactag

SEQ ID NO: 204239 - DNA, 1296 bp, synthetic construct
  misc_feature 1..1296: note = Description of Artificial Sequence: Synthetic coding sequence
  source 1..1296: mol_type = other DNA
atgctgaacgaggacaagcccagcgacgactacagcgccgtgctgcagcggctccgtaagatttatcattcgtctatcaagcccctggaacagtcatataagtacaatgagttgagacagcatgaaattacagatggagagatcacctcgaaacccatggtgctgttcctgggtccttggtccgttgggaagagtactatgatcaactatttgcttggtttggaaaacaccagatatcagctgtacacaggagccgagcccactactagcgagttcaccgttctgatgcacgggcccaaacttaagactattgaaggcattgtgatggcagctgatagcgctcggtctttctctcccctggaaaaatttgggcagaattttctagagaagctgatcggcatcgaagttcctcataaattactcgaacgtgtgacttttgtcgacacccctggtattatcgagaaccggaaacagcaggaacggggctacccctttaacgatgtgtgtcagtggttcattgatagagctgatctgatcttcgtggtattcgatcccactaaactcgacgtaggcctcgagctcgaaatgctctttcgccagctaaaggggcgcgaatctcaaatcagaattatattaaataaagccgacaacctcgcaacccagatgcttatgcgggtttatggagctctcttctggagcctggctccactcattaacgtgactgaacccccccgcgtgtacgtttccagcttttggccacaggaatacaaaccagatacccaccaagaactgtttctgcaggaggagatttccctactggaagatctcaatcaggtaatcgagaacaggctggaaaataaaattgccttcatcagacagcacgctattcgagtgcgcatacatgcgctgctagttgatcgctacctccagacttataaagataagatgacctttttttcggatggagagctggtattcaaggatatcgtggaggatcctgataaattctatattttcaagaccatcctggctaaaaccaacgttagtaagttcgacctgcctaaccgggaggcttataaagacttttttgggattaacccaatcagttcctttaaactgcttagtcagcagtgctcttacatggggggttgcttcctcgagaagatcgagagggccattacccaggagctgcctggtctgctgggtagtctgggtctgggcaaaaatcccggagctctgaactgcgataaaactggatgttccgagacacctaagaaccgctacagaaaacactag

SEQ ID NO: 204240 - DNA, 1164 bp, synthetic construct
  misc_feature 1..1164: note = Description of Artificial Sequence: Synthetic coding sequence
  source 1..1164: mol_type = other DNA
atggccgagaccctgttctggacccccctgctggtggtgctgctggctggactcggcgacacagaggctcagcagacaaccctccatccactcgtcggaagagtatttgtacatacattggaccacgagaccttcttgtctctccccgagcacgtggctgtcccaccagctgtgcatataacttaccacgctcatctgcaaggacatcccgatttgcctcgttggcttaggtatacacagcggagtccccatcaccctggctttttatatggctcagctacccccgaagacaggggtctccaggtgattgaggtcaccgcctacaatcgggatagtttcgacaccacaaggcagagattggtgctcgagatcggcgacccagaaggaccattgctgccatatcaagccgaatttcttgtgcggagtcacgatgccgaggaagtactgccctctacccctgcttctagattcctatctgcactgggcggcttgtgggaacctggcgagctgcagctactgaacgtgactagcgccctcgacaggggagggagagtgccactgccgattgaaggacgaaaagaaggtgtctacattaaagtgggatccgccagtccattctcaacgtgtctgaagatggtggcttcaccagatagtcacgcccgatgcgcccaaggtcagccacctctgctctcgtgctacgacacactagcaccgcacttccgagtggactggtgcaacgtaacacttgttgacaaatccgttcccgaaccagcagatgaagtgcctacaccgggagatggaatcctggagcatgatccattcttttgcccgcctacagaggctcccgatagagatttcctggtggacgcgctggtcactttgcttgtccccctcctggtggccctgctcttgacattgctcttggcctacgtgatgtgttgccggcgggagggtcgcctcaaacgggaccttgcgacctcagacatccagatggtccaccattgtacaattcatggaaataccgaggaactgagacagatggcagcctctcgcgaagttcctcggccactctcgacactcccgatgttcaatgtgcataccggtgagagacttccacctagagtggattcagctcaggtgcccctgatcctggaccagcactag

SEQ ID NO: 204241 - DNA, 792 bp, synthetic construct
  misc_feature 1..792: note = Description of Artificial Sequence: Synthetic coding sequence
  source 1..792: mol_type = other DNA
atggccgagaccctgttctggacccccctgctggtggtgctgctggctggactcggggacactgaggcacagcagacaaccctgcacccactcgtgggtcgggtgtttgttcacaccctcgaccatgaaacatttctgagccttccagaacatgttgctgtgcctccagcagtccatattacttatcatgctcatctccagggacacccagatttgcccagatggttaagatatacacagcgaagtccccaccatccagggtttctctatggctctgctacacctgaagaccggggcctccaggtaatcgaggtgaccgcttacaaccgagatagttttgataccacaaggcaacgtctcgttcttgagataggcgatcccgagggaccactgctaccataccaggccgagttcctcgtaaggtcacacgatgctgaagaagtcctccctagtacccctgcctcccgcttcctgagcgcactcggaggcctttgggagcccggcgagcttcagcttctcaatgtgacaagcgcactggacaggggaggaagggtccctcttcctatcgagggaaggaaagaagggctgaagagggatctggcaacttcagatattcagatggtgcaccattgtactattcacggaaacaccgaggaactgaggcaaatggcggccagcagggaggtgcctcgcccgcttagcacactgccaatgttcaatgtgcacacaggcgaacgtctgcctcctcgggtggacagcgcccaggtgcccttgatcctagaccagcactag

SEQ ID NO: 204242 - DNA, 537 bp, synthetic construct
  misc_feature 1..537: note = Description of Artificial Sequence: Synthetic coding sequence
  source 1..537: mol_type = other DNA
atgagcgtgaccgcctacaaccgggacagcttcgacaccacccggcagcgcctggtgcttgaaattggtgaccccgaagggccactcttgccctaccaggccgagtttctggtaagatcacacgacgccgaggaagtcctaccttctacccctgcctcgagattcctgtccgctcttggcgggctttgggagcctggcgagctacagctacttaacgtgacaagtgcactggacagaggaggaagagtccccctgcctattgagggacggaaagaaggagtttatataaaggttggttcagcgagcccattcagtacatgcctcaagatggttgcatcccccgattcccatgcgaggtgtgcccagggccaaccaccgctgctctcttgttatgatactctagcaccgcacttccgcgtggactggtgtaacgtgacactcgtgcggcgggaccccggatccggcggaggcgtaggccatggtccccacccttcacctccttccctgccttgctgcttcctgagtccttcattgtag

SEQ ID NO: 204243 - DNA, 792 bp, synthetic construct
  misc_feature 1..792: note = Description of Artificial Sequence: Synthetic coding sequence
  source 1..792: mol_type = other DNA
atggccgagaccctgttctggacccccctgctggtggtgctgctggcaggactgggggacaccgaagcacagcagaccacgctccacccactcgtcgggagagtgtttgtccacacactagatcatgagacattcctgagcttgcctgaacatgtagctgtgccaccagcggtgcatattacataccatgcacatctgcagggacatcccgatctgccacgctggctccggtatacacagagaagccctcaccacccggggttcctgtacggatctgctactcccgaggatcggggcctgcaggtaattgaagtcacggcctataaccgggacagctttgacacaacccggcagcgccttgtgctggagattggagaccccgaaggccccctcctgccataccaggccgagttccttgtgcgctcccacgacgctgaagaagtgctaccttccacgcccgcatcacgatttttgtctgcgctgggtgggctttgggagcccggtgaactgcagctgcttaatgtcaccagcgccttggaccgggggggacgggtgcctctgccaatagaggggcggaaagaagtcctgctcagacacctgggaacacccctcatccagatggtgcaccattgtaccatccacggcaatactgaagagttgcgacagatggctgcttcccgggaggtcccccggcctctgagcaccctcccaatgtttaacgtgcacacaggagagagactccccccgcgggtggacagcgcacaggtgcccctgatactggaccaacactag

SEQ ID NO: 204244 - DNA, 957 bp, synthetic construct
  misc_feature 1..957: note = Description of Artificial Sequence: Synthetic coding sequence
  source 1..957: mol_type = other DNA
atggccgccgccgccgccgccgccgccgagcagcagagcagcaacggtccggtgaagaagtctatgagggagaaggccgtggagagaagatctgtcaataaagaacacaattctaactttaaggccggttatatccccatcgatgaagatcgactccacaaaacaggcctgcgaggaagaaaagggaacttagctatttgcgtgatcatcttactgttcatactagctgtaatcaacctcattatcaccttagtcatttgggcagtgattcgcatcggccctaatggctgcgactcaatggaattccacgagtccggtttgttgcgattcaaacaggtttccgacatgggagtgatccatccattgtacaagtctaccgtagggggtcgtaggaacgagaacctagtgattaccggtaataaccagcccattgtgtttcagcaggggacgacaaagctgtcagtagagaataataagacctccattaccagcgacattggaatgcaattctttgacccccgcacccagaacatcctcttttctactgactacgaaacccacgaattccatctgccctccggcgtcaaaagcttgaacgtacaaaaggcctctacagagagaatcacatccaacgcaacttccgacctgaacattaaggtggacggtagggccattgtgcggggaaacgaaggcgtgtttatcatggggaaaacgatcgagttccacatggggggcaacatggaacttaaagcagaaaatagtattatattgaatgggagcgttatggtcagcactacgaggcttccatctagtagctccggtgatcaactgggctccggggactgggttcgttataagttgtgtatgtgcgcggatggaactctgtttaaagttcaggtgacgagccagaacatgggctgccaaatatccgacaacccctgcgggaacactcactag

SEQ ID NO: 204245 - DNA, 747 bp, synthetic construct
  misc_feature 1..747: note = Description of Artificial Sequence: Synthetic coding sequence
  source 1..747: mol_type = other DNA
atggccgccgccgccgccgccgccgccgagcagatcaccctggtgatttgggcggtgattcgcatcggacctaatgggtgtgatagcatggagtttcacgagtctggcctgctgcgtttcaagcaggtctccgacatgggtgtgatccacccactgtacaagtccactgtaggtggacggcgcaacgagaaccttgtcattaccggaaataaccagccaattgtgttccagcagggcacaactaagctgagcgttgaaaacaacaagacttcaatcacttccgatataggcatgcagtttttcgatcccagaacacagaacatcctcttctccacagactatgagacccatgagtttcacctgccgtcaggagtaaagagtctcaacgtgcaaaaagcctcaaccgaaagaattacaagtaatgccacctccgacttgaacatcaaggtggatggccgtgccatcgtgcggggaaacgagggtgtctttattatggggaagacgattgaattccacatgggcggcaatatggaactgaaagccgagaattccatcatcctcaatgggagtgtcatggtgtccacgacaagattgccaagtagttcgagtggggatcagctgggatcaggtgattgggttcggtataagctgtgtatgtgtgccgacgggaccctttttaaggtgcaagtgacgtcccaaaatatgggttgccagatctctgacaatccctgcggaaatactcattag

SEQ ID NO: 204246 - DNA, 873 bp, synthetic construct
  misc_feature 1..873: note = Description of Artificial Sequence: Synthetic coding sequence
  source 1..873: mol_type = other DNA
atgatgccccaggagcagtacacccaccaccggagcaccatgcccggctctgtcgggcctcaggtgtataaagtgggcatctatggctggcgcaaaaggtgtctgtattttttcgtgttacttttgatgatcctcatccttgtcaacttggcaatgacgatctggatccttaaggtaatgaattttaccattgacgggatggggaacctgaggatcaccgagaaagggcttaaactagaaggggactccgaatttctgcaacctctttatgcaaaagagatccagtcgcggcccggcaacgccctgtacttcaaaagtgccaggaacgtgactgtgaatatcctcaatgatcaaacgaaagttctgacccaactcataactggtcctaaggcagttgaggcatatggaaagaagttcgaagttaaaaccgtctccggaaagttgcttttctcggccgacaataacgaagtggtggtgggggcagagcggctgcgagtactcggggcagagggcacagtctttcccaagagtattgagactccgaatgttagggcagacccttttaaggagctcaggctggagtcccccacaaggtctctggtaatggaggcccccaagggagtcgagattaacgccgaggccggtaacatggaggcaacctgtcgcactgaactgcgactggaatccaaggacggagaaatcaagctcgatgctgcaaaaattagactccccaggctgccccacggttcctatactcccactgggacccgccagaaggtgtttgaaatctgtgtgtgcgccaatggcagactctttttgagccaagccggagccgggtcaacatgtcagattaacacgagcgtgtgtctgtag

SEQ ID NO: 204247 - DNA, 870 bp, synthetic construct
  misc_feature 1..870: note = Description of Artificial Sequence: Synthetic coding sequence
  source 1..870: mol_type = other DNA
atgccccaggagcagtacacccaccaccggagcaccatgcccggctcagtcggaccccaagtctacaaggtcgggatttatggatggagaaagagatgtctatacttcttcgttctgttactgatgatactcattctggtgaacttggccatgacaatatggattcttaaggttatgaacttcacaatagacggcatgggaaacttgcgtataactgagaaagggctgaagctcgagggcgactctgagtttttgcagccactttacgccaaagagatacaaagcaggcctggaaatgcactgtactttaagagcgccaggaacgtgaccgtcaatatactgaacgaccaaacgaaggtgctgacacaactcatcactgggcccaaagctgtcgaagcttatggcaaaaagtttgaagttaaaactgtgtccgggaaactcttgttctccgctgacaataacgaagtagttgtaggggctgaacggcttagggtcctgggagcagaggggactgtgttcccgaaaagcatagagacacctaatgtgagggctgacccctttaaagaactgcgcctggaatcgccaactcgctcactggtgatggaggcccctaagggcgtggagataaatgctgaggccggaaatatggaggcgacctgccgtactgaactgcgcctggagagcaaagacggggagatcaagctggatgctgcaaaaatccgccttcctcgtctaccccatggttcctacactcccaccgggactcgccagaaggtattcgagatttgtgtgtgcgcaaacggaaggctctttttgagccaggctggggccggaagcacctgccagattaacacgagcgtgtgtctctag

SEQ ID NO: 204248 - DNA, 771 bp, synthetic construct
  misc_feature 1..771: note = Description of Artificial Sequence: Synthetic coding sequence
  source 1..771: mol_type = other DNA
atgatgccccaggagcagtacacccaccaccggagcaccatgcccgggtcggtgggaccgcaggtctacaaggttggcatctatggctggagaaagcggtgtctgtacttttttgttctactgcttatgattctgatactggttaatttagcgatgaccatttggattctcaaagtcatgaacttcacaatcgatggtatggggaacttgcggatcacagaaaagggtttaaaactagagggagactccgaatttctgcagcccctatatgccaaggaaatacagtccaggcctgggaatgctttatattttaagagcgcgcggaatgtcacagtgaatatcctgaacgatcagaccaaggtccttacccaacttataacagggccaaaagcagtcgaggcctacggcaaaaagttcgaagtcaagaccgttagtggcaaactgctgtttagtgctgacaacaacgaagtcgtggtgggcgccgagcgtctgcgcgtgctgggagccgagggaaccgtgtttccaaagtcaattgagactccgaatgtccgggctgatcccttcaaagagctgcggcttgaatcacccacgcggtctctggtgatggaagctcctaagggcgtggaaatcaacgccgaggcaggcaacatggaggccacctgtaggacagagctgcgcttggagtcaaaggatggggaagtcagggacgagaaggaccggagtagcaagtcctactccttcaatcggcctacgctccccatcaccgggtag

SEQ ID NO: 204249 - DNA, 771 bp, synthetic construct
  misc_feature 1..771: note = Description of Artificial Sequence: Synthetic coding sequence
  source 1..771: mol_type = other DNA
atgatgccccaggagcagtacacccaccaccggagcaccatgcccggttcggtcgggcctcaggtgtacaaagtagggatttatgggtggcgaaagagatgtctgtatttctttgtgctcctgttgatgatcctgatcctcgtgaacctagccatgacaatatggattttaaaggtcatgaacttcactatcgacgggatggggaatctgcgcattacggagaagggcctgaagctggagggtgatagcgagttcctccagccgttgtacgcgaaagaaatccagtctcggcccggaaatgccttgtatttcaagagcgctagaaatgtaactgtcaacattcttaatgatcaaactaaagtgctgacccaactgattacggggcctaaagctgtggaagcatatggaaagaaatttgaagttaaaacagtctcagggaagctcctgttctcagccgataataacgaagtcgttgtgggggcggaaagactgagggtcctaggggctgaaggaaccgtcttccccaaatctatagaaacgcctaatgtcagggctgaccctttcaaggagctccgccttgaaagtcccactagatccttggtgatggaggccccaaaaggagtcgagattaatgccgaggccggcaacatggaggctacttgccgtacggagctgcggcttgaatctaaggacggagaagtgagggacgagaaagaccgctcaagcaaatcttattcattcaaccggccaacattacctatcactggatag

SEQ ID NO: 204250 - DNA, 1314 bp, synthetic construct
  misc_feature 1..1314: note = Description of Artificial Sequence: Synthetic coding sequence
  source 1..1314: mol_type = other DNA
atgcagctgccccggtggtgggagctgggcgacccctgcgcctggaccggccaaggtcggggaaccagaagaatgagtcccgcaacgacaggtacctttttgttgacagtgtactccatcttttctaaagtgcactccgaccggaacgtgtatccctccgccggtgtcttgtttgtccacgtactggaaagggagtactttaagggcgagttccctccatatccaaagcctggagagatctccaatgatccgatcaccttcaataccaatcttatgggataccccgaccggcctggctggctgcgttatattcagcgcaccccttattctgatggagtgctgtatggttccccgaccgctgaaaacgtcggtaagcctacaatcatcgaaatcaccgcctataatcggcgaaccttcgaaaccgcacggcataacttgattataaatatcatgtccgccgaggacttcccactgccctaccaggcagagttttttataaaaaatatgaatgtcgaagagatgttggcctccgaggtgcttggcgactttctgggtgccgtgaagaatgtgtggcaaccggaacggctcaacgcaataaatatcacatccgcactcgaccggggtggccgcgtccctcttcccattaacgatctaaaggaaggggtgtacgtgatggtgggtgctgatgtccccttttccagttgtctcagagaggttgaaaatccgcagaatcaactccgatgtagccaagaaatggagcctgtgatcacctgcgataagaagtttcgtacccagttttacatagattggtgcaaaatttctctggtcgacaagacaaagcaggtgtcgacctatcaggaagtgatccggggtgaaggcattctacccgacggcggggaatataaaccaccttcggactccttgaagagcagagattactatactgattttttgataaccttagctgtgcccagcgctgtggctctggtgctgttcttgatacttgcctacataatgtgttgcaggagggagggagtcgaaaagaggaacatgcagactcccgacattcagctggtgcatcactccgctatccagaagtctacaaaagaattacgggatatgtctaagaatcgtgagatcgcttggcccttgtcaacactgccggttttccatcccgtcacgggcgagattatcccacctctgcatactgataactacgattctacgaatatgccgctgatgcagactcagcagaatctgccgcaccaaactcaaattccccagcaacagaccacgggcaaatggtatccttag

SEQ ID NO: 204251 - DNA, 1416 bp, synthetic construct
  misc_feature 1..1416: note = Description of Artificial Sequence: Synthetic coding sequence
  source 1..1416: mol_type = other DNA
atgcagctgccccggtggtgggagctgggcgacccctgcgcctggaccggtcagggacgcgggacccgccgcatgagtccagcaaccactggaactttcctgttgacagcatttttgctctcatgcgccgatggcattaacggtactgtcaattggaaaacacgccaggccaacaactttatcatttcccgcaaaatggcagcgggcatgaaggatgtgtactcgattttttccaaggtacattccgatcgaaacgtgtatccctccgctggggtcctctttgtacatgttctggagagggaatattttaaaggcgagttccctccttaccccaaacccggcgaaattagcaatgacccaatcacctttaacactaacctgatgggatatccagatagaccagggtggctgcgttatatccagagaacgccgtacagcgacggcgtgctgtacggcagtccaactgcagagaatgtaggcaaacccaccattatcgaaatcactgcttataatagacgcaccttcgaaaccgctcgccataacttgattattaacattatgtcagctgaggactttcccctaccataccaggcagagttcttcatcaagaacatgaatgtcgaggaaatgctagcatccgaagtgcttggcgactttctcggtgcagttaagaacgtctggcaacccgagaggctcaacgctatcaacattacttccgccttggacagaggaggtagagtgccattgcctataaatgatctgaaagagggagtgtacgtgatggtaggcgcggatgtccctttttcttcatgtctcagagaggtcgagaacccccagaaccagctgcgatgctctcaggagatggaacccgtgatcacttgtgacaagaaattccgcacacagttttacatcgactggtgtaagattagtctggtggacaagaccaagcaagtgtcaacctaccaggaagttatccgcggggagggcatcttgcctgatgggggcgaatataagcccccctcggacagcctcaaatcacgcgactactataccgatttccttatcaccttagcagtcccctccgcagtggccctggtgctgttcttgatccttgcctatattatgtgctgccgtagagaaggggtggagaaacgcaacatgcaaactccggacatacaactggtccaccattccgctattcaaaaatcaacaaaggagttgcgggatatgtcaaagaaccgagagattgcatggcccctctccacattacccgtgttccaccccgtcaccggagagataattccgcccctacacaccgacaattatgattctaccaatatgcccctgatgcagacacagcaaaacctcccacaccagactcaaattccacagcagcagacgacgggcgaatgttag

SEQ ID NO: 204252 - DNA, 1356 bp, synthetic construct
  misc_feature 1..1356: note = Description of Artificial Sequence: Synthetic coding sequence
  source 1..1356: mol_type = other DNA
atgcagctgccccggtggtgggagctgggcgacccctgcgcctggaccggccaggggagaggaactcgccgcatgtctccagcaacaactggcacctttttgctcacggtctattcaattttttcgaaggtgcactcagaccgaaacgtctatccgtccgctggcgtgttgtttgtacatgtgttagaaagagagtactttaaaggcgagtttccaccgtatcccaagccgggcgagatcagcaacgatccaattactttcaacaccaatttaatggggtatcccgatcgaccgggatggcttagatacatccagcgaacgccgtatagcgatggtgtgttgtacggaagtcctactgcggagaatgtcggtaaacccaccattatcgagatcaccgcatacaatcggcgtacgttcgaaacggctaggcacaatctgattattaacataatgtccgccgaagatttccctctcccataccaagctgagtttttcattaaaaatatgaacgtggaggaaatgctggcttcagaagtactgggtgacttcctgggcgctgtgaagaacgtctggcaacctgaacgcttaaacgctattaacattacatcggctctggatagaggaggacgagtacctctgcccatcaacgacttgaaagagggtgtgtatgtgatggtcggagcggacgtaccatttagttcttgcctcagagaggtcgagaacccccagaaccagttgagatgttcccaagaaatggagccagttattacttgcgacaaaaaatttaggacgcagttctatatcgactggtgtaaaatttctcttgtggataagactaagcaggtcagtacataccaagaggtgattcgaggggaaggaatactcccggacggtggtgaatataaaccaccttcagatagcctgaagtcaagggactattacaccgattttttgattaccctggccgtgccttccgccgtggctcttgtgctttttctaattctggcctacatcatgtgctgtcggagggaaggcgtcatacagctcgtgcatcactctgccatccaaaagtctaccaaggaactgcgggatatgagtaagaatagagagattgcctggcccttgagcacacttccagtttttcatcccgtcacaggagagatcattccgcccctacataccgacaactatgatagtactaatatgcctctgatgcagacacagcagaatttgccccaccaaacgcagatcccccagcaacagacaactggcgactttcgccttaccacctttcagcgatttgaggtcaatgggatacccgaagagcgaaaattgaccgaagccatgaatctgtag

SEQ ID NO: 204253 - DNA, 1389 bp, synthetic construct
  misc_feature 1..1389: note = Description of Artificial Sequence: Synthetic coding sequence
  source 1..1389: mol_type = other DNA
atgcagctgccccggtggtgggagctgggcgacccctgcgcctggaccgggcagggcaggggcacgaggaggatgagccctgctacaaccggaactttcttgctgaccgtatattccatcttcagtaaggtgcattctgacaggaatgtgtacccaagcgctggggtgctgttcgttcacgtgcttgagcgggagtatttcaagggcgaatttcccccctaccccaagcccggtgaaatcagcaacgatccaataacattcaacactaatctaatgggctatcccgacagacctggatggctgaggtatatccagcgcaccccatatagcgacggtgtactgtatggcagccccacggcagagaatgtaggaaagcccaccatcatcgagattaccgcatataaccgaaggacatttgaaactgcgcgtcacaacttaattattaacattatgtcggcagaggactttcctcttccatatcaggcggagttcttcataaaaaacatgaatgtcgaggaaatgttggcctctgaagtgctgggcgactttctcggcgccgtgaaaaacgtgtggcaaccggagaggctgaatgccatcaacattacaagcgccctggaccggggcggccgagtgccactccctattaacgacctcaaagaaggggtctacgtgatggttggagccgatgtgcccttctcttcctgtctgagggaggtggagaacccccagaaccagcttaggtgcagccaggagatggagccggtgataacttgtgataagaagtttagaactcagttttacatcgattggtgtaagatctccttggtggacaaaaccaagcaggttagcacatatcaggaggttatcaggggagaaggtatcctcccagatggaggtgaatacaagccaccatccgacagtctaaaatcgcgcgattactatacagactttctcatcacgttggcggttcctagcgcggtggccctggtactgttcctgatcctcgcatatattatgtgctgcagaagagagggcgtggagaaaagaaatatgcagactcctgacatccaattggtgcatcatagtgccatccagaaatctactaaagaacttcgggatatgagcaagaacagagaaatcgcctggccactgtccaccctgccagtctttcacccagtgacaggggaaattattccccccttgcacacagataactacgactccacgaacatgccactgatgcagactcaacaatggagctttgcccctgttgctcaagccggggtgcagtggtctgacctggggtcactgcaacctcccccgccacgtaatctccctcaccagactcagattccccagcaacagaccaccggcaaatggtatccgtag

SEQ ID NO: 204254 - DNA, 2118 bp, synthetic construct
  misc_feature 1..2118: note = Description of Artificial Sequence: Synthetic coding sequence
  source 1..2118: mol_type = other DNA
atgaccgacaacagcaacaaccagctggtggtgcgggccaagttcaactttcagcaaactaacgaggacgagctgagtttcagtaagggggacgtcattcatgttacccgggtggaagagggggggtggtgggagggaaccttgaacgggaggacagggtggttcccttccaactacgtgagagaggtgaaggcctctgagaagccagtgagtccaaaatcaggcaccctgaaaagcccaccaaaggggtttgataccacagctataaataaatcctactacaacgtggtgcttcaaaatattctcgaaactgagaacgagtatagtaaggagctccagacagtgctgtcgacctatctcaggcccctgcagacctccgaaaaacttagcagtgctaatatcagctatcttatgggaaatctggaggagatttgttcttttcagcagatgctggtgcaaagtctggaagaatgcaccaaacttcccgaggcccagcagagagtggggggttgcttcctcaatcttatgcctcagatgaaaaccctttacttgacatactgtgcaaatcacccatccgctgtgaacgttctgaccgagcatagcgaggaactcggcgagtttatggagactaagggggcgtcctcccccggcattctcgtgcttacaaccgggctgtccaagcccttcatgaggttggataagtatccaaccctactgaaggagcttgaaaggcatatggaggattaccacaccgataggcaagatattcaaaagtcgatggccgccttcaagaatctctccgcccagtgtcaggaagttagaaagcgcaaagagctggaactgcagatcttgacagaagctatcaggaattgggagggcgacgatatcaaaaccttagggaatgtgacctatatgtctcaggttctgatccagtgcgctgggagtgaggagaaaaatgagaggtatctgcttttattccctaatgtgctgttgatgctttcagcctccccacggatgtcaggcttcatttaccaaggaaagctacccacaacaggaatgaccattacaaagctcgaagactctgagaatcataggaatgccttcgaaatatcaggatccatgatagagcgcattctggtgtcctgcaataaccaacaggacctgcaggagtgggtcgagcacctgcagaagcagacaaaggtcacctctgtgggcaatccgaccattaaaccacatagcgtcccttctcacacactcccatcccatcctgttactcctagctccaaacacgctgactcaaaacccgcccctctcacccccgcgtatcatacattgccacacccgagtcatcatgggacgccccacacaactataaattggggccccctggaacctcccaagacacctaaaccttggagcctttcctgccttaggcctgctccacccctgcgtccttccgccgccctctgttacaaggaagatttgtctaaaagcccaaaaaccatgaaaaagctgttgcccaaacgcaagcccgaaagaaagcctagtgatgaggaattcgcgtctaggaaatccactgcagcccttgaagaggatgcacagattctgaaggttatcgaggcctactgtacatcagcaaaaacccggcagaccctcaatagcacttggcagggcactgatctgatgcataatcacgtactcgccgatgacgatcagccaagtttggatagtctcggccggaggtcctctctctcacgtctcgagcctagtgatctgtccgaagatagcgactacgatagtatctggactgcgcattcatatcggatggggtccacctcgagaagcagaaaagagtctgcaccgcaagtcctcctccctgaagaggagaaaatcatcgtggaggagactaaaagcaatggacagaccgtcattgaagaaaaatctctcgtcgacactgtctacgccctgaaagacgaagtgcaggagctgcggcaggataataaaaagatgaagaagtccctggaggaggaacagcgggcccgcaaagacctcgagaagctggttcggaaagtcttaaagaatatgaatgaccccgcctgggatgagacaaacctgtag

SEQ ID NO: 204255 - DNA, 876 bp, synthetic construct
  misc_feature 1..876: note = Description of Artificial Sequence: Synthetic coding sequence
  source 1..876: mol_type = other DNA
atggtgcgggagcagtacaccaccgccaccgagggcatctgcatcgaaagacctgagaaccagtacgtttataagatcggaatttacggatggaggaagaggtgcctgtacctgttcgtgctgctgctcctgataatcctggtcgtaaatcttgcgttaactatatggatccttaaggtaatgtggtttagccccgccggcatggggcacctgtgcgtgacgaaagacgggcttagactggagggggaatcggagttcctcttccccttgtatgcaaaagaaatccatagtcgcgttgattcgtccctcctcctccagtctacacagaatgtaacagtgaacgcccggaactctgagggcgaagtcactgggcggctgaaggtcgggcccaaaatggttgaagtccagaatcagcagtttcagattaactccaacgatgggaaacctctgtttacagtggatgagaaagaagtggtagtgggcaccgataaactaagagtgacaggaccagagggggccctattcgagcatagtgtggagacacccttagtacgcgccgaccctttccaggaccttcggctggaatctcccactcggtcactcagcatggatgcaccgaggggagtgcatatccaggcccatgctggaaagatcgaagcactgtctcaaatggatattctatttcatagtagtgacgggatgctggttctagatgcagagaccgtgtgtctgcccaagctcgtgcaggggacctggggaccttcagggtcaagtcagtctctctacgagatctgcgtttgccccgatgggaaactgtacttatcagtggccggtgtctccactacctgccaggaacacaaccacatctgtctctag

SEQ ID NO: 204256 - DNA, 876 bp, synthetic construct
  misc_feature 1..876: note = Description of Artificial Sequence: Synthetic coding sequence
  source 1..876: mol_type = other DNA
atggtgcgggagcagtacaccaccgccaccgagggcatctgcatcgagagaccagagaaccagtacgtttacaaaataggcatctacggatggcggaagcggtgcctatatctcttcgttttgttgctgcttattatcttggtagtaaatctggcactgaccatttggatcttaaaggtaatgtggttcagccccgctggcatggggcatctatgcgtcactaaagacggattgcgtttggagggcgagtccgagtttctgtttcccctatatgccaaggagatccatagtagggtggattcttcgctgctgctgcaatctactcagaacgttaccgtgaatgccaggaattctgaaggcgaagtgactggaagactgaaagtcgggcccaagatggtcgaagtgcaaaatcagcaattccagatcaacagcaacgatggcaaaccactcttcaccgtggacgaaaaggaagtagtcgtcggcacagataaattaagagtcaccgggccagagggggctctcttcgaacattctgtggaaacccccttagtgagggctgacccatttcaggaccttcgccttgagtcaccaactcgcagcctgagcatggatgcgccccgaggagtccacatccaggcacatgctggaaaaatagaggctcttagccagatggacattttgtttcactccagcgacgggatgctggtcctggacgcagaaacggtctgtctgcctaagctggtgcagggcacttggggcccttccggttccagtcaaagcctctacgagatctgcgtgtgtccagacggaaagttatacctctccgttgctggcgtatccaccacctgccaggaacataatcacatctgcttgtag

SEQ ID NO: 204257 - DNA, 96 bp, synthetic construct
  misc_feature 1..96: note = Description of Artificial Sequence: Synthetic coding sequence
  source 1..96: mol_type = other DNA
atgggcatcaacacccgggagctgttcctgaacttcaccatcgtgttgataaccgtgatccttatgtggttacttgtgcgctcatatcagtattag

SEQ ID NO: 204258 - DNA, 96 bp, synthetic construct
  misc_feature 1..96: note = Description of Artificial Sequence: Synthetic coding sequence
  source 1..96: mol_type = other DNA
atgggcatcaacacccgggagctgttcctgaacttcaccatcgtgctgataactgtgatcctcatgtggctcctcgtgcggagctaccagtactag

SEQ ID NO: 204259 - DNA, 96 bp, synthetic construct
  misc_feature 1..96: note = Description of Artificial Sequence: Synthetic coding sequence
  source 1..96: mol_type = other DNA
atgggcatcaacacccgggagctgttcctgaacttcaccatcgtgctaatcaccgtgatattgatgtggctgctggtgaggagttaccagtactag

SEQ ID NO: 204260 - DNA, 732 bp, synthetic construct
  misc_feature 1..732: note = Description of Artificial Sequence: Synthetic coding sequence
  source 1..732: mol_type = other DNA
atgggcaagaacaagcagccccggggccagcagcggcagggcggcccacctgctgctgatgccgctgggccggacgacatggagccaaagaagggcaccggcgcgcctaaagagtgtggggaggaggagcctcgcacctgttgcggatgtagattccccttactgctggcccttttacagttggcactggggattgccgtgactgtcgtgggcttcctaatggctagtatcagcagttccctgctcgtacgagatacccctttctgggcaggcataatcgtatgtctggtggcttatctgggcctgttcatgctctgcgtcagttaccaggtggatgaacgcacctgcattcaattctctatgaagctcctctattttttgttgtcggctctcggactgaccgtgtgcgtgctcgcggtcgcctttgctgcccatcactacagtcaactcacccagttcacttgtgagaccactttagactcctgtcagtgtaagttgccttcttctgagccccttagtcgcactttcgtgtacagagacgtgacggattgtacatcagttacagggaccttcaaattatttctcctgatacagatgatcctgaacctcgtctgcggcttggtttgcttgttggcttgttttgtcatgtggaaacacagatatcaagtattctatgtcggagtgcgcatttgtagtttgaccgcctctgaagggccccagcagaaaatctag

SEQ ID NO: 204261 - DNA, 423 bp, synthetic construct
  misc_feature 1..423: note = Description of Artificial Sequence: Synthetic coding sequence
  source 1..423: mol_type = other DNA
atgctgtgcgtgagctaccaggtggacgagcggacctgcatccagttcagcatgaagctgctttacttcctgttatccgctctggggcttaccgtctgtgtcctggcagtggcatttgccgcccaccactactcgcagctgacacaattcacatgtgaaacgacactcgactcgtgtcagtgcaaactcccctcttccgagcccctctctaggacgtttgtgtatcgtgatgtcacagattgtacctcagtaaccggtacttttaaactgtttttgctgattcagatgattttgaatctggtatgcggcttggtgtgtctgctagcctgtttcgtaatgtggaaacatagatatcaagtattctacgttggcgttaggatctgcagtcttaccgcttccgaaggacctcagcagaagatttag

SEQ ID NO: 204262 - DNA, 654 bp, synthetic construct
  misc_feature 1..654: note = Description of Artificial Sequence: Synthetic coding sequence
  source 1..654: mol_type = other DNA
atggagcccaagaagggcaccggcgcccccaaggagtgcggcgaggaggaaccccgaacttgttgtggttgtagattccctttgcttttggcgctgttgcaactggctctaggtatagcagttacagtggtgggctttttgatggcttctattagtagttccctgcttgtgagggatacccccttttgggccggcatcattgtgtgtctggtggcctacctggggctctttatgctgtgtgtgtcatatcaggtcgacgaaagaacctgcatccagtttagcatgaagctgttatacttcctgctgtctgccctggggttgacagtttgcgtgctggcagtggcctttgcagcccatcactattctcagttaacacagttcacctgtgagacaacactggattcttgccaatgtaagttgccctcttccgagcccctttctaggaccttcgtgtaccgcgacgttacagactgcaccagcgtgacggggacctttaaactgttcctcctcatccagatgatcctcaacctggtgtgcggtctggtgtgtctgctggcctgcttcgtgatgtggaagcaccggtaccaggttttctacgtaggagtcagaatatgttccctgactgcgtccgaaggccctcagcagaaaatttag

SEQ ID NO: 204263 - DNA, 387 bp, synthetic construct
  misc_feature 1..387: note = Description of Artificial Sequence: Synthetic coding sequence
  source 1..387: mol_type = other DNA
atgggcaagaacaagcagccccggggccagcagcggcagggcggccctcccgcagccgacgcagccgggccagatgacatggaacccaagaagggaacaggcgctcccaaagaatgcggcgaagaggagcccaggacttgttgtggatgcagattccccttactcctggcccttctgcagttggctttggggatcgccgtcaccgtggtggggtttctcatggccagcattagctccagcctgctggtcagggacacccctttttgggcaggcatcatcgtctgtttggtggcctatctgggcttattcatgctttgtgtgtcttatcaggttgacgagcgaacatgcatccaatttagtatgaagattcactgtcacgacttctag

SEQ ID NO: 204264 - DNA, 363 bp, synthetic construct
  misc_feature 1..363: note = Description of Artificial Sequence: Synthetic coding sequence
  source 1..363: mol_type = other DNA
atgctgtgcgtgagctaccaggtggacgagcggacctgcatccagttctcaatgaagcttctgtatttcctcctgtcagctctcggcctgactgtatgtgtgctagcagtggccttcgctgcgcaccattatagccagctgactcaatttacctgtgaaaccacgctggattcttgccagtgcaagctgccctcttcagagccactatctcggacattcgtttaccgggatgtgactgattgtacaagcgtgactggcacgtttaagctgttcctattaatacagatgattctgaacctagtttgcggtctggtgtgtttactggcgtgctttgttatgtggaaacatcgctatcaggtttag

SEQ ID NO: 204265 - DNA, 423 bp, synthetic construct
  misc_feature 1..423: note = Description of Artificial Sequence: Synthetic coding sequence
  source 1..423: mol_type = other DNA
atgctgtgcgtgagctaccaggtggacgagcggacctgcatccagttttcaatgaagcttctgtacttccttctgagcgccctgggcctcacagtctgtgtgctggctgtggcctttgccgctcatcactactctcagctgacccagtttacttgtgagacaacactggattcctgccaatgtaaattgccaagcagcgagccactctctaggaccttcgtgtatcgggacgttacagactgtacttctgtcaccgggaccttcaagctgttcttgctgatccagatgattctgaacctagtgtgcgggctagtttgtcttcttgcctgtttcgttatgtggaaacaccgctatcaggttttttacgtcggagttcggatatgctccttaaccgcgtctgaaggccctcagcaaaaaatttag

SEQ ID NO: 204266 - DNA, 2292 bp, synthetic construct
  misc_feature 1..2292: note = Description of Artificial Sequence: Synthetic coding sequence
  source 1..2292: mol_type = other DNA
atggaccacctgaacgaggccacccagggcaaggagcacagcgagatgtcaaataacgtgagcgatccaaaaggacctcccgccaaaatagctcgcctggagcagaatggcagtcccctgggacgcggaaggctgggcagtactggagccaagatgcagggtgtccctctcaagcattccggacacctgatgaagacaaatttacggaaaggtacgatgctgccagtgttctgcgtggtggaacattacgaaaatgcaattgagtacgactgtaaagaggagcatgcagaatttgttcttgtgcgcaaggatatgctatttaaccagctcatcgagatggcactcttatctctggggtactcgcattcttcagctgcacaggctaaggggctcatacaggtgggcaagtggaatccagttccactgtcctatgttacagatgcccctgatgctactgtggcggatatgctccaggatgtgtatcacgtggtgacacttaagattcagttgcatagctgtccgaaactagaagacctgccaccggaacagtggtcccacacaaccgtccggaacgccctgaaagatctgttgaaggatatgaaccagtcttctctggcaaaggagtgcccactctcccagagcatgatcagttctatcgtgaactctacctactatgctaatgtttcagccgccaaatgccaggagttcggaaggtggtacaagcacttcaagaaaactaaggacatgatggtagagatggacagtcttagtgagcttagccagcagggcgccaaccacgttaacttcgggcaacagccagtccccggaaacactgcagagcagcctcctagccctgcccagctgtcccacggctcccagccgtcggtgcgaacccccctaccaaaccttcaccctggactcgtgtctactcccatcagtcctcagttagtgaaccagcagcttgtgatggcccagcttcttaaccaacagtacgctgtgaatcgtttgctggcccagcaatccctgaatcagcaatacctcaatcacccccccccagtgtctagaagtatgaacaagccactggaacagcaggtgtcaacaaataccgaggtttcgagcgagatataccaatgggtgcgcgatgaactcaaacgggccggcatttctcaggccgtgttcgccagagtggcgttcaataggactcagggacttctgagtgagatcctgcgtaaggaggaagacccaaaaacagctagccagtcactgctggtcaacctgcgcgccatgcagaacttccttcagttgccagaagccgaacgggacaggatctaccaagatgagcgcgaacgatccctgaacgcagcctctgccatggggcctgcccctctgatcagcaccccaccaagcagaccacctcaggtgaaaaccgcgacaatcgctaccgaaaggaatggaaaacctgagaataataccatgaatataaacgcgtcaatatacgatgaaattcaacaggaaatgaagcgggcgaaagtctcacaggctctgttcgcaaaagtcgcagcaactaaatcccaggggtggctatgtgaactcctccggtggaaggaggatccgagtcctgaaaataggacactatgggagaacctgtctatgattaggaggttcctctcactaccccagcctgagcgagacgccatttatgagcaagaaagcaatgcagtacatcaccacggcgaccgaccacctcacatcatccatgtgccggccgagcagatccagcagcaacagcagcagcaacagcagcagcagcagcagcagcaggctccaccccccccccagccgcagcaacagccccagactggccctaggctcccaccacggcagccaactgtcgcatctcctgcggagtcggacgaggaaaatcgacagaagacgagacctagaacaaaaattagcgtagaagctctcggcatcttgcagtccttcattcaagatgtgggtttataccctgatgaagaggctatccagaccctcagcgcacagttggatctcccaaagtacaccatcatcaaatttttccaaaaccaacggtattacctaaaacatcatgggaagctcaaagataattcaggactagaggtggatgtcgctgaatataaggaagaggaactcctgaaagatttagaagaaagtgtgcaggacaaaaacactaataccttattctccgtgaagttggaggaagagttgagcgttgagggcaataccgacattaacacggacttgaaggattag

SEQ ID NO: 204267 - DNA, 351 bp, synthetic construct
  misc_feature 1..351: note = Description of Artificial Sequence: Synthetic coding sequence
  source 1..351: mol_type = other DNA
atggaccacctgaacgaggccacccagggcaaggagcacagcgagatgtctaacaatgtgagcgatccaaagggaccaccggcaaaaatcgcacggctcgagcagaacggctcccctctgggccgcggtagactcggttctacaggcgctaaaatgcagggggtacctctcaagcacagcggacatcttatgaaaaccaatttgaggaaagggacaatgttgccagtgttctgtgtcgtggagcactacgaaaatgccatcgagtatgactgcaaggaggagcatgccgagtttgtgctggtgaggaaagacatgctgtttaaccaacttatcgaaatggcgctgctttag

SEQ ID NO: 204268 - DNA, 675 bp, synthetic construct
  misc_feature 1..675: note = Description of Artificial Sequence: Synthetic coding sequence
  source 1..675: mol_type = other DNA
atggaccacctgaacgaggccacccagggcaaggagcacagcgagatgagtaataatgtaagtgatccaaaggggcccccagccaagatagcacggcttgagcaaaacgggtctccactgggtcgcggcagactgggttcaactggtgccaagatgcagggggtaccactgaagcattccggacatcttatgaagaccaacctccggaaagggactatgctgccggtgttctgtgtggttgagcactacgagaacgccatcgagtacgactgtaaggaggaacatgccgaatttgtgctggtgcgaaaggacatgttgttcaaccagctcatagagatggccctgctgtccctgggctactcccactctagcgctgcgcaagctaaaggcctaattcaggtcgggaaatggaaccccgtgcccctaagctacgttaccgacgcccccgatgccaccgtggccgatatgctacaggacgtataccacgtcgttactctgaagattcagctgcactcatgcccaaaactggaggatttgccccctgagcagtggtctcatacgacagtgcgtaatgccctgaaagatctgctgaaggatatgaatcagagttcccttgctaaggaatgccccctgtctcagtcaatgatctcatccatcgtgaattctacttactag

SEQ ID NO: 204269 - DNA, 216 bp, synthetic construct
  misc_feature 1..216: note = Description of Artificial Sequence: Synthetic coding sequence
  source 1..216: mol_type = other DNA
atggaccacctgaacgaggccacccagggcaaggagcacagcgagatgagtaataatgtatcagaccctaaggggcccccagccaaaatagcccgtcttgagcagaatggaagccctctagggcgcgggcgtctcggatctaccggggctaaaatgcagggggtgcccctgaagcattctggacatctcatgaagacaaatctccgcaaggggtag

SEQ ID NO: 204270 - DNA, 27 bp, synthetic construct
  misc_feature 1..27: note = Description of Artificial Sequence: Synthetic coding sequence
  source 1..27: mol_type = other DNA
atggaccacctgaacgaggccacctag

SEQ ID NO: 204271 - DNA, 519 bp, synthetic construct
  misc_feature 1..519: note = Description of Artificial Sequence: Synthetic coding sequence
  source 1..519: mol_type = other DNA
atggaccacctgaacgaggccacccagggcaaggagcacagcgagatgagcaataatgtttcggatccgaagggtcccccggctaagatcgcgcgccttgagcagaacggtagcccgttgggcaggggacgactggggtcgaccggcgctaagatgcagggcgtgcctttgaagcactccgggcacttaatgaaaaccaatctgaggaagggtactatgctgccggtgttctgcgtagtggaacactatgagaacgccatagagtatgattgcaaagaggagcacgcagagtttgtgctcgtcaggaaggacatgttgtttaaccagctcatcgagatggctcttttgtcactgggttatagccacagttcggccgctcaagctaaagggctgatccaggttggcaagtggaaccctgttcccctgagctatgttaccgacgctcctgacgcgacagttgccgatatgttgcaggacgtgtaccacgtggtgacactcaagatacaactgcacaggtag

SEQ ID NO: 204272 - DNA, 2292 bp, synthetic construct
  misc_feature 1..2292: note = Description of Artificial Sequence: Synthetic coding sequence
  source 1..2292: mol_type = other DNA
atggaccacctgaacgaggccacccagggcaaggagcacagcgagatgtcgaacaatgtgagtgaccccaagggaccccctgctaaaattgcacgacttgagcagaacggatcccctctgggtcgcgggagactgggatcaaccggagctaagatgcagggggtgcccctgaagcacagcggccatcttatgaaaaccaatctgcgaaaaggaacaatgctgcccgttttttgcgtggtggagcattatgaaaatgctatcgaatatgactgcaaggaggagcatgccgaattcgtgttggtccggaaagatatgctattcaaccagctcattgagatggccctgctgtccctggggtattcacatagctcggcagcccaggccaagggattgattcaagtggggaaatggaaccccgtgccgctgagttacgtcaccgacgcccccgacgcgacagtcgctgatatgttgcaggacgtgtaccacgtagtcacattaaaaatccagctgcacagttgccccaagctagaagatttgccacccgagcagtggtctcacacaaccgttcggaatgccctaaaagatctgcttaaggacatgaatcaatcctccttggctaaagagtgcccactgtcccaatccatgatttccagtattgtcaacagcacgtattatgcgaatgtgtccgcagccaaatgccaagagtttgggagatggtataagcatttcaaaaagaccaaggacatgatggtcgagatggatagcttaagtgagctgtcacagcagggggcgaatcacgtaaattttggccagcaaccggtccccggcaatacagccgagcaacccccgagccctgcacagctgtcccacggttcccagccatccgtgcggaccccgctgcccaacctgcatcctgggctggtgtcaaccccaatatccccgcagttggtaaaccaacaactggtcatggcccagcttttgaaccaacagtatgctgttaacagacttttggcccaacaatcactgaatcagcagtacctgaaccatccacctcccgtcagccgctccatgaacaaacccctcgaacaacaagtttcaactaataccgaggtgtcttctgagatttatcagtgggtgcgggacgagctaaagcgcgccggtatcagtcaggcagtttttgcgcgggtcgcgtttaaccgaacccaggggctcctgtccgagattttacgcaaagaggaggatccaaagactgccagccagagcctactggtgaatctgcgggccatgcagaacttccttcagctgcccgaagccgagcgggaccgaatttatcaagacgaaagggaacgttctcttaatgctgcgtccgcaatggggcccgccccactaatttcaacacctccatctaggccccctcaggtaaagaccgcaacgatcgccacagaacgaaacggaaagcccgagaataacactatgaatatcaatgcttcgatttacgacgagatccaacaggagatgaagcgcgcaaaagtgtcccaagccctgttcgctaaagttgctgctactaaaagccaaggctggctttgtgaactcttgaggtggaaggaagatccctctcctgagaaccgaacactatgggaaaaccttagtatgatacgccgattcctctctcttcctcagcccgaacgggacgccatctatgagcaagagtcgaacgcagtccaccaccatggtgacaggccacctcacatcatccatgtgcccgcagagcagatccagcagcagcaacagcaacagcagcagcagcagcaacaacagcaagccccccctcccccccaaccacagcagcaaccgcagaccggtccacgcctacccccacgccagcctacagtcgccagccccgctgagagcgatgaggagaatcggcaaaaaacccggcctaggacgaaaatcagtgtcgaggctttaggtattctgcagagctttatccaagatgtgggcctgtatccggatgaagaggccattcagacgttgagcgcgcagctcgacttgccaaagtataccattatcaagttcttccagaatcaaaggtattacctcaagcatcacggcaagttgaaagataacagcgggcttgaggtggatgtggctgaatataaagaagaggagttactgaaggaccttgaagagtcggttcaggacaaaaataccaacacactgttcagcgtcaagcttgaggaggagctttcagtggaaggcaatacagacataaataccgatctgaaggactag

SEQ ID NO: 204273 - DNA, 393 bp, synthetic construct
  misc_feature 1..393: note = Description of Artificial Sequence: Synthetic coding sequence
  source 1..393: mol_type = other DNA
atggaccacctgaacgaggccacccagggcaaggagcacagcgagatgagcaataacgtgtcggatcccaagggaccccctgcaaagattgcgaggctcgaacaaaacggatccccactggggcgaggcaggctggggagtactggagcgaagatgcagggtgttccactcaagcactctggccacctgatgaagacgaatctgagaaagggtactatgctcccggtcttctgtgtggtggaacactacgagaacgccattgaatacgactgtaaagaagagcatgcggagtttgtgctagtgcgcaaagatatgttattcaaccaactcatcgaaatggccttgcttagcctcggatactctcatagctcagcagctcaagccaagggctag

SEQ ID NO: 204274 - DNA, 2388 bp, synthetic construct
  misc_feature 1..2388: note = Description of Artificial Sequence: Synthetic coding sequence
  source 1..2388: mol_type = other DNA
atggaccacctgaacgaggccacccagggcaaggagcacagcgagatgtctaataatgtctccgaccctaagggacccccggctaaaatcgcccggctcgagcagaacgggtcaccgctgggcagggggcggctcggttcaaccggggctaagatgcagggcgttcctctgaaacattcggggcacctgatgaaaaccaatttaaggaagggcacgatgctgcccgtcttctgcgtagttgagcactatgaaaacgccattgagtatgactgcaaagaggaacacgccgaatttgttctcgtgcggaaagatatgctttttaaccagcttatcgagatggctctactgagcctgggatactcccattcttccgcggcacaggccaaagggcttatccaggtcggaaagtggaaccctgtgcccctgtcctatgtgactgatgcacctgatgcaactgtagcagacatgctgcaggatgtttatcacgttgtcactctgaagatccaattgcatagttgccctaagcttgaagacctccctcctgaacaatggagccatacaactgtccggaatgccttgaaggatcttctgaaggatatgaatcagtcatccctggccaaagaatgtccattgagtcagtcaatgatatcctctatcgtcaattccacctattacgctaatgtttcggccgcaaagtgccaggaattcgggcgatggtataaacactttaagaagactaaagacatgatggtggagatggattctttgtcagaactttcccagcagggggcgaaccacgtaaattttggccagcagccggtcccaggaaatactgccgagcagccacctagcccagcacaattatcacacgggagccagccgtccgtgcggacgccactgcctaacctccacccagggctggtgtccacacctatctcaccacagctggttaatcagcagctggttatggcccaactactcaaccagcagtatgcggttaatcgccttctggcacagcagagcctcaaccagcagtacttgaatcatccacctccggtgtctcgttcaatgaataagccgttggagcagcaagtgagtacaaacactgaagtaagctctgagatctaccagtgggttcgagacgagttgaagagggcagggatttctcaggctgtcttcgcccgagtggcctttaacagaacacagggcctattgtcagaaatactccgaaaggaggaggatcctaaaacagcttcacagtcccttctggtgaacttgagggccatgcagaactttctgcagttgcctgaagcagaaagagatcgaatctaccaagatgaaagagaacgctcacttaatgcagcctcagccatgggccctgcccccctgatttccacaccccctagccgacccccccaggtgaaaaccgctaccatcgctacagagagaaacggaaaaccggaaaacaataccatgaatatcaatgcctctatctacgatgagatccagcaggagatgaaaagagctaaggtgagtcaagcgctgttcgcgaaagtggctgccacaaagtcccaaggctggctttgtgagctcctgaggtggaaggaggacccttcgccagagaaccgcacgttgtgggaaaatctgtcgatgataagacggttcctgtccctgccccagccagagcgcgacgcgatctacgagcaagaatcaaacgctgtccaccaccatggggaccgccctccccatattatacacgttcccgcagaacagatacagtcaccttctccaactacacttggcaagggtgagtctaggggcgtgttcctccctggattaccgactccagctccctggctcggagccgccccccagcagcagcagcagcagcaacaacagcagcaacagcagcagcaggcaccacctccacctcagccccagcaacaaccgcaaaccggaccacgcttacctcctagacaacctaccgtcgcttcccccgcagagtccgatgaggaaaacaggcagaaaaccaggcccaggacaaagataagcgttgaggctctcggcatcctacagtctttcattcaggacgtagggctgtatccggacgaggaggcaatccagactctctccgctcagcttgatctccccaaatacacaatcatcaaatttttccaaaaccaacggtactatcttaaacaccacggcaagcttaaagacaatagtgggctggaagtcgacgtggccgagtacaaagaggaggaactcctgaaggacctggaagagagtgttcaggataagaacaccaatacactgttcagcgtgaaactcgaagaagagctgtccgtggaggggaatacagacatcaacacagacctcaaagactag

SEQ ID NO: 204275 - DNA, 2202 bp, synthetic construct
  misc_feature 1..2202: note = Description of Artificial Sequence: Synthetic coding sequence
  source 1..2202: mol_type = other DNA
atggagcggcggagcgagagcccctgcctgcgggacagccccgaccggaggtccggctccccagatgttaaaggcccccccccagtgaaagtggctcgactcgaacagaacgggtcccctatgggtgctcggggccgcccaaacggggccgtcgcgaaggccgtcggaggcctgatgatcccggtgttttgcgtcgtcgagcaactcgacggctcattggagtatgacaatagggaagaacatgccgaattcgtgctagtcagaaaagacgtgctgtttagccagctcgtcgagacagcattacttgccttggggtattcccactcgagcgccgcccaggcgcaaggcatcatcaaactaggccggtggaacccgctgccattgtcgtacgtgacagatgcgcccgatgctacagttgccgatatgcttcaggacgtctatcacgtggttactctgaagatccagctgcaaagttgttccaaactggaggatttgcctgctgagcagtggaatcacgctactgtccggaatgctctgaaggagcttctcaaggaaatgaaccaaagtactctcgcaaaggagtgcccactgtcccaaagcatgatttcttccattgtgaactctacctattacgccaacgtatctgctacaaaatgtcaggagtttgggcgctggtataagaaatataagaaaatcaaggtggagagggtggaacgcgagaatctgtcagactattgcgtgctcggccaaagacccatgcacctacccaatatgaatcagttggcctcattgggtaaaactaacgagcagtctccacactctcagatccaccacagcacgcctattcgcaaccaggtgcccgctttgcaacccattatgagccctggtctgcttagcccgcagctgagccctcagctcgttagacagcaaattgcgatggcccatcttataaaccagcagatcgcggtgagtcgactgttagcacatcagcaccctcaggctatcaatcaacagttcctgaatcacccgcctatacctcgtgcagtgaagccagagcccaccaactcatctgtggaggtgtcccctgacatctaccagcaggttagggacgaactgaaaagggctagtgtgtcacaagccgtgtttgccagagttgcgttcaataggactcaggggcttctatcggaaatacttagaaaagaagaagatccgcggactgcatcccaatcgctgctagtaaacttgcgagccatgcaaaacttcctgaacctgccggaggtggagagagatagaatctatcaggatgaacgggaacgctccatgaaccccaatgtgtctatggtcagttccgcctcttcatcccccagttcttctaggacgccacaggccaagaccagcacccctacaacagatctgcctataaaagttgacggcgctaatattaacattaccgccgccatttatgatgagattcagcaggagatgaagagggccaaggtgagtcaggcgcttttcgcgaaggtcgccgccaataagtcccagggctggttgtgcgagctgcttaggtggaaagagaatccttccccagagaaccgtaccctgtgggaaaatttgtgtactattcgtaggtttcttaacttgcctcagcacgaaagggacgtcatctacgaagaagagtcaaggcatcaccacagcgaacgcatgcagcacgtcgtgcaactgcctccggagccagtacaagtgctgcaccgtcagcaaagtcagcccgctaaagaaagtagcccacccagggaggaagcgcctcctcctccaccacctactgaagactcctgcgcaaaaaagcccagatcccgaaccaaaatttccctcgaagcactgggcattttgcagtccttcattcatgacgtgggtctgtatcctgatcaggaggccatccacaccctgagcgctcagctcgatctgcctaagcacaccatcataaaatttttccagaatcaacgctaccacgtcaagcaccatggcaaactgaaagaacacttgggttccgcagtagacgttgctgagtataaggacgaggaacttctcaccgagagtgaggagaacgattctgaagaggggtctgaggagatgtataaggtcgaggcggaagaggaaaacgcggacaagagtaaggccgcccctgctgagatcgaccagagatag

SEQ ID NO: 204276 - DNA, 2202 bp, synthetic construct
  misc_feature 1..2202: note = Description of Artificial Sequence: Synthetic coding sequence
  source 1..2202: mol_type = other DNA
atggagcggcggagcgagagcccctgcctgcgggacagccccgacaggcgctcagggagcccagacgtgaagggcccaccccctgtgaaagttgcgagattagaacaaaacggcagtcctatgggcgccaggggccggcccaatggggctgtagctaaggccgtgggcggcctgatgatacctgtattttgtgtcgtggaacagctggacggatctctggagtacgacaatagagaggagcatgccgaattcgtactggtacggaaagacgtgctcttcagccagctggtggaaactgcactgctggcgctcggttatagccacagcagtgccgcccaggcccaaggtataataaaactcggtagatggaatcctcttcccttaagctacgtgactgatgccccagatgctactgtggctgatatgttgcaagacgtgtatcacgtggtcactcttaagatccagctgcaatcctgcagtaaactagaggatctccccgccgagcagtggaaccacgctacggtgcggaacgctcttaaagagctcttgaaagaaatgaaccaatctaccttagccaaggagtgcccactgtcgcaatctatgatctcttctatagtgaattcaacatattatgctaatgtgtctgccactaagtgccaggagttcgggaggtggtataagaaatacaaaaagatcaaggtggaaagggtagaacgagagaacctcagcgattattgtgtgctgggccaacgaccaatgcacttacctaacatgaatcagcttgcttctctgggaaagacaaatgaacagagcccacactcacagatccatcactccacccccattcggaaccaggtcccagcactccagccaataatgtctcctggactgttatcccctcagctgagtccacagctggtgaggcagcaaattgctatggcacacctgattaatcagcagatcgccgtgtctaggctcctggctcaccagcacccacaggccattaaccaacagtttctgaaccaccctcccataccccgggccgttaagcctgagcccaccaatagttcggtggaggtttcgcctgatatctatcagcaggtccgggatgaactaaagcgagcttctgtgtcacaggcagtgttcgcacgggtagctttcaacagaacacaggggctcctctctgagattctgcgtaaagaagaggatccccggaccgcctcgcagagcttgctcgtcaacctgcgggccatgcagaattttctgaatctgccggaagtggagcgagaccggatctaccaggacgagagggagcggagcatgaaccctaatgtcagtatggtctcctcagccagctcgtcccctagcagctcccggacacctcaggctaagacgagcaccccaacaaccgacttgcccataaaggtggatggcgcaaatataaatatcacggccgccatttatgacgaaattcaacaagagatgaaaagggccaaggtatcccaggctttgtttgccaaggtcgcagcaaataagtctcagggctggttatgcgaacttctcaggtggaaggagaacccaagcccagagaatcgtactttgtgggagaatctgtgcacgattaggcgattcctgaacctgccccagcacgaacgggatgtaatttacgaagaagagagcaggcaccaccacagtgaacggatgcagcacgtggtgcagctgcccccggagcccgtgcaggtcctacaccggcagcagtcccagcccgctaaggaaagcagcccacccagggaggaggcacccccaccccctcctccgacggaggatagctgcgcaaaaaagcctcgcagtcgaacgaagatctctcttgaggcactgggcatcttacagagcttcattcatgatgtgggtctttaccccgaccaggaggccatccacaccttgagcgctcaactggatctcccaaagcacactataatcaaatttttccagaatcaacggtaccatgtcaagcaccatggtaagttgaaagagcaccttgggtccgcagtggacgtggctgagtataaggatgaggagctgcttacagaaagcgaagagaacgacagcgaagaaggatcagaggagatgtataaggtggaggccgaggaggagaacgccgacaaatcaaaagcagctccagccgaaatagaccagcggtag

SEQ ID NO: 204277 - DNA, 1848 bp, synthetic construct
  misc_feature 1..1848: note = Description of Artificial Sequence: Synthetic coding sequence
  source 1..1848: mol_type = other DNA
atggagcggcggagcgagagcccctgcctgcgggacagccccgaccggagaagtggatcacctgacgtaaagggtccaccacccgtgaaagtggcacgcttggagcagaacgggagtcccatgggcgccagagggaggcctaacggcgcagtcgccaaggcggtaggtggcttgatgatccccgtattttgcgtggtggagcaacttgatgggtctttagaatatgacaatagagaggagcacgcagagttcgtcttggttcggaaagatgtgctgttctctcaattggtggaaactgcactgctggctcttggatactcacacagttccgcagctcaggcccaggtggagagggtggaaagggagaatctttcggactactgcgtactgggacagcggcccatgcatctgccgaacatgaatcagctcgcatctctcggcaaaacaaacgagcagtctcctcattcacagattcaccacagcaccccgattcggaaccaggtccctgctttacaacctataatgtctcctggtctcctgagtccccaactgtctccacaacttgttcgtcagcagatagcaatggctcatctgatcaatcagcagatcgctgtttcccggctcctcgctcatcagcacccccaggccattaatcagcaatttctgaaccaccccccgatcccacgcgccgtgaagcctgagccaacaaactcatcagtggaggtgtctccggacatctaccagcaggttcgcgacgagttgaaacgcgccagtgtgagccaagcagtcttcgctcgggttgcctttaatcggactcagggactcctgtccgagatcctgcggaaggaagaagaccctcggacagcaagccaaagccttctcgttaatttgcgggcaatgcagaatttcctgaatttacccgaggttgaaagagatcggatataccaggatgaaagggaaaggtctatgaaccctaacgtcagtatggttagcagcgcctcttctagcccctcctctagtagaacaccacaggccaaaactagcacgcccactaccgacctaccaattaaggtagacggtgccaatatcaatatcaccgcggctatctacgatgaaattcaacaggaaatgaagcgagccaaggtgtcacaggccctctttgctaaagtcgcagcaaataagtctcagggctggctatgcgaactcctaaggtggaaggaaaacccaagccctgaaaataggacactgtgggagaatttatgcactatcagaagatttctcaacctccctcagcacgagagagacgtgatatacgaggaggagtcaagacatcaccattctgaacgcatgcagcatgttgtgcaactgcctcccgagccagtgcaggttttgcaccgccaacagtcccagccagccaaggagtcttcaccacctagggaggaggccccacctccccccccacctactgaggactcttgtgccaagaagccgcgtagccgcacaaagattagtctcgaggctctcggcattctgcaatccttcatccacgacgtgggcctttatccagaccaggaagcaattcacacactgagtgcacaattggatcttccaaagcacactatcattaagttcttccaaaatcagaggtaccacgtgaaacaccatggaaagctgaaggagcacctgggatcggccgttgacgtagcggaatacaaagatgaagaactcctgaccgagagtgaggaaaatgacagtgaagaaggctccgaggaaatgtataaggtggaagctgaagaggagaatgctgataagtccaaagctgcccctgccgaaatcgaccaacgctag

SEQ ID NO: 204278 - DNA, 2202 bp, synthetic construct
  misc_feature 1..2202: note = Description of Artificial Sequence: Synthetic coding sequence
  source 1..2202: mol_type = other DNA
atggagcggcggagcgagagcccctgcctgcgggacagccccgacagacggtccggtagccctgacgtgaaaggcccgcccccagtcaaggtggctagactggagcagaacggctcccccatgggggcacgcggcagaccaaacggtgcagtggctaaagcggtgggcggcctgatgatccctgtgttctgtgttgtggaacaattggatggaagcctcgaatacgacaatcgcgaggaacacgctgagtttgtcttggtcagaaaggatgtgctgttctctcagctcgtcgagacggccctccttgcacttggctattcccacagctctgccgcacaagcccagggaattatcaagttaggccgctggaaccctcttcccctatcttacgtgaccgacgcaccggacgccacagtcgccgatatgctgcaggacgtctaccacgtcgtgacactgaaaatacagctacaatcatgcagtaagcttgaggacctgcccgctgagcagtggaaccatgcaacagttcggaacgcgctcaaggaactgctgaaggagatgaaccagagtaccttagccaaagagtgccctctgtcacagtcaatgatttcgtctattgtaaactctacatactacgcgaacgtctctgccacgaagtgccaggagtttggccgatggtataagaagtataaaaaaatcaaggtcgaaagggttgaacgggaaaatttgtcagattactgcgtgttggggcagcgccccatgcatctgcctaacatgaatcagctggctagcttgggaaaaactaacgagcagagcccccactcacaaatccaccatagtactcctattaggaaccaggtccctgccttacagcccataatgtcgcccggtctgctgtctccacaattgtcaccccaacttgtccggcagcaaatcgccatggcccatctaattaatcagcaaatagctgtaagcaggctgctggctcaccagcacccgcaagctatcaaccagcagttcctgaaccaccccccaattccacgggcagtgaagcctgaaccaaccaactcaagcgtggaggtgagccccgatatctatcaacaggtgcgcgatgagctcaaacgtgcaagcgtgagtcaggccgtcttcgcacgagtagcttttaatcggactcaaggcttactatcagagatcctcagaaaagaagaagatccccggaccgcttcgcagtctctgctggtgaacttacgcgcaatgcagaactttttgaacctgccagaggtggaacgagaccgtatctatcaggatgaacgcgagagatcaatgaacccgaacgtctctatggtctctagtgcttccagtagcccatcatccagccggaccccccaggctaagaccagcaccccaaccactgacttgccaataaaagtagacggtgctaacatcaacatcaccgctgccatctacgatgaaatccagcaggagatgaaacgagctaaggtgagtcaggccctctttgcaaaagtggcagctaataagagtcaggggtggctctgcgaactgctaaggtggaaagagaatcctagccccgaaaatcggacactttgggaaaatctgtgtacaattcgtcgatttctgaacctcccccagcacgagagagacgtgatatacgaggaggaaagccgacaccatcattccgagagaatgcagcacgtcgtgcagctgcctcccgaaccggtgcaagtcttacacaggcagcagagccagcccgccaaggaaagttctcctccccgagaggaggcaccccccccaccccccccaaccgaggactcctgtgctaaaaagccgagaagtcgcacaaaaatttcactggaagccctagggatactccaaagttttatccacgatgttgggctgtaccccgaccaggaggccatccatactctgagcgcgcagctcgacttacctaagcacaccattatcaaattttttcaaaaccagaggtatcacgtaaaacaccacggaaagctcaaggagcacctcggcagtgcagtcgacgttgcagagtacaaagatgaggaactgcttaccgagtccgaggagaacgactcagaggagggcagcgaggagatgtacaaagtggaggccgaagaggaaaacgctgacaagtcaaaggccgcccctgccgagattgatcaacgatag

SEQ ID NO: 204279 - DNA, 2748 bp, synthetic construct
  misc_feature 1..2748: note = Description of Artificial Sequence: Synthetic coding sequence
  source 1..2748: mol_type = other DNA
atggccgagaccctgagcggcctgggcgacagcggcgccgccggcgcagccgccctgtcttccgcatcatcggagactgggacaagaaggctgtccgacctgagggtgatcgatcttcgcgccgaattaaggaagcggaacgtagatagttcaggcaacaagtccgtcctaatggaaagattgaagaaggcgatcgaagatgaggggggcaatcctgacgaaatcgaaattacctctgaaggcaataagaagacatccaaacggagctcgaagggaaggaaaccagaggaagagggtgtcgaagataatggtcttgaagagaactcaggcgatgggcaggaagatgttgagacaagcttagaaaacttgcaggatattgatataatggatattagcgtccttgatgaggccgagatcgacaacggttctgtcgccgattgtgtagaggacgatgatgccgacaacctacaggaatccttgagcgacagcagggagctggtagagggcgaaatgaaagaactccccgaacagctacaagagcacgccattgaagacaaggaaacgatcaacaacctggataccagtagttccgactttaccatacttcaagagattgaggagccatccttggagcccgagaacgaaaagatcctggacattctgggagagacctgcaagagtgaaccagtgaaggaagaaagttccgagctcgaacagccttttgcccaggacactagctcggttggacctgaccgaaagttggccgaagaggaagacctgttcgatagtgctcatcccgaggagggagacctggatcttgccagcgagtccacagcacacgcccagagctccaaggcagacagtctcctggccgtggtgaaacgggaaccggccgagcaacccggcgacggagagcggacagactgtgagccagtgggcctggaaccggccgtggaacagtcttcagctgccagcgagctggcagaagcctcatccgaagaacttgcagaagcccctacagaggctccgagccctgaggcacgtgacagcaaagaagatgggcgcaagtttgattttgatgcgtgtaacgaggtccccccagctcccaaggagagttccacatctgaaggtgcagaccagaagatgagtagtcccgaggatgacagtgacaccaagaggttgtccaaggaagaaaaaggtagatcctcctgtggtcgaaatttttgggtgtctggtctgagctcaaccactagagccactgacctgaagaatctcttctccaaatacgggaaagtagtgggagctaaagtggtgacaaatgctcggtctcctggcgcacgatgttatggctttgtgaccatgtcgacagctgaagaagctaccaaatgtatcaaccatctgcacaaaacggaattgcatgggaagatgattagtgtcgaaaaggctaaaaatgagcctgtgggcaagaaaactagcgataagcgcgattcagacgggaagaaagaaaagtcttccaatagcgatcggagtaccaatttgaaacgagacgataagtgtgatcgtaaagacgatgcaaaaaagggcgatgacgggtcgggggagaaaagtaaggaccaggatgatcagaaaccagggcctagtgagcgatcgagggccaccaagtctggctcccgaggcaccgagagaacagtcgtcatggacaaatccaaaggagtccccgtaataagcgtcaaaacttcaggctcaaaagagcgtgcttctaagagccaagaccgcaaaagtgcctctcgcgagaaacggagcgtggtttcgtttgataaagtcaaggaacctcgcaagagccgggattcagaatctcatagccgggttcgcgagcgtagtgagcgcgagcagcgcatgcaggcgcagtgggaacgcgaggagagggagaggctggagatcgcacgggagcggctcgccttccagcgccagaggctcgaaagggagaggatggaacgcgagcgtttagagagggagcgcatgcacgtagaacacgagcggagacgggagcaggaacggatccatcgagagcgcgaagaactcagacgccaacaagaactgaggtatgaacaggagcggcggccagctgtcagacgaccctacgacctagatcgccgggacgatgcttactggcctgaggctaaacgtgcggccctcgatgagcgatatcacagcgattttaatcggcaggaccggttccacgactttgaccatcgtgatcggggtcgataccccgatcactctgttgacagaagggagggaagtcgatccatgatgggagaacgggaggggcagcattatcctgaacggcacggtggtccagaaagacacggtagagactcccgggacggctggggagggtacggcagtgacaaacgcatgtcagagggccgcggactcccaccaccacctcgcagggattggggagatcatggaagaagagaggacgaccgttcatggcagggaacagccgatggcggaatgatggaccgcgatcataaaaggtggcagggaggagagaggtcgatgagtggacactcaggtcctgggcatatgatgaaccgcggaggaatgagtggcagaggtagctttgcgcctgggggcgcctcacggggacacccaattccgcacggaggcatgcaaggaggctttggtggccagtcccggggttctcgcccttccgacgctcgattcacacgtcggtattag

SEQ ID NO: 204280 - DNA, 2244 bp, synthetic construct
  misc_feature 1..2244: note = Description of Artificial Sequence: Synthetic coding sequence
  source 1..2244: mol_type = other DNA
atgaaggagctgcccgagcagctgcaggagcacgccatcgaggacaaagagaccatcaataaccttgacactagctcttcagattttacaattcttcaggagatcgaagagccctctcttgaacccgaaaatgaaaagatactggatatccttggtgagacctgcaagtctgaacctgtgaaagaggaatcttccgaactggaacagccctttgcgcaagatacttcctccgtgggaccggatcgcaaactggccgaagaggaggatctgttcgattcagctcatcctgaagagggcgacctggacctggcctcagaatccaccgcccatgcccagagcagtaaggccgattctctgcttgccgtcgtgaagcgcgagccagccgagcagccaggggacggggagaggactgattgtgagcccgtgggcctcgagccggctgttgaacagtcttcggccgcgtccgaactggctgaagcctccagcgaagaactggcagaggctcccacagaggcaccttctcctgaagctcgggacagcaaagaggacgggcgaaagttcgattttgacgcatgcaatgaggtcccgccagctcctaaggaaagcagcacaagcgagggagcggaccagaagatgagctcccctgaggacgactcagacaccaagagattgtccaaagaggagaaggggaggtccagctgcggacggaacttttgggtctccgggctgagtagcactaccagggccaccgatctcaaaaacttgttttcaaagtatgggaaagttgttggagctaaggtcgtgactaacgcaagatcacccggtgccaggtgctatggttttgtcaccatgtctaccgcagaagaagcaactaagtgcatcaatcacctgcataaaaccgagctgcacggcaagatgatttcagttgagaaggccaagaacgaaccagtgggaaaaaaaacgtcagacaaaagggactccgatggcaagaaagagaagtccagtaacagcgatcgcagcacaaatctcaaaagggacgataagtgcgacaggaaggacgatgccaagaagggcgacgacgggtctggcgagaagagcaaagaccaggatgaccaaaaacccgggccgtcagagcgctctcgggcaacgaagagcggctctaggggcacagagcgcactgttgtcatggataagtctaaaggagttccagtcataagcgtcaagacaagcggttcaaaggagcgcgccagcaaaagccaagataggaagagcgcctccagagaaaaaaggtctgttgtgagtttcgacaaagtcaaagagcctcggaaatcacgcgattccgagtcccactcccgagtgcgtgagcgaagcgagagggagcagcggatgcaggcacagtgggaacgggaagaaagagagaggctcgagatcgctagagagcggttggcattccagaggcagaggttggagcgcgagaggatggagcgggagaggctggaacgggaaagaatgcacgtggaacatgaaagacggcgggaacaggagagaattcacagagaacgagaggagcttcgacgacaacaagaacttcggtacgaacaggagcgacgccctgccgttcgcaggccctatgatttggacaggagggatgacgcttattggccggaggccaagcgggcggcgctggacgagaggtaccacagtgacttcaacagacaggaccggttccacgatttcgaccatagggatcgtggcagataccccgaccactcggttgacaggcgagaagggagccgcagtatgatgggggagagggagggtcaacattatcctgaaaggcacggtggtcctgaaaggcacgggcgggattctagggatgggtggggcggatatgggagcgataaacgcatgagcgaaggccgcggcctcccccctccaccgagaggacgacgggattggggagaccatggacgacgcgaagacgatcggagctggcagggtaccgcagacggaggtatgatggacagagatcacaaacgctggcaaggtggcgagcgttcgatgagtggtcatagtgggccaggacacatgatgaaccgaggaggcatgtccggccggggcagctttgcccccgggggagctagtagagggcacccaatcccacacggcggcatgcagggtgggtttgggggacaatctcggggctcccggccctctgacgctcgttttacgcgtaggtactag

SEQ ID NO: 204281 - DNA, 2547 bp, synthetic construct
  misc_feature 1..2547: note = Description of Artificial Sequence: Synthetic coding sequence
  source 1..2547: mol_type = other DNA
atggccgagaccctgagcggcctgggcgacagcggcgccgccggcgcggctgcactcagctctgcatcctctgagaccgggacccggagactgtcagacctcagggtgattgatctgcgcgccgaactcaggaaaaggaacgtggactcatctgggaataagagcgtgctgatggaaagactcaagaaggctatagaagacgagggcgggaaccctgacgagatcgaaatcacctcagagggcaataaaaaaacctccaagcgctccagcaaagggcgaaaaccagaggaggaaggcgtggaggataacggtcttgaagagaatagcggcgatgggcagatcgaggataaggaaaccatcaataatctggacacatcatcctccgactttaccatcctccaggagatcgaagaaccctcactcgaacctgagaatgaaaaaattctggatatacttggggaaacttgtaaaagcgagcccgtgaaggaagagagctccgaattggagcagccattcgcccaggataccagctccgtggggccagaccggaaacttgcagaagaagaagatctgtttgacagcgcacatccagaagaaggggatctggacctggccagcgagagcaccgcccatgcacagtcatctaaagcagatagcttgctcgcggtcgttaaacgagagcctgccgaacaaccaggggatggggaaagaaccgactgcgaacctgttggactggagcctgcagtagagcagtcatccgccgcatcagagctcgccgaagcctcttcggaagaactggccgaggccccaacagaggccccctctccagaggcgcgtgacagtaaagaggatgggaggaagtttgactttgatgcttgcaacgaggtgcccccagccccgaaagagtccagcacatcagagggggcagatcagaagatgtccagtccggaggatgattctgacactaaacggttgagtaaagaagaaaagggtcggagctcctgtggaagaaatttttgggtgtctgggttgtcatcgacaacaagagccaccgatctgaaaaacctgttttctaaatacggcaaggtggtgggcgcgaaggtggtgaccaacgcacggtctccaggggctagatgttacggattcgtgacgatgtcaacggccgaggaggccactaagtgcattaaccacctccataaaacagagctgcatggtaagatgatatccgtggaaaaagccaaaaacgagccagtaggcaagaagacatccgacaagcgagactccgacggcaagaaggaaaagtccagcaattctgaccggagcactaaccttaaaagagatgataaatgcgatagaaaagacgacgccaagaaaggcgacgacggatcaggcgaaaagagcaaagaccaggacgaccagaagcctggcccctcagagagatccagggccacaaaaagcggctcacgtggaacagaaaggactgtggtgatggataagagcaaaggggttcctgttatcagtgtcaagaccagcggctccaaggaacgagctagcaaaagccaggataggaagagcgcatcccgcgaaaaaagatctgtggtttcatttgacaaggtgaaggagccccgcaagagccgcgactctgagagccatagtagggtcagggagcggtcggaaagagaacagcggatgcaggcccagtgggagcgggaggagcgcgaacgtctggaaatcgcaagggaaaggctagcattccaacgacagagactggaacgggagcggatggagcgcgaacggctcgagcgagagagaatgcacgtcgaacacgaacgccgcagggaacaggaaagaattcatcgggagagagaggaactaaggcgccagcaggagcttaggtacgagcaggagaggagaccagccgtgagacgtccttatgatctggatcggagggatgacgcatactggccagaggccaagagggctgctctcgacgagcgttatcacagcgacttcaaccggcaggaccggttccacgacttcgaccaccgggaccgggggcggtatccagatcactccgtggaccggagagagggaagccgctccatgatgggcgaacgagaggggcagcactaccctgagagacacggaggtccagaaaggcatggccgggacagccgtgatggctggggggggtacgggagtgacaagcgaatgtcagagggtcgggggttgcctcctccccctcgaggacggcgggattggggggatcatgggcgtcgcgaggacgatagaagctggcagggcactgcagacggcgggatgatggacagggaccacaagagatggcaaggcggagaacggtccatgagcgggcattctggccccggccacatgatgaataggggagggatgtcagggcgaggatcttttgcccccggcggtgcctctcggggccacccaatacctcatggcggaatgcagggcggctttggagggcagtcgcgcggcagccggccttccgatgccaggtttactcggagatactag

SEQ ID NO: 204282 - DNA, 2280 bp, synthetic construct
  misc_feature 1..2280: note = Description of Artificial Sequence: Synthetic coding sequence
  source 1..2280: mol_type = other DNA
atgaaggtggtgatcctgaccaagctgaagctgcccccccgggagacgcgcaaacaccagagagggctggcaaaaattgaggataaggaaacaattaacaacttggatacctctagcagtgacttcacaatacttcaggagattgaggagcccagcctggagcccgaaaatgagaagatcctcgacattctgggagagacatgcaagtccgaacccgtgaaggaggagtcctccgagcttgagcaaccctttgcacaggatacatcttcagtaggacccgatcgcaagctggccgaggaggaagaccttttcgattcggctcaccccgaggaaggtgacctggacctcgcctcggaaagcaccgcccatgcccagtcgtcaaaggccgattcattacttgccgtggtgaagcgggagcctgcagaacaacccggagacggcgagcgcacagattgcgagcccgttggactggaacctgcggtggagcagtcctcggcagcctccgaactggcggaggcctcttctgaggaactagcggaggcaccgactgaagccccatcaccagaagcaagagactctaaggaggatggcagaaaattcgactttgacgcctgcaacgaggtccccccggctccgaaagaaagttcaacttccgaaggagccgaccagaagatgtcatcccccgaggatgactctgatacaaagcggctgagcaaggaggagaaaggtcgttccagctgcggtcggaacttctgggtgtccggcttaagcagtaccactagagccactgatctgaagaacctgttctccaaatatgggaaagtagttggtgcaaaagtggtgacaaacgcccggagccctggagcacgctgctacgggtttgtgactatgtctactgccgaagaagcaaccaagtgtatcaatcacctccacaagactgaactgcacggaaaaatgatctccgtggaaaaggccaaaaacgagcccgtgggtaagaagaccagtgacaaaagggattctgacggcaaaaaagagaagagcagtaactccgaccggagcactaatctcaaacgcgatgataagtgtgataggaaggacgatgcgaagaaaggcgacgatggcagcggagagaagtccaaggatcaagatgatcagaaaccggggccctccgagcgctcacgggcaaccaagagcggatctagaggaacagagaggaccgtggtgatggacaaaagtaagggggtgcccgtcataagcgtgaagactagcgggtcaaaagagagggcaagtaaatctcaagacagaaagtccgctagcagagaaaagagaagtgtggtgtcttttgataaggtcaaagaaccacgtaagtcacgtgattctgagtcacatcgggtaagagagcgatccgaacgtgagcagagaatgcaggcccagtgggagcgcgaagaaagggagagattggagattgcccgggagcgccttgctttccagagacagaggctggaaagagaaagaatggaacgtgagaggctcgaacgcgagaggatgcacgtggagcacgagagacgacgggagcaggagcggattcaccgtgagagagaggaactccggaggcagcaggaacttcgctatgaacaggaaaggcgaccagcggtgaggagaccctatgatttagatcggcgcgatgacgcctattggcccgaggctaagagggcggctctcgacgaaagatatcattctgatttcaaccgccaggaccgctttcacgacttcgaccacagagatcggggccgctatccggaccatagtgtagatagaagggagggaagcaggtccatgatgggcgaacgcgaaggtcagcactaccctgaacggcacggaggccccgagcgccatggccgtgattcgcgcgatggttggggtggttatggcagtgataaacgaatgagtgaggggcgaggtctgcccccaccccctcgggggcgcagggactggggcgatcacggaaggagagaagatgaccggtcatggcagggcaccgccgatggagggatgatggatagggatcacaagagatggcaaggaggcgaacgctccatgtccgggcattccggacccggccacatgatgaaccggggcggaatgtccggtagaggctccttcgccccaggaggcgcttcccgcggtcaccctatcccacatggcggtatgcagggggggtttggcgggcaaagcaggggatccagacctagcgacgcccgttttacccggagatactag

SEQ ID NO: 204283 - DNA, 2439 bp, synthetic construct
  misc_feature 1..2439: note = Description of Artificial Sequence: Synthetic coding sequence
  source 1..2439: mol_type = other DNA
atggccgagaccctgagcggcctgggcgacagcggcgccgccggcgcggctgccctctcctcagcaagttcggagacaggcacaagacgactcagcgatctgagagtgattgatttacgcgccgaactgcgcaaaaggaatgttgacagttcagggaataagtccgttctgatggaacgcttgaaaaaggctattgaagatgagggtgggaacccagacgaaatcgagattacttccgaaggcaacaagaagactagtaagaggagcagcaaagggcgcaagccggaggaggagggggtcgaagataacggactagagcccgaaaacgagaaaattttagatattctcggggaaacatgtaagagtgagcctgtgaaagaggagtcctcggaactggaacagcctttcgcacaggatacctcttctgtggggcccgacaggaagctggccgaggaggaggatctgtttgattctgcacatcccgaagagggggatttagatctagcgagtgagtctacagcccatgctcagtcaagcaaggccgacagtctgttggcggtcgtgaaaagagaacccgcagagcagcctggcgatggtgagcgaacagattgtgaacctgtggggcttgagccagccgtggagcaatcatctgcagccagcgaactggcagaggcatcctcggaagagttagccgaggcacctaccgaggcccccagtcctgaagccagggatagcaaagaagatggcagaaaatttgacttcgatgcatgtaacgaggtccctcccgcacctaaagagtcaagcacaagcgagggagcagaccagaagatgagtagtcccgaggacgattccgacacaaagcgtttgtcaaaggaagagaaagggcgtagctcttgtggaaggaacttctgggttagtggtttgtcctccactactagggccacggatcttaaaaacctgttctccaaatatggaaaggtggtcggagccaaagttgttacaaatgctcggagcccaggagccaggtgttacggtttcgtaacgatgtcaacggctgaggaagcaacaaaatgtattaatcacctccataagacggaacttcacgggaaaatgataagcgtggagaaggctaaaaatgaaccagtcggaaagaagacttccgataagcgcgatagcgatggcaagaaggaaaaatcatcaaatagcgaccggagcaccaacttgaagagagacgataaatgcgataggaaggatgacgccaagaagggtgacgacgggtcaggcgagaagtccaaagaccaggatgaccaaaaacctgggccaagcgaacgcagtcgagccacgaagtctgggtctagaggaaccgagagaactgtggttatggacaagtccaagggcgtgccagttatctccgtgaagacgtcagggagtaaggagcgcgccagcaaatctcaggaccgaaaaagcgcctcaagggagaagcgatctgtggtctcattcgacaaggtgaaagagccgaggaagtctcgcgacagtgaaagccactcgcgggtgcgtgagcgctccgaacgggagcagcgcatgcaagcccagtgggaacgggaggaacgggagcgcctggagattgctcgcgagagactcgccttccagagacagcgattggagagggaaagaatggaaagggaacgattagaacgggaaaggatgcacgtggaacatgagcggagacgggagcaggaacggattcatcgggaacgcgaggagcttcgacgtcagcaggagctgcggtatgaacaggaacggagacccgccgtgagaaggccttatgacctggaccgtcgagatgacgcctactggcctgaagcgaaacgggctgcattagatgaaaggtaccatagcgatttcaatcgccaagaccgtttccatgatttcgaccaccgggaccggggaaggtaccccgatcactcagtggaccgcagagagggatctcgcagcatgatgggggagcgtgaaggacagcactatcccgagcggcacggtgggccagaacgacacggtcgcgactctcgggacgggtggggcggatacggatcagacaagagaatgtctgaaggtaggggactgccacctccccctagaggcagacgagattggggagaccatggaagaagagaggacgacagatcctggcagggaactgctgatggagggatgatggacagggaccacaagcgctggcagggcggcgagcgtagtatgtccggtcactcaggccccggccacatgatgaatagaggggggatgagcggaagagggtcctttgcccccggcggagcatcccgcggccatcctatcccccacggtggaatgcagggcggtttcggaggacaaagtaggggcagtcgaccctcagatgcgcgctttaccaggcggtattag

SEQ ID NO: 204284 - DNA, 2862 bp, synthetic construct
  misc_feature 1..2862: note = Description of Artificial Sequence: Synthetic coding sequence
  source 1..2862: mol_type = other DNA
atggccgagaccctgcccggcagcggcgacagcggccccggcaccgcctccctggggcccggcgtggcggaaaccggtactaggaggctgagcgagctgcgtgtgatcgacctgcgagcggagctgaagaagcggaacctggacaccgggggtaacaagagtgtgctgatggaaaggctaaagaaggcagtcaaagaggaagggcaggacccggacgaaattggaattgagctcgaggctacctctaaaaagtcagccaagcgctgcgtgaagggcctaaaaatggaggaagaaggcaccgaagataatggcctagaagacgactcaagggacggccaggaagatatggaggctagtttggaaaatctgcagaacatggggatgatggacatgtctgtgctggacgagactgaggtagccaatagttcagccccagacttcggcgaagatggaactgatggcctgcttgactctttctgcgatagcaaagaatacgttgcagcacagctgcggcagcttcccgcacagccccctgaacacgccgtggacggggaggggtttaaaaatactctcgaaacgtcatccctgaatttcaaggtgactcccgatatcgaagagtcactcttggagcctgaaaacgaaaagatcctggacattctgggagagacatgtaagtcggagccagtgaaggaagaatcctcagaactcgaacagccctttgcccaggacacgagttccgtcggccctgaccggaaattggccgaggaagaggaccttttcgacagtgctcatcccgaggagggagacttggatttagcaagcgaatccaccgctcatgcccagagtagtaaagccgactctttgctcgccgtcgtcaaacgcgagcctgctgaacagccaggcgacggggaacggactgactgcgagcctgtgggcctggagcccgccgtggagcagtcttctgcggcctctgaattagccgaggcttcctctgaagaactggccgaggccccaacagaggcaccctcaccagaagcaagggattctaaggaggacgggaggaaatttgacttcgacgcatgtaacgaagtccctcccgcccctaaggagagcagtacgtcagaaggggcggatcagaagatgagctcgttcaaagaagaaaaggacatcaagcccatcattaaagacgagaagggcagagtcgggagtggctccgggaggaacctatgggtcagcggactctcgtccaccaccagagctaccgatctgaaaaatctattcagcaagtatgggaaagtggtgggggcaaaagtagtcactaatgctagatcgcctggtgcacgctgctatggctttgtaaccatgagcacgtcggatgaagctacgaagtgcattagccacctgcaccgtacagagctgcacgggcgaatgattagcgtcgaaaaagccaagaacgaaccagccggtaagaagctttctgaccggaaggaatgtgaggttaaaaaagaaaagctcagttccgtagatagacatcactcagtggaaattaaaatagagaaaacagtgattaaaaaagaggaaaaaatcgaaaaaaaggaggagaagaagcccgaggatatcaagaaggaagaaaaagatcaggacgaactcaaaccaggcccaaccaaccggtcccgcgtcactaagtcgggttctcgtggaatggagcggactgtggtcatggacaaaagcaagggagaacccgtcatctccgtcaaaacgacctcgagaagcaaagaacgatcgtccaagtcccaggacagaaaatccgagtctaaagagaagcgggacattctcagttttgacaagataaaagagcagagggagcgggagagacagagacagcgggagcgagagatccgagaaactgagcgacggagagaacgagaacaaagagagcgggagcagaggcttgaggccttccacgagcggaaggaaaaagccaggctacaaagagagcggttacagcttgagtgtcagcgccagcggctggagagagaaaggatggagagagaaagactcgagcgggagcggatgcgagtggagcgcgaaagaagaaaggaacaagaaagaatccaccgagagagagaagagttgcgaagacaacaggagcaacttaggtacgaacaggaacgccgacccgggcgccggccctacgacctcgacaggcgggatgacgcttactggccagaggggaaaagggtagctatggaggatcgttaccgcgctgactttcctagacctgaccatcggttccatgacttcgatcacagagaccggggtcagtatcaggatcacgctatcgacaggagggaggggtctcgtccaatgatgggggatcacagggatgggcaacactacggggacgatcgccatggacatggtgggcccccagagagacacggacgggatagccgtgacggctgggggggctacgggagcgacaaaagacttagcgaagggcgaggactacctccaccccctaggggtggccgggactggggtgagcacaaccagaggctcgaagagcaccaagctcgcgcctggcagggcgctatggacgctggggccgcttctcgggaacacgctagatggcagggcggcgagcgcgggctgagtgggcctagcgggccaggacatatggcctctcgcggaggagtcgccggacggggtggtttcgcacagggcggccatagccagggccacgttgtcccaggcggcgggctggagggtggaggtgttgcaagccaggatagagggtctagggttccgcatccacaccctcatcccccaccataccctcatttcacccgacggtactag

SEQ ID NO: 204285 - DNA, 1533 bp, synthetic construct
  misc_feature 1..1533: note = Description of Artificial Sequence: Synthetic coding sequence
  source 1..1533: mol_type = other DNA
atggccgagaccctgcccggcagcggcgacagcggccccggcaccgcttctctcggcccaggtgtggcagagaccggaacccggaggctgagtgagctgagggttatcgacctgcgtgcggagttaaaaaagaggaatcttgacacaggaggtaacaagtcagttctgatggaacgactgaagaaggctgttaaagaagaaggacaagacccagatgagataggcatagaacttgaggcgacttcaaaaaaaagcgccaagagatgcgtgaagggccttaagatggaggaggaaggcacggaggacaatgggctggaagacgactcacgcgacggccaggaggacatggaggcttcccttgagaatctgcaaaacatgggcatgatggatatgtccgtgctggacgaaacagaggtagccaattcctctgctcccgatttcggcgaagacggtactgacgggttgttagactctttttgtgacagcaaggaatatgtggccgctcaactcagacagctcccagcccagccccctgagcacgccgtgggcaacctggagaccaggcaagatgtcccgacgtcttcctcactgagagtgagcgtggcggcggtgccagtgccacacctgtctgtcgagaacgagaaaatcctggatattctgggcgaaacctgtaagtccgagcctgtgaaagaagagagtagcgaactcgaacagccatttgcccaggacacatcctcagtcggcccggaccgtaaactggccgaggaggaggatctatttgactcggcccacccagaagagggggatctggacctcgcatctgagtccaccgcgcacgcacagagctctaaagcagactctttgctagcagtggtaaagcgcgaaccggctgagcaacctggagatggagaaagaactgactgtgaacccgtggggctggagcctgccgtggagcagagttccgcagcctctgagctggcggaggctagctcagaggagttggcagaagccccgactgaggctcccagcccagaggcccgtgactcgaaagaggacgggaggaaatttgattttgacgcatgcaacgaagtgccacccgcccctaaagagtcctctaccagtgagggggctgaccagaagatgtcttcatttaaggaagagaaagatattaagcctattattaaggatgagaaaggacgtgtgggctcgggttccggccgcaacttgtgggtttctggcctgtcatccaccacaagggccaccgacctgaaaaatctgttcagcaagtacggcaaagtggtcggagctaaagttgtgacgaacgctcggtcgcctggagcgaggtgttatggctttgtcaccatgagtaccagtgatgaggccacaaaatgtatatctcatctccacagaactgaactccatggtaggatgatttccgtcgaaaaagccaagaatgaacccgccgggaaaaaactctccgaccgcaaggaatgcgaagtgaagaaagagaaactgtcatctgtggatagatag

SEQ ID NO: 204286 - DNA, 786 bp, synthetic construct
  misc_feature 1..786: note = Description of Artificial Sequence: Synthetic coding sequence
  source 1..786: mol_type = other DNA
atggccgagaccctgcccggcagcggcgacagcggccccggcaccgccagcctgggccctggagtggctgaaaccggcacgaggcggttgagtgagttgagggttattgatctcagagcagaacttaagaagcgaaacttggacactggggggaacaaaagtgtcctgatggaaaggttgaaaaaggctgtgaaggaggaaggtcaagatccagatgagatcgggatagaactggaagcaacatcaaaaaaaagcgccaagcgttgtgtgaaagctccttcccctgaggcacgggactctaaagaagacgggcgcaagttcgacttcgacgcctgcaatgaggtcccccccgctcccaaagaatcaagtaccagtgaaggagccgaccagaaaatgtcttcattcaaagaagagaaggatatcaaacccataataaaagacgaaaaggggcgcgtcggctccgggagcgggcgtaacctctgggtgtctggactgtcttctacaacgagagccaccgacttgaaaaatcttttcagcaaatacggaaaggtggttggggcaaaagtggttactaatgctaggagtccaggcgccagatgttatgggtttgtcacaatgtctactagcgatgaagcgacaaaatgcattagtcacctgcaccgaacagagctccatggcagaatgatcagtgtggaaaaggcgaaaaacgaacccgctggcaagaagctgagcgatcgcaaagagtgcgaggtaaagaaggaaaagctgtcaagtgtcgatagatag

SEQ ID NO: 204287 - DNA, 1221 bp, synthetic construct
  misc_feature 1..1221: note = Description of Artificial Sequence: Synthetic coding sequence
  source 1..1221: mol_type = other DNA
atggccgagaccctgcccggcagcggcgacagcggccccggcaccgccagtctcggaccaggagtggcagaaactggtacgagacgcctcagcgaactaagagtaatagacctgcgggcagaactgaagaagagaaacctggatactggtggaaataaaagcgtgctcatggaaaggttaaaaaaagccgtcaaggaggagggccaggatcctgatgaaattgggatcgagttggaagcgactagtaaaaaatccgctaaaaggtgtgtcaaaggtctgaaaatggaagaagaagggaccgaggacaacggtctggaggtggaaaacgagaaaatcctcgatatcctgggagaaacttgtaaaagtgagcctgtcaaagaggagtcctcggagctggagcagcccttcgcacaggatacctcttccgtaggacctgaccggaagctggccgaggaagaggacctctttgattccgcccaccccgaagagggcgatctcgacctagcttccgagagtacagcccacgcacagagctctaaagccgatagcctgcttgctgttgttaagcgcgagccggcggagcagccaggcgatggcgaaagaacagactgcgaacccgtgggcctcgagccggcagttgagcagtccagcgctgcctcggaactggctgaggcttcgtccgaggagctggccgaagcccctacagaggctcccagccccgaggcccgagactccaaggaggatggccgcaaatttgacttcgacgcctgtaacgaggtgccacccgcacccaaggaatccagcacgagcgaaggcgctgaccagaaaatgagcagctttaaggaagagaaggacatcaagcccatcattaaagacgagaaaggcagggtggggtctgggagtgggcggaatttgtgggtatcaggtctgagctctaccacgcgagcgactgacctcaagaatctattcagcaaatacggcaaggtcgtgggggccaaggtagtaacaaacgccaggtctcctggggccaggtgctatggttttgttaccatgtccacttccgatgaggccacgaaatgtatttcccacctccacagaacggagctgcatggtcgcatgatttccgtggagaaagcaaagaatgaacccgctggtaaaaaactgtccgacaggaaagaatgcgaggtgaaaaaagagaagttgagctccgtggatcggtag

SEQ ID NO: 204288 - DNA, 606 bp, synthetic construct
  misc_feature 1..606: note = Description of Artificial Sequence: Synthetic coding sequence
  source 1..606: mol_type = other DNA
atggccgagaccggcacccggcggctgagcgagctgcgggtgatcgacctccgtgctgagctgaaaaagaggaatctggatacgggcggcaacaaaagcgtacttatggagaggttaaaaaaagcagtgaaagaggagggacaggatccagacgaaatcggcatcgaactggaggctacaagtaaaaaaagcgcgaaacgatgcgtgaagggcctgaagatggaggaagagggtaccgaagacaatggcttggaagacgattcccgagacggacaagaggacatggaagcatccctggagaacttgcagaatatggggatgatggacatgtccgtgctcgacgaaaccgaggtagctaattcttccgcaccagatttcggtgaagacggaactgacggccttctggactctttttgcgactcaaaagagtacgtagctgctcagctgcggcagctgccagcccaaccacccgagcacgctgtagacggcgaagggtttaagaacacgctggagacttcgtccctgaactttaaagtgactcccgacattgaggagtctctgttggagcctggaaccgataaaagaaatacaacagttatggtgtag

SEQ ID NO: 204289 - DNA, 1821 bp, synthetic construct
  misc_feature 1..1821: note = Description of Artificial Sequence: Synthetic coding sequence
  source 1..1821: mol_type = other DNA
atgaaggtgcggagcgccggcggcgacggcgacgccctgtgcgtgacagaggaggacctggccggtgatgacgaggacatgcctacattcccctgtactcagaagggccgccctgggccacggtgttcccggtgtcaaaaaaacctcagtctacacaccagcgttaggattctgtatctatttctagcactcctgctggtggccgtggcagttctggcttcccttgtgtttaggaaggtggatagcttgtctgaagacatttctctgacccagtccatttacgacaagaagctggtcttgatgcaaaagaacctacagggccttgacccaaaggcccttaacaattgttccttctgccatgaggcaggccagctcgggcccgagatcagaaagctacaagaggaactggaaggtatccagaaactcctcttggcacaggaagtccagctagatcagacactccaggctcaagaggtcctttccaccacctctcggcagatcagccaggaaatgggctcatgctcgttcagtatacaccaggtgaaccagagcctcggactctttctggcacaggtgaggggctggcaagccaccaccgcgggattggacctttctttaaaagatctgactcaggagtgttatgatgtgaaggccgccgttcaccaaattaactttactgtgggccaaacttcagagtggatccacggaattcaacggaagaccgacgaggagacgctgaccctgcagaaaattgtgaccgattggcaaaactacacacgcctcttcagcggcctccgcacgacttctacaaaaacaggcgaagcggtaaaaaacatccaggccacattgggcgcatcctctcagagaattagccagaacagcgaatcgatgcacgacctcgtgcttcaagtgatgggcttacagctccagctagacaatatttcgagtttcttggatgaccatgaggaaaatatgcacgatctccagtaccacacacactacgctcaaaataggaccgtagagcgtttcgaaagtctggaaggcagaatggccagccatgagatcgaaatagggaccatctttacgaatatcaacgcaactgacaaccacgtccattcgatgttgaagtatttggacgacgtgagacttagctgtacactcggcttccatacccacgcagaagagctttattatcttaataagagcgtttcaataatgctgggcacaacagacctgctgcgagaaagattttcactgctgtctgctcggcttgatttgaatgtgagaaacttgtccatgattgttgaggaaatgaaggctgtagatactcagcacggtgaaatactccgcaatgtcactatcctgaggggcgctcccggcccaccggggcccagaggctttaaaggagacatgggggtcaaagggcccgttgggggacggggacccaaaggcgacccgggctctctcggccccctgggaccgcagggtccgcaaggccagcccggggaagctggtcccgtcggcgagcgcgggccagtgggcccccgtggctttcctgggctgaaggggtccaaagggtcattcggtaccggagggcctcgcggacagccaggccctaagggcgacattggtccacctggcccagaaggcccccctggctcccctgggccaagtggtccccaggggaaaccaggaatcgccggcaaaacaggttcaccaggccaacgcggcgccatgggaccaaagggcgagcccggcatccagggaccccccggattgcccgggcctccgggcccacccggctcccagagcttttattag

SEQ ID NO: 204290 - DNA, 1401 bp, synthetic construct
  misc_feature 1..1401: note = Description of Artificial Sequence: Synthetic coding sequence
  source 1..1401: mol_type = other DNA
atgaaggtgcggagcgccggcggcgacggcgacgccctgtgcgtgacggaggaagacttagctggcgacgacgaggatatgcctaccttcccctgcacccaaaagggtcgaccaggcccacgatgcagcagatgccagaaaaacctgtctctccacacatccgtgcggattttgtacttgtttctcgcactgttactggtcgctgttgccgtcctggcctcacttgtattcaggaaagtggattctcttagtgaagacatctcgttgactcaaagtatttacgacaaaaagctagtattaatgcagaagaatctgcagggccttgaccccaaggctctgaataattgttccttttgtcatgaagctggccagcttgggccagagatcagaaaactgcaggaggaactcgagggaatccagaaactgttgctggcccaagaggttcagctcgaccagaccctgcaggcccaagaggtgctgtccaccacctctcgccaaatttctcaggagatgggtagctgttcgttctctatccatcaggttaatcagtctctagggctgttcctggcccaggtgaggggctggcaggcaactacagcgggactcgacctgtccttaaaagatttgactcaagaatgttacgacgtgaaagctgctgtccaccaaatcaacttcaccgtggggcagacaagcgaatggatacatgggatccaacgcaaaactgatgaagaaaccctgaccttgcaaaagattgttacagactggcaaaactatacccgcctgttctcaggtcttcggaccaccagcaccaagaccggcgaagcagtgaagaacattcaggccacattgggtgcctccagtcagcggatttcgcaaaattccgagagcatgcacgatttagtgctgcaagtgatgggcctgcaactgcagcttgacaatattagcagtttcctggacgaccacgaagagaacatgcatgacctgcagtatcacacccattatgctcaaaatagaaccgtagagcgctttgaatccctcgaggggaggatggcctcccatgagatcgaaatcgggaccatcttcactaatatcaacgcaaccgataaccatgttcacagcatgttaaaatacctggatgacgtgcgcctgagctgtacactgggttttcatacccatgcggaagagctgtactacctgaataaatcggtcagcattatgctgggcaccactgatctcctgagggagagattctccctcctcagtgcaaggctggacctgaatgtcaggaacctgtccatgatagtggaagagatgaaggctgtggatacccagcatggcgagatcctgcggaacgtgacaattctgcgaggacacacactattcagccataatcgaatatag

SEQ ID NO: 204291 - DNA, 1008 bp, synthetic construct
  misc_feature 1..1008: note = Description of Artificial Sequence: Synthetic coding sequence
  source 1..1008: mol_type = other DNA
atgggccggtgctgcttctacaccgccggcaccctgagcctgctgctgttggtgacatccgtgacattgttggtcgcaagggtttttcaaaaggcagtggaccagtccatcgagaaaaaaattgtgctgaggaacggaactgaggcgttcgactcttgggagaaaccacctctgccagtctacacacagttttacttctttaacgtgaccaaccctgaggaaatcttgagaggagaaacaccaagggtggaggaggtggggccatacacatataggagtctggactggtggattactgacaagtgtaacatgataaatggcacagacggagattcgttccatccactcatcaccaaggatgaggtcctctatgtctttccgagcgatttctgccggagcgtttacattactttctcagactacgagagtgtccagggtttgccggccttcaggtataaagtgcccgccgaaattctggcgaatacctcagataacgcaggattctgcatccccgagggcaattgcctcgggagtggggtcctgaacgtgtctatctgcaaaaatggggcccccatcatcatgagctttcctcacttctatcaagcagacgagcgcttcgtctctgccattgaggggatgcatcccaaccaggaagatcacgaaactttcgtagacatcaacccacttacagggattattctaaaggctgccaagcggttccagattaatatctatgtgaaaaagctagatgactttgtggaaacaggggatattcggaccatggtgttcccagtgatgtacttaaacgaatccgtccacattgataaagagactgcgtctcgactgaagtctatgatcaatacaaccctgattattacaaatattccctatataatcatggcactgggagtgttttttgggctggtgttcacctggttggcttgcaaaggtcagggcagtatggacgagggaacagccgatgagagggctcctctgatcaggacctag

SEQ ID NO: 204292 - DNA, 1530 bp, synthetic construct
  misc_feature 1..1530: note = Description of Artificial Sequence: Synthetic coding sequence
  source 1..1530: mol_type = other DNA
atgggctgcagcgccaaggcccggtgggccgccggcgccctgggcgtggcaggtttgctctgtgctgtgctgggggctgtgatgatagttatggtcccctccctcattaagcagcaggtcctgaaaaacgtgcgaatcgacccttcgtctctgtccttcaacatgtggaaagaaatccccattccattttacctgtcagtttacttttttgacgtgatgaatccctctgagatcctgaaaggcgaaaagccacaggtgcgagagcgcgggccgtacgtttacagagagtttcgtcataagtctaatattacatttaacaacaacgatactgtctcctttttggaatatcgaaccttccagttccaaccatctaagtcgcatggttcggagtcagactacattgtgatgcccaatattctggtcctcggcgccgccgttatgatggagaataagcccatgacgctgaaattaatcatgaccctcgccttcaccacgcttggcgagagggcctttatgaatagaaccgtgggtgaaatcatgtggggttacaaggatcccctggtcaacctgatcaacaagtacttccccggtatgtttcccttcaaagataaattcggcctgtttgccgagctaaacaacagtgacagtggtttatttaccgtgttcaccggcgtgcaaaacatctcccggatccatttggtggataagtggaacgggctgagcaaggtcgatttttggcatagcgaccagtgcaatatgattaatggtacgagtggccagatgtggccaccatttatgacgccagagtctagtcttgaattctactctcccgaggcatgtagatcaatgaagctgatgtacaaggagagtggcgttttcgaaggcattccaacttaccggtttgtggcgccaaagacactgttcgccaacggctccatttatcctcccaacgaaggcttctgtccctgtctggagtctggaatccagaacgtgagcacttgtcgattttcagcaccactgtttctcagccatcctcactttcttaatgccgaccccgtcctcgccgaggcggttacgggcttgcatcctaaccaggaagcccattcactgttcctggatattcaccctgtaaccggtattcctatgaattgctctgttaaattgcaattgtctctttatatgaagtcagtagcaggtatcggacaaacaggcaagatcgagccggtggtccttcccctgctctggtttgctgagagtggtgccatggagggagagactctgcacacattctacacccagcttgtcctcatgcctaaggtgatgcattacgcccaatatgtcctgctcgcgctggggtgcgtgctgctcctggtgccagtcatttgtcagatcaggtcccaggagaaatgttatcttttttggagcagctctaaaaaggggtctaaggacaaagaggccattcaggcatactcagagtctctgatgacaagcgcgcccaaagggagcgtcctgcaagaggcaaaactgtag

SEQ ID NO: 204293 - DNA, 1521 bp, synthetic construct
  misc_feature 1..1521: note = Description of Artificial Sequence: Synthetic coding sequence
  source 1..1521: mol_type = other DNA
atgggctgcagcgccaaggcccggtgggccgccggcgccctgggcgtggccggccttctctgcgccgttctgggcgccgttatgatcgtgatggtgccgtctctgattaaacagcaggtcctcaagaacgtccggatcgatccatccagcctcagctttaacatgtggaaggagatccccatccccttttatctgtccgtgtatttcttcgacgtgatgaatccctccgagatcttgaaaggcgaaaaaccccaagtgcgtgaacgggggccatatgtctaccgagagtttcggcataagtccaacatcacttttaacaataatgatacggtgtcattcctggagtacaggacattccagttccagcctagtaagagccacgggagcgaatctgactatattgttatgccgaatatactcgttcttggcgctgctgtaatgatggaaaacaaaccaatgacgcttaaattgataatgacacttgctttcactaccctcggagagagggccttcatgaaccgcacggtcggcgaaataatgtggggttacaaggaccccctggtcaaccttattaataaatattttccaggaatgtttcctttcaaggacaagttcggcctttttgctgagctgaacaattctgatagcgggctcttcacagtgttcactggagtccagaatatttcaaggatccatctggttgataagtggaatggactgtctaaggtcgatttttggcattcagaccaatgtaatatgataaatgggacctccgggcagatgtggccgccattcatgaccccagagagctccctggagttttattccccagaggcctgtaggtcaatgaagttaatgtataaggagtctggggtctttgaaggtatccccacgtacaggtttgttgcccccaaaacgctgtttgcaaatgggagcatctaccctccaaatgaggggttttgtccttgtctggaaagtggcatccagaacgtgagcacctgcaggttctccgctcctctgttcctatcgcatccgcattttctcaatgcggatccagtcttggccgaggccgttactggcctgcacccaaatcaggaggcgcatagcctgttcctggatattcatccagtaaccggaatacctatgaactgcagcgtgaagctccagctctctctttatatgaagagcgtggcaggcatcggacagacaggaaagattgagcccgtggtgctccctctgctttggtttgcagagtcaggcgcaatggaaggtgagaccttacacactttctacacgcagctggtgctcatgcccaaggtgatgcattatgctcagtacgtcctattagccttaggttgtgtgctgctcctggtccccgtaatttgtcagattcgctcgcaggggccagaggacacggtgtctcagccaggtctggccgcaggaccggaccggccgccatctccctatactccactgctgccagacagtccgagcggccagccaccctcccccacagcctag

SEQ ID NO: 204294 - DNA, 1230 bp, synthetic construct
  misc_feature 1..1230: note = Description of Artificial Sequence: Synthetic coding sequence
  source 1..1230: mol_type = other DNA
atgggctgcagcgccaaggcccggtgggccgccggcgccctgggcgtggctgggctgctctgcgccgttttgggcgctgtgatgatcgtgatggtcccctctctgatcaagcagcaggtactgaagggagccgccgtcatgatggagaacaagcccatgacattaaagctaataatgactctcgccttcaccacacttggtgagagagccttcatgaacaggacggtgggagaaatcatgtggggttacaaagaccccttggtcaacttgatcaataaatattttccagggatgtttccttttaaagacaagttcggactcttcgctgagctcaataattcggattccggcttatttacagtgtttacaggcgttcagaacatttcccggatccatctggtggataagtggaatgggctgagtaaggtggacttctggcactctgaccagtgcaacatgattaatggaacgagcgggcagatgtggccaccattcatgacccctgagagcagccttgaattctacagtccagaggcctgccggtctatgaagctgatgtacaaggaatctggcgtatttgagggaattcccacttacaggtttgtcgcacccaaaaccttgtttgcaaacggttctatttacccccctaatgagggtttttgcccctgtcttgagtccggtattcagaacgtgtccacatgtcggttcagcgctccgcttttcttatcacacccccacttcctgaatgccgacccagttctggccgaggccgtgaccggcctgcatcccaaccaagaagcgcatagcctgtttcttgacatccaccctgtaacagggatccctatgaattgctcagtgaaactgcagctcagcctctatatgaagagtgttgctgggattggccagaccggaaaaattgagcctgttgtgctccccttattatggttcgcagagtccggcgccatggaaggcgaaactctgcataccttttatacccaattggtcttgatgcccaaagtcatgcattatgcgcaatatgttttgctggcacttggctgtgttctactgttggtgccagtaatctgtcagattcgctcacaggaaaaatgctatctcttctggagttcctcaaagaagggatctaaggataaagaagctatccaggcgtattccgaatccttgatgacatccgcaccaaagggatcagtgctgcaggaagccaagttatag

SEQ ID NO: 204295 - DNA, 1659 bp, synthetic construct
  misc_feature 1..1659: note = Description of Artificial Sequence: Synthetic coding sequence
  source 1..1659: mol_type = other DNA
atgggctgcagcgccaaggcccggtgggccgccggcgccctgggcgtggctggcctcctttgcgctgtccttggagcagttatgatcgtgatggtgccaagcctgattaagcagcaggtattgaagaatgttcggattgatccctcaagcctctcctttaacatgtggaaagaaatccccataccgttctatctgtcagtgtatttctttgatgtcatgaatccaagtgagatcttaaagggagagaaaccccaggtccgcgaacgtgggccttacgtgtacagagagttcagacacaaaagcaacattacattcaataacaatgacacagtgagctttctggaatatcggacctttcaatttcaacccagcaagtcccacggcagcgagagcgattacattgtcatgcccaatatccttgttctaggcgcagcagtcatgatggaaaacaaaccaatgaccctgaagctgattatgaccctggccttcacaacccttggagagcgcgcattcatgaacaggactgtcggagagatcatgtggggatacaaggaccccctggtaaaccttattaacaaatacttccccgggatgtttcccttcaaggataagttcggtctgtttgccgagcttaataattccgatagcgggttgttcacagtatttaccggggtacagaatatctcaagaatccacctggtcgacaaatggaacggcttaagtaaggtagacttttggcacagcgaccaatgcaacatgatcaacgggaccagcgggcagatgtggccacctttcatgacccccgagtcttccttggaattctactccccggaggcctgtagatccatgaagctgatgtataaagagtccggagtgtttgaaggcatcccaacatacagatttgtggccccaaaaacactattcgccaacggctcgatttatccgccaaatgagggcttttgcccatgccttgagtcaggaatccagaacgtctctacctgccgcttttccgcccctctcttcttatctcatccgcactttttgaatgccgaccccgtgctggccgaagcagtcactggcctgcatcctaatcaggaagcccattctctcttccttgacatccatcccgtaacgggtatccccatgaactgttccgtcaagctgcagctgtctttatacatgaaaagcgttgcgggcattggtcagactggcaaaatagagccagtggtgctgccactgctttggtttgcggagtcgggcgccatggagggtgagacgctgcataccttttacacccaacttgtgctaatgccaaaggtaatgcactatgcccagtacgtgctgctcgcactgggctgcgtgctcctgttggttcccgtgatttgccaaattcggtctcaagttggcgccggacagcgagccgccagagcagactctcactcgctcgcctgctggggaaaaggggccagcgacagaaccctgtggccaacagccgcttggtctccgccacccgctgctgtgctgaggttgtgcagatcaggtagcggtcactgctggggcttaaggagcacactggcatccttcgcttgccgcgtggcgaccacgttacctgtcctcgaagggctgggtccatccctgggcggaggaacggggtcctag

SEQ ID NO: 204296 - DNA, 1551 bp, synthetic construct
  misc_feature 1..1551: note = Description of Artificial Sequence: Synthetic coding sequence
  source 1..1551: mol_type = other DNA
atgtgcgccgtgggcaacgtgcggatcgaccccagcagcctgagcttcaacatgtggaaagaaattcccatacctttctacctttctgtgtactttttcgacgtgatgaatccgagtgaaatcctaaagggggagaagcctcaggtaagagaacggggcccctacgtgtatagagaattcagacacaaatccaatatcacctttaacaacaacgacacagtgagtttcttggagtatcggacttttcaattccaacccagcaaaagtcatgggagtgaatcggactacatcgtcatgccaaatatactcgtgctgggggccgccgtcatgatggagaataaacccatgactctgaagctaatcatgacgttggccttcacaacgctgggtgaaagagccttcatgaaccgaacagtcggcgagatcatgtggggatacaaagacccacttgtgaatttaatcaataaatatttccccggtatgttcccgtttaaggataaatttgggctctttgccgaattgaataattctgatagcggactgttcacagtcttcacgggcgtccagaacatctcccggatccaccttgtggataagtggaatggcttgtccaaagtcgatttttggcattcagatcagtgtaacatgattaatggcacctcagggcaaatgtggcctccatttatgacccctgagtcctctctggaattctattcgcccgaagcctgtcgaagcatgaagctaatgtataaggaaagcggagttttcgaagggatccctacgtaccggttcgtcgctccaaaaacactcttcgcgaatggttcaatctatcctccaaatgagggattttgtccatgcttggaatccggcattcagaacgtatctacctgccgcttctcagcaccgctctttctttcacatccccattttctcaacgcagaccctgtcctcgctgaagccgtgaccggcttacatccgaaccaggaggctcactcactattcctcgacattcatcccgttaccggcatccctatgaactgctccgtgaagctgcagttgagcctctacatgaagtctgtagcaggaattgggcaaaccggaaagatcgaacccgtagtgctgcccctgctatggttcgctgagtccggagcaatggaaggagaaacattacatactttctacactcagctcgtacttatgcctaaggtgatgcactatgcacagtacgtactgctcgccctcgggtgtgtgctactgctagttcccgtgatttgccagattcgatcccaggttggggcaggacagcgtgccgcccgcgcagatagccattctctagcttgttggggcaaaggggcgtccgatagaacactttggcccaccgccgcatggagtccgccgcccgctgccgtgctcaggttatgccggtctgggtctgggcattgctggggtctcaggagtactctggcttcctttgcttgtcgggtggccacgactctgcctgttctcgagggcttggggccctctctcgggggtgggacgggtggcctgtag

SEQ ID NO: 204297 - DNA, 1539 bp, synthetic construct
  misc_feature 1..1539: note = Description of Artificial Sequence: Synthetic coding sequence
  source 1..1539: mol_type = other DNA
atgaacgtgcggatcgaccccagcagcctgagcttcaacatgtggaaggagatccccattccgttctatctaagcgtgtacttctttgacgttatgaaccccagcgaaatcctgaagggggaaaaaccacaggtgcgggagagaggaccttacgtatatcgggagttccggcataaaagcaatatcacgtttaacaacaatgacaccgtctcgttcctggaatacagaacgttccagttccagccctcaaaatctcacggaagtgaaagtgactacatcgttatgcctaatatcctggtgctgggagccgccgtgatgatggagaataaacctatgaccctcaagcttattatgacactagcttttactacgctgggcgaaagagcttttatgaaccgtacagtgggggaaataatgtgggggtacaaggatccactggtcaaccttattaataaatacttcccgggtatgttcccttttaaagataaattcggacttttcgccgaactcaataattcagacagtgggctgttcacggtgtttactggagttcagaatatttctagaatccacctcgtggacaagtggaacggcctctccaaagtggacttttggcactcggaccaatgtaacatgatcaatgggacttccggacagatgtggcccccctttatgacgcccgagagctctttggagttctattctccggaggcgtgccgaagtatgaagttaatgtataaagaaagtggagtgtttgaagggattccaacctacagattcgtggcacctaagactctttttgctaacggttctatctatcctcctaacgaagggttctgtccttgtttggagagtgggatacagaatgtttcgacatgtagattctcggctccgctgtttctgtctcacccccacttcctgaatgccgatccagtgctggcagaagctgtcacaggactccatcccaatcaggaggcgcactctctcttcctcgatatccacccagtgacaggtatccccatgaattgctctgtaaaactccagctgtccctatatatgaagtccgtcgccgggattggtcaaaccggcaagattgaacctgtggttctcccactgctatggtttgcggaaagcggagccatggaaggcgagactttacatacattctacacacagttggtgctcatgcccaaggtgatgcactatgctcagtatgtgctgcttgccttagggtgcgttcttttgctggtacctgtaatctgccagattaggtcccaggttggggccggccagagagctgctcgggccgactcccattccctagcctgctggggcaaaggcgcttccgacaggaccctctggccaaccgccgcctggtccccgccgcctgccgccgtgctgcgcctgtgcagatccggttccggccactgttggggcctgagaagcaccctggccagcttcgcgtgtcgggttgccaccaccctgccagtactggaagggctgggtccgagccttggaggaggcacaggtggcctgtag

SEQ ID NO: 204298 - DNA, 441 bp, synthetic construct
  misc_feature 1..441: note = Description of Artificial Sequence: Synthetic coding sequence
  source 1..441: mol_type = other DNA
atgggctgcagcgccaaggcccggtgggccgccggcgccctgggcgtggccggtctgctgtgtgctgtgttaggagccgttatgatcgttatggtcccatcgctgatcaagcagcaagtgttgaaaaacgtccgaattgacccctcaagtttgagcttcaatatgtggaaggagatcccaataccgttttacctgtcagtctacttcttcgatgtgatgaatccctccgagatcctgaaaggggaaaagccgcaggtgagagaaagggggccctacgtgtacagggagttccgacacaaatctaacatcacatttaacaacaacgacaccgtgtcatttttggagtaccggactttccagttccaaccttccaagtcccacgggtcagaaagtgactacatagtcatgcccaacatattggtccttgttaggctcccttag

SEQ ID NO: 204299 - DNA, 1446 bp, synthetic construct
  misc_feature 1..1446: note = Description of Artificial Sequence: Synthetic coding sequence
  source 1..1446: mol_type = other DNA
atgggctgcagcgccaaggcccggtgggccgccggcgccctgggcgtggcaggacttctttgtgctgtgctaggcgccgtcatgatagtcatggtcccatctctaataaagcaacaggtgcttaagaacgtgagaattgacccaagctctctgtctttcaatatgtggaaagaaatccctatacccttttacctctctgtttacttcttcgacgtaatgaacccctccgaaatcctcaagggtgagaaacctcaggtacgagaaagaggtccttacgtgtatcgcgaattcaggcataagtctaacatcacatttaacaataacgatacagtgtctttcctggagtatcgaacttttcagttccaacctagtaagtcccacggaagcgaaagtgactacatcgtgatgcccaacatcctcgttcttggagccgcagttatgatggagaacaagccgatgaccttaaaactcatcatgactttagcatttacaaccttaggggagagggcttttatgaatagaacagtgggggagatcatgtggggatataaggatcctttagtcaacctgatcaacaagtactttccgggtatgttccctttcaaagataagttcggactcttcgctgagctcaataattctgattcaggtctctttacagttttcactggcgtccagaacattagtcggatccatcttgttgataaatggaatggcctgagtaaggtcgacttctggcactcggaccagtgtaacatgatcaacggcacctctggccagatgtggccaccctttatgactcccgaatccagtttggagttctacagccccgaggcttgtcgtagtatgaagcttatgtataaggagagtggagtttttgagggaatacctacctataggttcgtggcgcctaagacattgttcgctaatgggtccatttatccacctaatgaggggttctgcccctgtctggagtcaggaattcagaacgtctcaacctgccggttctcagcacctttattcctaagtcatccccatttcctcaacgctgatcccgttctggctgaagccgtcactggcctacaccccaatcaagaggctcacagtctcttcctggatatacatcctgtgacgggcatacccatgaattgctccgtaaagctccaactgtcactttatatgaagtcggtggcaggcatcgggcagacaggcaaaattgaaccggttgtgttacctctgttatggtttgccgagtctggtgccatggaaggcgaaaccctgcacactttctacacgcagttggtgttgatgccaaaagagaagtgttacctgttttggtccagttccaagaagggcagtaaagacaaggaagccattcaagcgtattcagaatctctaatgacctccgcccccaagggatccgtgctccaggaagccaaactgtag

SEQ ID NO: 204300 - DNA, 1437 bp, synthetic construct
  misc_feature 1..1437: note = Description of Artificial Sequence: Synthetic coding sequence
  source 1..1437: mol_type = other DNA
atgggccggtgctgcttctacaccgccggcaccctgagcctgctgctcctggtaacaagcgtaacactactggtggctagggtgtttcaaaaggctgtcgaccagtctattgagaaaaaaatcgtgctgcgtaacggcacggaggcattcgattcatgggaaaaacctcctctgcccgtctatacccagttctatttctttaacgtgacgaaccccgaggagatcctcaggggtgagactccccgagtggaggaagttggaccttacacctatagagaacttaggaataaagccaacatccagttcggcgataatggaactacgatcagtgccgtgtctaacaaagcttacgtttttgaacgcgaccagtctgtgggcgacccaaaaattgaccttattaggacccttaatatcccggtgctgactgtgattgaatggtcccaggtccatttcctaagggagatcatcgaagccatgttaaaagcttaccagcagaagctttttgtcacacacaccgtggatgagctcttgtggggctacaaggacgagattctatccttaattcatgtttttaggccagacatctcgccctatttcggcttattctatgagaagaatggcaccaacgacggcgattatgtcttcctcactggcgaggattcttacctcaatttcaccaagatcgtcgagtggaacggcaaaacctcgttggattggtggattactgacaaatgcaatatgatcaacggcaccgatggggatagcttccacccattgataaccaaagacgaagtcttgtacgtgttccccagtgatttctgtcgctcagtatacatcacgttcagcgactatgagtccgttcagggcctacctgcctttagatataaggtgcccgctgagattcttgcaaacactagtgataacgccggcttttgcatccctgaaggcaattgtctgggatctggcgtgctgaacgtcagtatatgtaagaacggcgctccaattatcatgtcgtttcctcacttctaccaggctgacgaaagattcgtcagcgcgatagaaggcatgcacccgaaccaagaggatcatgagacattcgtggacatcaaccccctgactggaatcatcctcaaagccgctaagagatttcagattaacatttacgtgaagaaacttgacgattttgtcgagactggggatatacgcaccatggtttttcccgttatgtatctgaacgagtccgtgcatattgataaagaaacagctagccggctcaagtcaatgattaacaccactttgattatcacaaacatcccctacataattatggctttaggggtgttttttggcctcgtattcacctggctcgcatgtaaaggacagggctccatggatgagggtaccgccgatgaacgagcccctctcattaggacttag

SEQ ID NO: 204301 - DNA, 1710 bp, synthetic construct
  misc_feature 1..1710: note = Description of Artificial Sequence: Synthetic coding sequence
  source 1..1710: mol_type = other DNA
atgggcctgggcctgctgctgcccctgctgctgctgtggacccggggcactcagggttctgaattggaccccaaagggcagcacgtgtgcgtcgcaagttcaccttccgcagagctgcagtgctgtgctgggtggcgccagaaggatcaggaatgtactattcctatttgcgaaggccctgacgcatgccagaaggacgaggtatgcgtgaaaccaggactctgccgctgcaaaccaggatttttcggcgcccattgctccagccgctgccccgggcagtattgggggcccgactgtagagagtcttgtccatgccaccctcatggccagtgtgagccagccaccggagcttgtcagtgtcaagcagaccgctggggtgctcggtgcgaatttccttgtgcttgtggcccacatggtcggtgcgacccagccactggcgtgtgtcactgcgagcccggctggtggtcaagtacatgccgccgcccctgtcagtgtaatacggccgcggctaggtgcgaacaagctactggtgcttgtgtgtgtaagccaggctggtggggccgacgctgttcctttaggtgtaattgtcacggtagcccgtgcgaacaggactcaggacgctgtgcctgcaggccaggttggtgggggccagaatgccagcagcaatgcgagtgcgtccgggggcggtgctcagccgcatcgggtgagtgtacgtgcccccccgggtttcgaggagcccgctgtgagctgccctgccccgccggatctcacggggtgcagtgtgcccactcatgcggccggtgcaagcataatgagccatgcagcccagacaccggttcttgcgagtcttgcgagcccgggtggaatgggactcagtgtcagcagccttgcttgcccggcaccttcggcgagtcctgcgagcaacagtgccctcactgcaggcacggggaggcttgtgagcccgacaccggccactgccagcgatgcgatcctggttggcttggaccgaggtgtgaggatccctgtccaactgggaccttcggcgaagattgtggcagcacatgcccgacatgcgtgcagggttcctgtgacaccgtgacaggagactgcgtttgttcggctggctattggggaccttcatgcaacgcctcctgccctgcgggattccacgggaacaattgcagcgttccatgcgagtgtcctgagggactctgtcaccctgtctctggcagctgtcaacccggctctggaagtcgagacactgctctgatagccggtagtctggttccactgctgttactgtttctcgggcttgcttgctgtgcctgctgctgctgggccccacgatccgacttgaaggatcgccccgcccgggacggggcaaccgtctccagaatgaagctccaagtttggggaaccctcacctcgctgggaagcacccttccctgccggtctctctcaagccataagcttccctgggtcacggcatcatcctctcgcccgctgcccgcaggacccttgatgacacctagccatccaatcctcagcttggagagacagatgaggttcttacccacggtttgtcatccaaagaaggggtggtctctttggccccggcagggacggcagaggcccgcgtggctgcaggtcctgtcacgaccgctgagaaccccaccacgccacagcccatctagagctccccctgcctag

SEQ ID NO: 204302 - DNA, 2613 bp, synthetic construct
  misc_feature 1..2613: note = Description of Artificial Sequence: Synthetic coding sequence
  source 1..2613: mol_type = other DNA
atggagggcgccggcccccggggcgccggccccgcccggcggcggggggccggtggccccccgagtccactgcttccttcattgctcctcttgctcctactctggatgttgcccgatacagtcgccccacaggagctgaaccccagaggcagaaacgtatgccgggcgcctggatcccaggtgcccacatgttgcgccgggtggagacaacagggtgatgagtgcggaattgctgtttgtgaaggtaattccacctgctcggagaatgaagtgtgtgtccgccccggggaatgcagatgcaggcacggttattttggggcgaattgtgacacgaaatgtcctcgacagttttgggggccagactgtaaggaactgtgtagctgtcacccccacggacagtgcgaggatgtgacaggccagtgcacttgtcacgcacggaggtggggggcaaggtgcgaacacgcctgccaatgccagcacgggacttgtcatccacggtcaggcgcttgccgatgtgagccaggatggtggggagcgcaatgtgcatcagcctgctattgctccgccacttccagatgcgatcctcagaccggcgcatgcctatgccacgcaggatggtggggacgaagttgcaataatcaatgcgcttgtaactcttcgccatgcgagcaacaatccggtagatgccagtgtcgcgagcgtacattcggagccagatgcgacagatattgccagtgctttcgaggccgctgtcaccccgttgatgggacttgcgcgtgcgagcctggttaccgcgggaagtattgcagggagccctgccctgctggcttctacggcctcggctgtcgtcgccgatgtggccagtgcaagggacaacagccctgcaccgtcgccgagggaaggtgcctaacctgcgaacccggttggaacggtaccaagtgtgatcagccttgtgcgaccgggttttacggggagggctgcagccatagatgtcccccttgcagggacggacacgcctgtaaccacgtgacgggcaagtgcacaaggtgcaacgccggctggattggtgatcgctgcgaaaccaagtgctcaaatggcacatacggggaagactgcgcctttgtatgtgccgattgcggatcgggccactgtgactttcagagtggacggtgcctttgctctccgggggtacatgggccccactgcaatgtgacttgtccccccggcctacacggtgcagattgtgctcaggcttgttcatgccacgaggacacctgcgatccagttacaggggcctgccacttggaaactaatcaacggaagggcgtaatgggcgccggtgccctgctggtgctgctggtatgcctgttgctttccctgttagggtgttgctgtgcttgtagaggcaaggatcccactcggcgacctcgccccagaagagaactcagcttagggcgcaagaaagcacctcacaggctgtgtggaagatttagtagaatttccatgaaattacctagaatacctctgcgccgacaaaagctacctaaggtggtcgtcgcccatcatgacttggataatactcttaactgttctttcctggaaccacctagcggtctggagcagccctcgccatcttggtccagtcgggcatctttctcttcctttgacacaaccgatgaggggccggtgtattgtgtcccccacgaagaagcccctgcagagagcagggaccccgaggtgcctacagtgccagctgaagcccccgcaccgagccccgtgccgcttaccacacctgccagcgccgaggaggcaatccctctgcctgcaagcagcgatagcgaacggagtgcctcatccgttgaaggaccaggaggggcattgtacgccagggtggccaggcgagaggcaagacccgctcgagcacggggagagattggagggctgagcctgtctccaagtccggagcggcggaaaccgccacccccagatccggccacgaaacccaaagtaagttggatccatgggaagcactctgccgctgcagccggccgcgccccatctcctcccccacctggctctgaggccgccccatcaccaagtaagcgtaagcgcactccttccgataagtctgcgcatactgtcgaacacggatctcccaggacacgtgatcctaccccccggcccccaggccttcccgaggaggccactgcattagcggccccgtccccaccacgagcaagggcccgtgcagccccccgccccctaggcgcccacggacggcggcgatctccagctaagcgggccgaggcagcttctatgctggctgccgacgtgcggggcaaaacacgcagccttgggcgtgctgaggttgctctgggagcccagggcccaagggaaaaaccggcaccaccccagaaggccaagaggtcagtccccccagcgtcgcctgccagggcacctccagccaccgaaaccccgggccccgagaaggcggctacggatctgcctgctccggagactccccgcaaaaaaacacctatacagaagcctcctcggaagaaatcaagagaagctgccggagagcttgggcgggctggcgctcctactctctag

SEQ ID NO: 204303 - DNA, 2493 bp, synthetic construct
  misc_feature 1..2493: note = Description of Artificial Sequence: Synthetic coding sequence
  source 1..2493: mol_type = other DNA
atgggcctgggcctgctgctgcccctgctgctgctgtggacccggggaactcaaggatcagagttggatccaaaagggcagcatgtctgtgtggccagctctccgtcagcagaactccagtgctgcgccggctggagacagaaggaccaggaatgcacaattcccatctgtgaaggtcccgacgcctgccagaaagatgaagtatgcgtgaaaccaggtttatgcaggtgcaagcccggattcttcggtgcccattgcagttctcggtgccccggccagtattgggggcccgattgcagggagagctgtccgtgccacccacatggacagtgcgagcctgccacaggggcttgccagtgccaggctgataggtggggcgcacgctgcgaattcccttgtgcctgcggaccgcacggcaggtgtgaccctgctaccggcgtctgtcattgcgaacccggctggtggagttccacctgccggcgtccttgtcagtgcaataccgccgcggcccgctgcgagcaggcaaccggagcatgtgtgtgcaaaccaggctggtggggccgccgttgttccttccgttgtaattgccacggcagtccctgcgagcaggactccggccgttgcgcttgtcgcccagggtggtggggtccagagtgtcagcagcagtgtgagtgtgtacgcggtcggtgtagtgcagcctccggagagtgtacttgcccccccgggttcagaggggctaggtgcgagctcccttgtccagcgggttctcacggagtgcagtgtgcgcatagttgcgggcggtgtaaacacaatgaaccatgctctcctgacaccggcagctgcgaaagttgcgaacctggatggaatggcactcagtgtcaacagccatgcctgccaggtacgttcggtgaaagctgcgagcagcagtgccctcactgcagacatggcgaagcttgcgagcctgacacagggcactgccagagatgtgacccgggctggctcggtccgcggtgtgaggacccctgcccaactggcacttttggagaggactgcggctctacgtgtcccacctgtgtacagggaagctgcgataccgtcacaggagattgcgtgtgctctgcgggctattggggtcccagctgtaatgcatcatgtcctgccgggtttcatggaaacaactgtagcgttccttgtgagtgcccagaagggctgtgtcatccagtgtctggatcttgtcagccagggtccggcagccgggataccgcactgattgccggttcacttgtgccactgttgctcctattcctgggtctcgcttgctgtgcttgttgttgctgggctccccggtctgatctgaaggatcgtcccgcccgagatggcgccactgtgtcccggatgaagctccaggtctggggaaccctgactagtttaggctctacgctaccatgccgcagcctgtctagccacaagctcccatgggtcaccgtaagccaccacgatcctgaagtcccattcaaccactcttttatcgaaccccccagtgccggatgggctactgatgatagcttctcctccgatcccgagtctggggaagccgatgaagtccctgcttattgcgtgcccccccaagagggtatggtgccagtggcccaagccgggtcctccgaagcatcactggctgccggcgccttccctccacctgaagacgcctctactcctttcgcaatccctcgaactagctccctcgctcgcgctaaaagaccatcagtgtcctttgccgagggaaccaagttcgccccccagtcacgcaggtcaagcggcgaactctcttcacccctgagaaaacccaagcgcctgtccagaggcgcccaatcagggccagagggcagagaagccgaggaaagcacagggcctgaggaggccgaagcacccgagtctttccccgcggccgcgtcacccggagactccgcgacagggcatcggcgtccccccctgggtgggcgcaccgtggctgaacacgtcgaggcgatcgaagggagtgtgcaagaaagtagcggacctgtgacaacaatctacatgcttgccggcaagccccgcggctctgagggaccagtgaggtctgtgtttaggcactttggatctttccagaagggacaggcagaagctaaagtaaaacgcgcaatcccaaagcctccccggcaggccctgaataggaaaaaagggtctcccgggctggcatctggatcagtcggacaatcgcccaacagtgcccctaaagccggattgccaggggcgactggacctatggccgtgaggcccgaggaagcagtccgcggtctgggggccggtaccgaatcctcacgtcgtgcacaggaaccagtctctggttgcggcagtccagagcaggatccacagaagcaagccgaggaggagcgacaggaagagccagagtacgaaaatgttgtgccaatctctcgacctcctgagccttag

SEQ ID NO: 204304 - DNA, 2235 bp, synthetic construct
  misc_feature 1..2235: note = Description of Artificial Sequence: Synthetic coding sequence
  source 1..2235: mol_type = other DNA
atgggcctgggcctgctgctgcccctgctgctgctgtggacccggggaactcagggttcagaactcgaccccaaaggccagcacgtttgtgtagcatcatccccgagtgcagaacttcaatgttgtgctggatggcgacagaaagatcaggagtgtaccatcccaatatgtgagggtccggacgcctgccaaaaggatgaggtgtgcgttaagccagggctgtgtcgttgtaagcccggtttctttggcgcacactgctctagtcggtgccctggccagtattgggggccagactgtagggagtcttgcccatgccacccgcatggccaatgcgagcccgctacaggtgcttgccagtgccaggcggataggtggggagcacgttgtgagtttccatgcgcgtgcggcccccacggtaggtgtgaccccgctaccggagtctgccattgtgagcccggatggtggagttctacttgtcgtcgaccttgccagtgcaatacagctgccgctaggtgtgaacaggcaaccggcgcgtgtgtgtgcaagccaggctggtgggggcgccgctgtagctttcggtgtaattgtcacggaagtccttgtgaacaggacagtgggcggtgtgcatgccgcccgggctggtggggacctgagtgtcagcagcaatgtgaatgcgtacgcggtaggtgtagcgctgcaagcggcgagtgcacttgtccaccagggttcaggggggcccggtgcgagctaccgtgccctgccggctcccatggggtgcagtgtgctcatagttgcgggcgatgtaagcacaatgaaccctgtagtcctgacactggctcctgtgaaagttgtgagcctggatggaacggaactcagtgccagcagccctgtctacctggaacctttggagaatcatgtgaacaacagtgtccacattgtcgccacggtgaggcctgtgaacctgacaccggtcactgccagcgatgctccggcagccgtgacacagcattgatcgcagggagccttgtcccgctgcttcttctgttcctgggcttggcctgttgcgcatgctgctgctgggcacccaggtccgacctgaaggataggccggcacgagacggagccacggtgagcaggatgaagctccaggtgtggggcacgctgacgagcttgggctcaaccttgccctgccgctccctctcctctcataaactgccctgggtgaccgtgtcgcaccacgatccagaggtacccttcaatcatagcttcattgagccaccttcggccggctgggccaccgacgattcgttttcctcggatcccgaatctggcgaagctgatgaagtcccagcctattgcgttcccccccaggaaggaatggttccagttgcacaggctggctcctctgaggcgagtctggctgcaggcgcttttcccccccccgaagacgcttcaacgccatttgccatcccaaggacaagctcgctggctcgcgccaagagaccctccgtcagctttgcagagggcacaaaatttgcaccgcaatctaggcgaagttcaggcgagctctctagccctttgaggaagcccaagcgtcttagcagaggcgcgcagtccgggcccgagggacgggaagccgaggaaagtacgggacccgaagaggccgaagcccccgaatctttccctgcagccgcctcccccggggacagtgccaccggccaccgcaggcctccgctgggtggcaggacagtggccgaacatgtggaagcaatcgaggggtccgtccaggaatcctctgggccagtgaccactatttacatgctggccgggaagccccggggatctgagggccccgtgagaagcgtgtttcgccattttggcagcttccaaaaggggcaggctgaggctaaggtgaaaagggccatccctaagcccccaaggcaggcactgaatcgcaagaaaggctctccgggcctggcaagcggtagtgtgggacagagtccaaacagcgctcccaaagcagggctgccaggtgctaccggccctatggccgttcgtccggaagaagccgtgcgtggcctcggagcaggtaccgaaagcagtagaagggctcaggaacccgtctctggctgcggcagcccggaacaggatccacagaagcaggctgaagaggagcgacaggaagaaccagaatacgagaatgtcgtgccgattagccgcccgcccgagccgtag

SEQ ID NO: 204305 - DNA, 1710 bp, synthetic construct
  misc_feature 1..1710: note = Description of Artificial Sequence: Synthetic coding sequence
  source 1..1710: mol_type = other DNA
atgggcctgggcctgctgctgcccctgctgctgctgtggacccggggaacccagggaagcgagcttgatcctaaaggtcagcacgtctgtgtggcctcctctcctagcgctgagctacagtgctgtgccgggtggcgccagaaagatcaggagtgtacgatccccatctgtgaagggcctgatgcgtgccagaaggacgaggtgtgcgtcaagcctggactgtgccgctgcaagccaggattttttggtgcgcactgtagctctaggtgtccgggccagtattggggtccagattgcagggagagttgcccatgtcacccacatgggcaatgcgagcctgctaccggcgcatgccagtgccaggcggatcgctggggcgcaagatgcgaattcccctgtgcctgtggccctcacgggcggtgtgaccctgccaccggagtctgccattgtgagccggggtggtggtcgagcacctgtcggcggccttgccaatgcaacaccgcggcggcacgctgcgagcaggctacaggggcctgtgtgtgtaagcctggctggtggggacggaggtgtagcttccgatgcaattgccacgggagtccctgcgaacaggattccggacggtgtgcttgtcgccctggctggtggggccccgagtgccaacagcaatgcgagtgtgtgagaggacgctgctctgccgcatccggcgagtgcacatgccccccaggctttcgcggcgcccgctgtgagctcccctgtcctgccggatcccacggtgtccagtgcgcccattcctgcgggcgctgcaagcacaatgagccctgttcacccgatacggggagctgcgagtcttgcgagcccgggtggaacggcacacagtgccaacagccctgcctcccgggaaccttcggtgaaagctgcgagcagcagtgtccacattgtcggcatggtgaagcctgcgaacctgatactggacactgccaaagatgtgatccagggtggctggggcccaggtgcgaagacccttgtccgaccgggacattcggcgaggactgtgggagtacttgccccacatgtgtgcagggctcatgtgatactgtgaccggcgactgtgtctgctccgcaggctactggggtcctagctgcaacgccagttgtcccgctggcttccacggcaacaactgcagcgttccttgcgagtgtcccgagggactctgccatccagtaagcgggagctgtcagccaggaagtggatcacgggacaccgcattgattgctggcagtttagtacctcttctgttgcttttccttgggttagcttgctgtgcatgttgctgctgggcacctaggtctgatctgaaggataggccagcccgcgacggcgccacagtgtcgcggatgaaactgcaggtgtggggaactctgacttccctgggctccacactgccctgccgttctctctcttctcacaagttgccctgggtgacggccagctcctcccgtccccttcccgccggtccgttaatgaccccttcccatcctattctcagccttgagcgccagatgcgcttcctgcctaccgtctgccaccccaaaaagggctggtctctatggccacgacagggcaggcaacgcccagcctggctccaggttctgagccgtcccctgcgtacgcctcctagacattcccctagccgggcaccgcctgcttag

SEQ ID NO: 204306 - DNA, 2595 bp, synthetic construct
  misc_feature 1..2595: note = Description of Artificial Sequence: Synthetic coding sequence
  source 1..2595: mol_type = other DNA
atggagggcgccggcccccggggcgccggccccgcccggcggcggggagcaggaggacccccaagtcccctgctgccttccttgttactgttacttttgctgtggatgctgccagacacagtggcacctcaggaactcaacccaagagggcgcaacgtttgccgcgcccccggcagtcaagttcctacttgctgtgctgggtggcgtcagcagggggatgaatgtgggatcgcagtttgtgagggaaactccacctgctctgagaacgaggtctgtgtgcgccctggggagtgtaggtgcaggcacggttatttcggggccaattgtgacacaaaatgtcctagacagttctggggaccggactgcaaggaactctgcagctgtcatccacacggacagtgcgaggacgttaccggccagtgcacatgtcatgctcgtcgatggggcgcaaggtgtgagcacgcctgccagtgtcaacatggcacatgtcatcctaggtccggggcttgccgatgcgagcccggatggtggggcgctcagtgcgccagcgcttgttattgtagtgccacctcacgatgcgacccacagacaggggcctgcctatgtcatgctggttggtggggccgctcctgcaataaccagtgcgcctgtaactcgtcaccctgtgagcagcaatccggccgttgtcagtgtagagagcgcacctttggagccaggtgcgatcgatattgccagtgctttcgtggcaggtgccatccagtcgacggcacctgcgcgtgtgagccaggataccgcggaaaatactgtagagagccgtgcccagcaggcttttatggtttagggtgccgtcggcgctgtgggcaatgcaaaggccagcagccctgcaccgtggccgagggccggtgcctgacctgcgagcccgggtggaatggcactaagtgtgatcagccgtgcgcaacgggattctatggcgagggctgttcccaccggtgccccccttgtcgggatgggcacgcttgcaaccatgttacagggaagtgcacgagatgcaatgccggatggatcggggacagatgcgaaacgaagtgttcaaacggcacgtacggggaggactgcgcctttgtgtgcgctgattgcggaagcgggcattgcgatttccaaagtggccgatgcctctgttcacccggggtccacgggcctcattgtaacgtgacatgcccacctggattacatggagcagattgcgcacaagcctgcagttgccacgaggatacctgtgatcctgttaccggggcttgtcatctggagaccaatcaaaggaagggcgttatgggcgctggagctctgctggtgctactggtgtgcctgcttctgagtttgcttggctgctgctgcgcatgccgtgggaaagatccgacccggcgggagttatccctgggtcgaaaaaaggcaccccacagactgtgtggccgtttcagcaggatcagcatgaagttgccgagaatccccctgcggaggcagaaactgccaaaagtggtagttgcccatcatgacctggataatacacttaattgttcattcctggaacctccaagtggcttggagcaaccctcaccatcttggtcaagccgggctagtttttcctccttcgatacaaccgatgaaggacctgtctactgtgtacctcacgaggaagctccggccgaatctcgggaccccgaagtccccactgtgcctgctgaggctccagctccttcacccgttccccttacaactcccgccagcgcagaggaggcgattccactgcccgcatcaagtgactcagagcgcagcgctagctccgtcgaaggcccaggtggcgcactctacgctcgcgtcgcacgccgggaagcgcggccagctagagccaggggcgagatcgggggcttgtctcttagcccctcccccgaacgacgaaagccaccacctcccgacccggctactaagcccaaagtcagctggatccatggtaaacactctgctgctgctgccggccgtgcgccatctccaccaccgcctggaagcgaggcagccccctccccatccaagagaaagcgtacgccatcagacaagagtgcgcacacggtggagcatgggagcccaagaacccgcgaccccacgccgaggcctccagggttgcctgaggaagccactgccctggccgcgccgagtcctccacgcgcccgcgcccgtgcaaggccaggtctcctcgagcctactgatgctggggggccccccagaagtgcacctgcagcttcgatgttggcagccgacgtgcgcggtaaaacgcggagcctcggccgcgccgaggttgctttgggagcgcagggcccaagagagaagcccgcccctccccagaaggccaaacgctccgtccctccggcatcgcctgccagggctccacccgctactgaaacgcctgggcccgaaaaggcggccaccgaccttcccgccccagaaaccccaaggaagaaaacccctatacagaaaccccccagaaagaagtcccgggaggccgcgggagagttgggccgcgcaggtgcccctacattatag

SEQ ID NO: 204307 - DNA, 2598 bp, synthetic construct
  misc_feature 1..2598: note = Description of Artificial Sequence: Synthetic coding sequence
  source 1..2598: mol_type = other DNA
atggagggcgccggcccccggggcgccggccccgcccggcggcggggagcaggagggccccccagccctctcctcccctcactcttgctgctgcttttgttgtggatgctgcccgatacagtcgctcctcaggagctgaatccccgtgggcgtaacgtttgtcgggctcctgggtctcaggttcccacctgttgcgctggatggcggcagcagggcgatgagtgtggtatagctgtgtgcgagggaaattctacatgctccgagaacgaagtgtgcgtgagacccggggagtgcagatgcagacacggatacttcggggccaactgcgacacgaagtgcccacgtcagttttggggcccagattgtaaggagctctgctcatgtcatccgcatgggcagtgcgaggatgtaactggtcagtgtacctgccacgccaggcgctggggggccaggtgcgaacacgcctgtcagtgccaacacggcacatgtcacccacggagcggagcttgcaggtgcgagccaggatggtggggggcacagtgtgctagcgcatgctattgctccgccacttcgcgctgtgatccgcagacgggcgcttgcttgtgccatgcaggctggtggggtaggtcttgtaacaaccagtgcgcttgcaactctagtccttgtgaacagcagagcggtagatgtcagtgtagggaacgtaccttcggggcaagatgtgaccgttattgccagtgcttccggggaagatgccacccagtggacgggacttgtgcctgcgagcccggataccgaggcaagtactgccgagaaccttgtccagctggattctacggcttaggttgtcggcggcgttgcgggcaatgcaaagggcaacagccgtgtacagtggctgagggccgctgtctaacctgcgagcccggatggaatggcaccaagtgtgaccagccctgcgctaccggattctacggcgagggctgttcccacagatgtcccccttgcagggacgggcatgcatgcaatcacgttacaggcaagtgcacaaggtgcaatgccggttggattggtgacaggtgtgagaccaagtgctccaatggcacatacggagaagactgcgcattcgtgtgcgcggattgtgggtctggtcactgcgacttccagagcggaagatgtctctgttcccccggagtccacggacctcattgtaacgtcacatgcccccccggtttacacggcgccgattgtgctcaggcctgcagctgccacgaagatacctgcgacccggtaacgggtgcgtgtcaccttgaaacaaaccaacggaagggggtcatgggagcaggggcactcctggtacttttggtgtgtctcctgttgagcttgcttggatgctgttgcgcttgccgaggaaaggatccaactagaagagagctgagcttgggtcgcaaaaaagccccccatcgactgtgtggccggtttagccgcattagcatgaagctaccccgcatcccattgcgcaggcagaaattaccaaaagtggtcgtggctcaccatgatcttgacaacacacttaattgctcttttctggagcccccatctgggctcgaacagccttccccctcctggagctctagggccagcttcagcagcttcgatacaactgacgaggggccagtgtactgcgtgccgcacgaggaggccccagccgagtctcgagatcctgaagtacccacagtgcctgcggaagctcctgctccctcacccgtgcctctgaccactcccgcaagtgcggaagaggccattcctctccctgctagtagcgactccgagagaagcgcatctagcgtcgagggacccggaggagctttgtacgcccgagtggcaaggagagaggcaaggccggctcgcgcaagaggagagattgggggcctgagcctgagtccctcccctgagagacggaaaccccctcccccagacccagcgacgaaaccaaaagtctcatggatccacgggaagcactcggcagctgctgctggccgtgccccatcgccaccacctcccggttcagaagccgcacctagcccatctaaacgtaaacggacaccttctgataagtcggctcacaccgtggaacacggaagccctaggactcgcgaccctactccacgtccaccaggactccccgaagaggctactgcactagctgcacctagcccaccccgcgctcgcgccagagcagcgccccggcctctgggcgctcacgggcgccgaaggtctcctgccaagagggcagaagccgcctccatgctcgctgctgacgtgagaggcaagaccaggagccttggacgtgcagaggtggcactgggcgcacaggggcctcgggaaaagcctgcacctccccagaaggccaaacgctccgtgcctcccgcctcccctgcgcgtgcccctccagccaccgagacccctggccccgagaaggctgccaccgacttacctgccccagaaacaccccggaaaaagacgccgatccaaaaacccccacgcaaaaagagtagagaggcagctggggagctcggtagggcaggcgcccctaccttgtag

SEQ ID NO: 204308 - DNA, 1728 bp, synthetic construct
  misc_feature 1..1728: note = Description of Artificial Sequence: Synthetic coding sequence
  source 1..1728: mol_type = other DNA
atgcacaaggaggccgagatgctgatcggcccccagctggacgagaagaggtggggatggagactgggtgacgggtcagcggcacctccattcttaccacaggccttatccttccttctgcttctccctctggcctctgccttgcagccaaccccactgccctttcaggaacttaggctagtggggggccctagtcgatgccggggaaggctcgaggtcatgcacggcggaagctgggggagcgtttgtgacgacgactgggatgtggtggacgctaacgtggtctgccggcagctcggatgcggcctcgcgctgcctgttcctagaccactggcctttgggcaagggaggggtcccatactgttggacaacgtcgagtgccggggccaggaagcagctctctctgaatgcggctctagagggtggggcgtccacaattgtttccattatgaagatgtagcagttctgtgtgacgagttcctcccaactcaaccaccgaccaggaagatgttgacatcacgagcgcccccgactaccctgccgaatggtaagtccgaaggttcagttaggttggtaggcggggcgaacctttgccaaggcagggtggagatactgcatagtggcctctggggcacagtttgcgacgacgattgggggcttcccgacgccgccgtggtgtgccgacagctggggtgcggagcagcaatggccgccacaaccaacgccttcttcgggtatggcaccggacacattttgctagataatgtgcattgtgagggaggggagcccaggctcgcagcctgtcaaagtctgggctggggagtccacaattgtggccaccacgaagacgcaggcgctctctgtgccggacttggccctcccacccttacagcactcccctcttcggccactagggaagattgggcttggcagacagatcccagcgctaccggagtgggcccacagcctagccgagaaactgctttgttgacaacggctgcttgggcagccggtaaaaaaagtgggagattacgcttggtaggggggcctggcccatgtcggggccgcgtggaagtcctccatgctggtggttggggcactgtgtgtgatgatgattgggacttcgctgacgccagagtggcctgccgggaagctggatgtggtcctgctcttggtgctacaggcctggggcacttcggctatggaagagggccagtcctcctggataacgtgggttgcgccggaaccgaagctcgcctcagcgattgtttccaccttggctggggtcaacataattgcgggcatcacgaagacgctggcgctctatgtgctggccccgaagagctgggcttacaggtccagcaggacggctctgagacaaccagagtacccactccacgccctcgggatggccacctcagactggtgaacggtgctcaccgatgtgagggcagagttgagctgtatctgggccaacggtggggcaccgtgtgtgacgacgcatgggacctaagagccgccggcgtgctgtgtagacagttaggatgtggtcaggcactcgctgctcccggcgaggctcatttcggcccaggccgtgggcccatcctccttgataacgtgaaatgccgcggggaagaatctgctctcttactctgctcacatattcggtgggacgcgcacaattgtgatcattcggaggacgcctcagtgctgtgccagccttcttag

SEQ ID NO: 204309 - DNA, 849 bp, synthetic construct
  misc_feature 1..849: note = Description of Artificial Sequence: Synthetic coding sequence
  source 1..849: mol_type = other DNA
atgagcaacgtgaccctgcggaagatgagccccaccggcaacgagatgaaaagtaccacccagggaacaactagaaagcagcaggactttcatgaggttaacaagcgtcgcactttcttacaagataactcatggatcaagaagcggcctgaagaagagaaggatgagaactatggaagagtggttctgaatagacacaatagccacgatgcactggacaggaaggtgaatgaacgggatgtgcctaaggctaccatttctcgttactcatccgatgataccctagaccggtccatgagcatgttcagatctctggaagtgaccaagctgcagcccggtggtagcctgaatgctaatacatctaatacaatcgcttccacgtcagcaaccactcctgtgaagaagaagcgacagagctggttcccgccaccaccccccggatataacgcctcaagcagcaccgggactcggagaagggaacctggcgtccatccccctatcccacctaagccaagctctcctgtgtcctcacccaaccagcttaggcaggacaataggcagattcatccacccaagcctggggtgtatacagaaacaaatcggtctgcagagagaaatattagcgaggagctggataatctgattaaaatgaacaaatcccttaataggaatcagggcctggactccctatttcgggctaacccaaaagtggaagagcgcgaaaaaagagccaagtcactggagtccctgatctatatgagtacgaggacagacaaggacggcaagggtattcagagcctgggctcgccaatcaaagtgaaccagcgtaccgacaagaacgaaaagtag

SEQ ID NO: 204310 - DNA, 2067 bp, synthetic construct
  misc_feature 1..2067: note = Description of Artificial Sequence: Synthetic coding sequence
  source 1..2067: mol_type = other DNA
atgagcaacgtgaccctgcggaagatgagccccaccggcaacgagatgaagtccacaacgcagggcaccacgcggaagcagcaagactttcacgaggttaacaagaggcgcacatttctccaggataacagttggattaagaaaaggcccgaggaggagaaggacgagaactacggacgcgtcgtcctgaataggcataactctcacgacgccctggatcggaaagtgaacgaaagagacgttccaaaagccacgattagtcgctactcctccgacgataccctcgaccggatcagtgatcgtaatgacgcggccaagacctacaaagcaaacactctggataaccagctgaccaataggtcgatgtcaatgttccggtctctagaggtcaccaagctccagccaggcggatcgctgaacgctaacactagcaatacaatcgcctcaaccagtgctactacaccagtcaagaaaaagcggcagagctggtttcccccccctccccccggatacaacgcctcctcatcaactggaactcgcagaagagaaccaggtgtgcaccctccaataccgcctaagcctagctctccagtaagttcacccaatcagctcagacaagacaatcggcagatacatcccccgaagcccggcgtttataccgaaaccaataggagtgcagaaaggaatataagatctcaggacctggataacatcgtgaaggtcgctacctccctgcagcgcagcgacaaaggggaggaactggacaatctgattaaaatgaataaaagcctgaatcgcaaccagggactagactctctgttcagggccaatccgaaggtagaggaaagagagaagcgggctaaatcactagaatccttgatatatatgtccactcggaccgataaggatggcaagggaattcaaagcctcggctcgcccattaaagtcaatcagaggactgacaagaatgaaaaaggtaggcagaacttagagtctgtggccaaggtcaacgcgcgaatgaataaaacgagtcgtcgctccgaggacctggacaacgcaacagaggtaaaccccaaaggccatgagaataccactggtaagaaagatctagacggcctcatcaaggtggaccctgagacgaataagaacattacgaggggccaaagtcttgataatcttatcaaggtgaccccagaggtcaaacggtctaatcagggcagcaaagacctcaacaatttcatcaaggtgtaccctggtactgaaaagagtacagagggaggacagtctctggattctctcatcaaagtaactccagagcgtaaccggacaaaccaaggtaatcaagatctggagaacttaatcaaggtgattcctagcgcaaacaagtcgagtgagcagggcctggacgaacatattaacgtgagcccgaaagctgtcaagaacaccgatggcaaacaggaccttgacaagctgatcaaggtcaatcctgaaatctttactaacaaccagcggaatcaagatcttgccaatctgatcaaagtgaacccggccgtaattaggaacaaccaatctcaggacctcgataaccttattaaagtgaagccgtcggcattgagaaacaccaaccgggaccagaaccttgaaaacctcatcgaggtgaacagtcatgtgtcagagaacaaaaacggctcttcaaatacaggggccaaacaggcaggacctcaggataccgtggtctacacaaggacttacgtggagaattcaaagtctcccaaggatgggtatcaggaaaatatatctggtaagtacattcagaccgtttacagtaccagtgatcgctcggtcatcgagcgggatatgtgcacctactgtcggaaacccctcggggtcgaaacaaagatgattctggacgaactacaaatctgctgccattcaacgtgcttcaaatgcgagatctgcaaacagcctctggaaaacttgcaggccggtgatagcatttggatctataggcaaacaatccattgtgaaccttgctattccaagatcatggccaagtggatcccgtag

SEQ ID NO: 204311 - DNA, 2007 bp, synthetic construct
  misc_feature 1..2007: note = Description of Artificial Sequence: Synthetic coding sequence
  source 1..2007: mol_type = other DNA
atgagcaacgtgaccctgcggaagatgagccccaccggcaacgagatgaagtctacaacgcagggtaccacacgaaagcagcaagattttcacgaggtaaacaagcggagaacctttctccaggataactcatggattaaaaaacggccagaagaggagaaggacgagaattacggtcgcgtggtgctgaacaggcataatagccacgacgccctcgacaggaaggtgaatgaacgagacgtgccaaaggccaccatttctaggtattcgagcgatgatacccttgaccgaattagcgaccggaatgacgccgccaaaacatacaaggcaaacacacttgataaccaacttaccaaccgatccatgtctatgttccggagcctcgaggtgaccaagctccagccaggcggtagcctgaacgccaatacatctaacaccatcgcttcaacgtcggccaccacccctgtgaaaaagaaacgccaatcatggttccccccacccccaccaggctacaacgcgtccagctccaccggaacccgtagaagggaacctggcgtccatccacccataccccctaagccatccagccctgtgtcctcccctaaccagctgaggcaggataatagacaaatacatccaccaaaacccggcgtctataccgagactaacaggtcagcggaacgaaacatatcagaggagctcgataacctgatcaagatgaacaagagtctcaatcgaaatcagggactcgatagccttttcagagctaatcctaaggtggaggagcgcgaaaagcgagcaaagagcttggagagcctaatctacatgtccactcggaccgataaagatggcaaaggtatacagagccttggttccccaatcaaggtgaaccagagaacggacaagaacgagaaagggcgccagaatctggagtcagtggccaaggttaacgcccggatgaataaaacaagtaggcggtccgaggacctggataatgctactgaagtgaaccccaaaggacatgagaacactacaggcaagaaggatcttgatggtttgataaaggtggatcccgagacaaacaagaacattaccagagggcagagcctggacaacctgataaaagtcacaccggaggtgaagagatctaatcaggggagcaaggacctgaataacttcataaaagtataccccgggacagagaaatccactgagggggggcaatctcttgattcactcattaaagtgactccggagcgcaaccgcaccaatcagggaaaccaggacctggagaacttgattaaggttatccccagcgctaacaagagctctgagcagggactcgatgagcacataaatgtatccccaaaggccgtgaaaaacacagacggcaagcaggaccttgacaaactgatcaaggtcaaccctgaaatctttactaacaaccaacgcaaccaggatctggcaaatttaatcaaggtgaaccctgccgtcatacggaataaccagtcccaagacctagacaatctgatcaaagtgaagccaagcgccctgcgtaacactaatagggaccagaatctggaaaacctgatcgaggtcaattctcatgttagtgagaataagaacggatcatccaatactggcgcgaagcaggcaggcccacaagatacagttgtgtacacgcgaacctatgtcgagaatagcaaatctccgaaggatggataccaggagaacatctctggcaaatacatccaaacggtgtactctacttccgataggagcgtaattgagcgcgatatgtgcacttactgtagaaagccgctgggggtagagacgaagatgatcttggacgagctgcagatctgctgccatagtacctgtttcaaatgtgaaatttgcaagcagcccctggagaatttgcaagcgggcgattccatttggatctaccgacagaccattcattgcgaaccctgttatagcaaaatcatggcgaagtggatcccatag

SEQ ID NO: 204312 - DNA, 1941 bp, synthetic construct
  misc_feature 1..1941: note = Description of Artificial Sequence: Synthetic coding sequence
  source 1..1941: mol_type = other DNA
atgagcaacgtgaccctgcggaagatgagccccaccggcaacgagatgaagagcactacccagggaacaacacgcaaacagcaggactttcacgaggtaaacaagagaaggacattcctgcaggacaatagctggataaagaagaggcctgaagaggagaaggatgagaattacgggagggttgtgcttaacagacacaattcccatgacgcccttgatcggaaagtgaacgagagagatgttcccaaggccactatcagtaggtatagttccgacgataccctcgatagaatctccgacagaaacgatgccgccaagacctacaaggctaacaccttggacaatcaacttacaaatcgctccatgagcatgtttagaagcctggaggtgacaaaactacagccaggcggtagccttaacgccaatacttctaatactatcgcatcaacaagcgccaccactccagtcaaaaagaaaagggaacccggagtgcaccccccaatccctcctaaacctagctctccagtttcatctcctaaccagctgcggcaggataacagacagatccatccacctaaaccaggcgtgtacactgagacaaatcggtccgccgaaaggaatatcaggtctcaggatctcgacaatatcgtcaaagtcgctacatctcttcaacggagcgacaagggcgaagaactagacaatctgatcaagatgaataaaagtctgaacaggaatcagggattggattctctcttccgggctaaccctaaagtggaagagagggagaagcgagctaagagcctggaatcgttgatttatatgtcaactcggactgacaaagacggtaagggaatccagagtctaggaagtcctattaaggtgaatcagcggacagataaaaatgagaaaggtcgccagaatctggaaagcgtcgcgaaggtcaacgcaagaatgaacaagacgtctcggaggtcggaggacctggacaatgcaaccgaggtgaaccctaaaggacacgaaaataccacaggtggccagtcactggacaatctaatcaaggtcactcctgaggtgaagcgaagcaatcagggttccaaagatctgaataatttcatcaaagtctaccctggaacagagaaatccaccgagggagggcagtccctagacagcctgatcaaggtcacccccgagagaaacagaactaatcaagggaaccaagatcttgagaatctcatcaaagtgataccctccgcaaataaaagtagtgagcagggcctggatgagcatatcaacgtaagtccaaaggcagtcaaaaatacagacggaaagcaggatcttgacaagctcatcaaagtgaaccctgagatcttcaccaacaaccagcgcaaccaggacttagcaaatctgataaaagtcaatcccgcagtgattcgcaacaaccagtcacaggatctcgacaacctgataaaggtgaagccatctgcattaaggaacaccaatcgagatcagaacctggaaaatttgattgaggtcaactcacacgtgtcggaaaacaagaacggctcctcaaacacaggggctaaacaggctggcccgcaggataccgtcgtttatacccggacttacgtggaaaacagcaaatctcctaaggatggataccaagagaacattagtgggaagtatatccagacagtgtactccaccagcgatcgatccgtgatcgagagggatatgtgtacatactgtagaaagcccttaggcgtggaaacaaagatgatcctagatgaactccaaatttgctgccacagtacttgcttcaaatgtgagatttgtaaacaaccccttgagaatctgcaggcaggcgacagcatatggatatacaggcagactatccattgtgaaccatgctattcgaagattatggccaaatggataccctag

SEQ ID NO: 204313 - DNA, 2148 bp, synthetic construct
  misc_feature 1..2148: note = Description of Artificial Sequence: Synthetic coding sequence
  source 1..2148: mol_type = other DNA
atggcccgggagctgtaccacgaggagttcgcccgggccggcaagcaggccggtctgcaagtttggcgcattgagaaactggagctagtccccgttcctcagtctgctcacggggatttctacgtcggtgacgcttacctcgttctgcatactgctaaaacatcgagagggtttacttatcatcttcacttctggctgggaaaggagtgctcccaggacgagagcaccgccgctgcaatctttactgtccaaatggatgactatctggggggaaagccagtccagaaccgcgaactgcagggctacgagtcaaacgactttgtctcatatttcaagggaggattgaagtacaaggctggaggagtggcgagcggccttaaccatgtattaaccaatgatttgaccgccaagcgcctgttacatgtcaagggccgacgcgtggttcgtgccacagaggttcctctaagctgggactcctttaacaagggcgactgttttatcatagacctagggaccgagatttatcagtggtgcggatcatcctgcaacaagtatgagagactgaaggctaaccaagtagctaccggaatcagatacaatgaacgcaagggtagatccgagctgatcgtggtggaggagggatcggagccaagtgagctcattaaagtgcttggagagaagccagagttgcctgacggtggagacgacgatgatattattgccgatatctctaaccgcaaaatggcgaaactttacatggtgagtgacgcaagcggctctatgagggttacggtggtggccgaggaaaacccattcagcatggccatgttgttaagcgaggaatgcttcatcctggaccacggcgcggcgaagcaaatatttgtctggaagggtaaagatgcaaatccacaggaacgtaaagccgctatgaagaccgccgaggaatttcttcagcagatgaattacagcaagaatacgcagattcaagtgttacccgaaggaggagaaacacccattttcaagcagttcttcaaagactggcgggataaggaccaatctgatggttttggtaaggtgtacgtcactgagaaggttgcacagattaaacaaatcccctttgatgccagcaagctgcacagctcaccacagatggccgcccaacataacatggtagacgatggctccggcaaggtggagatctggcgcgttgagaataacgggcggattcaggtggatcaaaattcctacggggaattctatggtggcgactgttatatcatactctacacatacccgcgcggccagataatttacacatggcagggagccaatgctactcgggatgagttgacaacatcagccttcctgacagttcaacttgaccggtccttaggcgggcaggctgtgcagattagagtgagccagggcaaggaacccgttcacctactgtctctgtttaaagataagcccctgataatttacaagaacggcactagcaaaaagggaggccaggcgcctgcaccccccacgaggcttttccaagtgcggcgtaatctggcctcaattacccgaattgttgaggtcgatgtagacgcaaatagcctgaactcgaatgatgtgttcgttctcaagctgcctcagaacagtggctacatatgggttggcaagggcgcttcacaagaagaggaaaagggcgcagaatatgtggcttcggtgctgaagtgcaagacattgcgcatccaggaaggagaagaacccgaggaattttggaactctctgggcggcaagaaggattatcagacttcccctcttcttgagacccaggccgaagatcacccacccagactgtacgggtgtagcaacaaaaccgggaggttcgttatcgaggagatccctggcgaatttactcaggacgacctcgccgaggatgatgtgatgttactcgatgcatgggaacagatatttatttggatcggaaaggacgctaacgaggttgagaagaaagaatccctaaagtccgcaaagatgtacctcgagacagacccttccggacgagataagcggacacctatagtgatcatcaagcagggccacgagccccccaccttcactgggtggttcctgggttgggactcgtccaaatggtag

SEQ ID NO: 204314 - DNA, 1407 bp, synthetic construct
  misc_feature 1..1407: note = Description of Artificial Sequence: Synthetic coding sequence
  source 1..1407: mol_type = other DNA
atggccaagctgtacatggtgagcgacgccagcggcagcatgcgggtcaccgtcgtggcagaggaaaacccattttcaatggctatgctgttaagcgaggagtgcttcatcctggaccatggagccgccaaacagatctttgtatggaagggtaaggatgctaatcctcaggagcggaaggcagccatgaagaccgccgaagaatttttacaacagatgaactacagtaagaatacgcagatccaagttctgccagaaggcggagagacgcctatcttcaaacagttctttaaagactggcgggataaggaccagtctgatggatttgggaaagtctatgttacagaaaaggtggctcaaatcaaacagattcccttcgacgcctctaaactgcattcaagcccccaaatggctgcacagcataacatggtagatgatggctctggcaaagttgagatctggagggtcgagaacaatggacgcatccaagtggaccagaattcatatggcgaattttacggaggggattgttacatcattctttacacatatccaaggggtcagatcatatatacctggcaaggagccaacgctactagagatgaactgacaacttctgccttcctgaccgtgcaacttgaccgttcccttggggggcaagcagttcagattcgagtttcccagggcaaggaacccgtgcatcttttaagcctcttcaaagacaaacctctgatcatttataaaaatgggaccagcaaaaagggaggccaagcgcccgcccctcccaccagactctttcaggtccggcgcaaccttgcctcaattaccagaatcgtggaagtggacgttgacgctaattcactgaactccaacgacgtgttcgtgctaaagcttccccagaattctgggtacatctgggttggaaagggagcttcacaagaagaggagaaaggggccgaatacgttgccagcgttctgaagtgcaaaactttgcggatccaggagggcgaggagccagaggagttctggaatagccttggtggcaaaaaagactaccaaacctctcccttactcgagactcaagctgaggaccacccaccaagactctatggatgctccaacaagaccggaaggtttgtgatcgaggagattcccggagagttcacacaggacgatctcgccgaagatgatgtcatgttgctggacgcgtgggaacagattttcatctggatagggaaggacgcgaatgaagtggaaaagaaagagtcgctaaagtccgcgaaaatgtacctggaaactgatcccagcgggagagacaaaagaacacccattgtaatcatcaagcaggggcatgagccaccaacatttacagggtggttcttgggttgggattcaagcaagtggtag

SEQ ID NO: 204315 - DNA, 1407 bp, synthetic construct
  misc_feature 1..1407: note = Description of Artificial Sequence: Synthetic coding sequence
  source 1..1407: mol_type = other DNA
atggccaagctgtacatggtgagcgacgccagcggcagcatgcgggtgacagtcgtggcagaagaaaacccgttctcaatggccatgttgctgtccgaagagtgcttcatcctggatcacggagcagccaagcagatcttcgtctggaaaggtaaggacgctaatcctcaagagagaaaagccgccatgaaaacagctgaagaattcctgcagcagatgaactactccaagaatacacagattcaggtgctgcccgaaggaggtgaaacacccatctttaaacagttcttcaaggactggcgcgacaaggatcagtctgacggattcggaaaggtctatgttactgaaaaggtggcacagataaaacagattccttttgacgcctcaaaacttcacagtagcccccagatggcggcacagcataatatggtcgacgacggctcaggtaaggtcgagatctggcgggtcgaaaacaacgggcgtatccaagtggatcagaattcatatggggaattctacggcggagattgctacattatcctgtatacttatccaagggggcagattatatacacttggcaaggggctaatgctacacgtgatgagctaaccaccagtgccttcttgactgtgcaactggaccggagtttgggaggtcaggcagtgcaaatcagggtgtcacagggcaaagaaccagtgcacctcctgtccttattcaaggacaaaccactaattatatacaagaacggaacttccaaaaaaggcggccaagctcccgccccccctacacggctgtttcaggtccgaagaaaccttgccagcatcacaagaattgtcgaagtcgacgtagatgcaaactctttgaattccaatgatgtattcgtgcttaagctacctcaaaactctgggtacatttgggtggggaaaggcgcttcccaggaggaagaaaaaggggccgaatacgtagcctccgtgttaaaatgtaaaacactgcggatccaagagggcgaagagccagaagagttctggaactctttgggaggcaagaaagattatcagactagccccttgctcgagacccaagcagaggatcaccctccccgcctctacggctgtagtaacaaaacagggaggtttgtgatcgaagagataccgggtgagttcacccaggatgacttagcagaggacgatgtgatgctgttggatgcatgggaacagatttttatatggattggaaaggacgccaacgaggtcgaaaaaaaagagtctttgaaaagcgccaagatgtacctggagaccgatccttcaggccgtgataaacggacccctattgtgatcataaaacagggacacgaacccccaaccttcaccggctggttcctcgggtgggactcctccaagtggtag

SEQ ID NO: 204316 - DNA, 3864 bp, synthetic construct
  misc_feature 1..3864: note = Description of Artificial Sequence: Synthetic coding sequence
  source 1..3864: mol_type = other DNA
atggagcccatctaccccttcgcccggccccagatgaacacccggtttccaagttcaaggatggtgccttttcatttccctccatcaaaatgtgcactgtggaaccccactcctactggtgactttatatacttgcacctatcttattaccgaaatccaaagctggttgtaaccgaaaagacgatacggttggcatatagacatgcaaaacagaataagaaaaattcgagttgctttctcctggggagcttaacggctgacgaagatgaggaaggagtaactctgaccgtggacaggttcgacccaggcagggaggtgcctgaatgcctcgagattactcccacggcgtccctgcccggtgatttcctgattccttgcaaggtccacactcaggagttgtgctcaagagagatgatagtgcatagtgtggacgatttttcctcagctttgaaagctctccaatgtcatatctgcagtaaagactcactcgattgcgggaagctcctgtcacttagggtacacatcaccagtcgagaatccctggacagcgtggagtttgatctgcactgggcagccgtgactctggcaaataatttcaagtgtactccagtgaaacccatcccgataatccccaccgcccttgccagaaacctgtccagcaatttgaacatttcccaggtgcagggcacctataagtatggatacttaaccatggatgaaacgcgtaagcttctgctccttctggagtcggacccaaaagtctatagtctacccctggtgggcatctggctttcagggatcacgcatatctatagtccgcaggtgtgggcatgctgtctgcgctatatctttaattcctccgtccaggaacgcgtgttttctgagagcggtaactttatcatcgttttgtattccatgacacacaaggagcctgaattttacgagtgcttcccctgcgatggtaaaatccctgactttaggttccagctgctcacatcgaaagagacactacacctgttcaaaaatgtcgagccacccgacaaaaaccccatccggtgtgagctctccgcagagagccagaacgcggaaacggagttctttagtaaggccagcaaaaatttctccatcaaaagatccagccagaaactgagctctggcaaaatgccaattcatgaccatgacagcggcgttgaggacgaagacttctccccgaggccgattccatctccacatcctgtttcgcagaagatttcgaagatccaaccaagcgtgccggagctgtctctggttcttgacggaaacttcattgagagtaacccacttcctacaccactggagatggtcaacaatgaaaatcccccactaattaatcacctggagcatctcaagccactccagccccagctgtacgacgaaaagcactcccccgaagtggaggctggtgagcctagcttgcgcgggatcccaaatcagcttaaccaggacaagcctgcactcctgcgccactgcaaggttcggcaaccacccgcttataaaaaggggaatccacatacccggaactctatcaagcctagtagccataatgggccctcgcacgatatctttgagaagctgcaaaccgtttcggcaggaaatgtgcagaatgaggagtaccctattcgtccttcaacactgaatagccggcagagcagtctggccccgcaaagtcaaccccacgacttcgtcttcagccctcacaacagcgggcgaccaatggaactgcagattcccactccccccctgcccagttactgcagcaccaatgtttgtcgatgttgccaacaccattcccatatccagtattcgcctttaaatagttggcagggtgcaaacactgtcggcagcatccaagatgtgcagagtgaggctttgcagaaacatagcttatttcatccctcaggctgccccgccctatactgcaacgctttttgttcctcttcaagccctattgccttgcggccccagggcgacatgggcagttgtagcccacactccaacatagaaccttcccccgtcgcaaggccccctagtcacatggatctttgtaacccacaaccctgcaccgtgtgtatgcatactccaaaaaccgaatcagacaatggcatgatgggactgtctcctgatgcatataggttcttgacagagcaggatcggcagctgcggctgctgcaggctcaaattcagcgccttttggaggcccagagccttatgccttgctccccgaagactaccgccgtggaggacactgtacaggcaggcagacagatggagctcgtgagtgtggaagctcagagctctcccggcctccacatgcggaagggagttagtatagcagtgagtacaggcgctagcttattttggaacgccgccggggaagaccaggagccagactcacagatgaagcaggacgatacaaagatctctagtgaggacatgaacttctctgtggatatcaataacgaggttacctcactccctggctcagccagcagcctgaaagcggtggatatccctagtttcgaggagtctaacatagccgtggaagaggaattcaaccagcccctgagcgtaagcaactcctcccttgtagttaggaaagagcccgacgtgccagtcttcttcccctccggccagttagccgagagcgtaagtatgtgcttgcagacagggcctactggcggcgcctctaacaactctgaaacttctgaagagcccaagatcgagcatgttatgcagccattgctgcaccagccctcggataatcagaagatctatcaggaccttctggggcaggtgaaccacctgctgaacagttcaagtaaggaaacagagcaaccctccacaaaagcagtcataatcagccacgagtgcacccgaacacagaacgtttaccacaccaaaaaaaagacccaccacagccgcctggtcgacaaggattgtgtgttaaatgctacgctaaagcaattgaggtccctgggtgtgaaaattgattcccccactaaagtgaaaaagaatgcgcataacgtcgatcacgcgtccgtgctcgcttgtatttctccggaggccgtgatctctgggcttaactgtatgtcttttgccaacgtgggcatgagcgggctttctcccaatggtgtggacctgtccatggaggctaacgccattgccctaaagtatctgaacgagaaccagctctcccaattgagtgtgacccgttcaaatcagaataattgtgacccattttctctgctgcatattaatacagaccgctctaccgtgggcctcagtctgatttctccaaacaatatgagtttcgccaccaaaaagtacatgaagcgctacggattgttgcaatcctcagataattctgaggatgaggaggaacctccagataatgccgatagcaagagtgaatacctgcttaatcagaacttgagaagcatccccgagcaacttgggggccagaaggaaccaagtaaaaacgatcatgagatcattaattgctccaactgcgaatccgtaggcactaatgctgacaccccagtgcttcggaatattacaaatgaagtgcttcaaacaaaggctaagcaacaattgacagaaaagccggcgtttcttgtgaagaacctcaagccaagccccgctgttaatctgagaacggggaaggccgaattcacgcagcatcccgagaaagagaacgaaggagacataaccatcttccccgagtccctgcagcctagcgagacgcttaagcagatgaacagcatgaacagcgtgggtacatttctagacgtaaaacgactgagacagctgcctaagttgttttag

SEQ ID NO: 204317 - DNA, 3864 bp, synthetic construct
  misc_feature 1..3864: note = Description of Artificial Sequence: Synthetic coding sequence
  source 1..3864: mol_type = other DNA
atggagcccatctaccccttcgcccggccccagatgaacacccggttcccaagctctaggatggtgccatttcattttccgccatccaagtgcgcactgtggaacccaacgcccaccggcgacttcatttatttacacctctcatactacaggaaccccaaactcgtggtcacggaaaaaactattcgcctggcctacaggcacgctaaacagaataagaagaacagcagctgtttcctgttggggtccctcactgccgacgaagatgaagagggcgtgacacttacagtagaccggttcgatcccggaagggaagtccccgagtgtctggagatcactccgacagcctccctgcctggcgatttcttgattccatgcaaagtacacacgcaggagttatgctctcgggaaatgatcgtgcatagcgtcgacgatttctcgtcggcccttaaagcactgcaatgccatatatgctcgaaggatagcttagattgtggtaagctcctatctcttcgcgtgcacattacatctagagagtctctcgattcagtggagttcgatctgcattgggccgctgtaaccctggctaataacttcaagtgtacgccagtgaagcctattcccatcatccccacggccctggcaaggaatctctcctctaacctaaacattagccaggtgcagggcacttacaagtatggttatctaactatggacgaaacaaggaagctgctgctgctgctggagagcgacccgaaagtctattcactccctctggtaggcatttggttgagcggaatcacccacatctacagcccacaggtgtgggcttgctgtctccgctacatcttcaactcttctgtccaagagagggtcttcagtgaatcgggcaacttcataattgtactgtattcaatgacccacaaggagccagaattctacgagtgttttccctgcgacggcaaaatccctgacttcaggtttcagctcctgacatccaaagaaacattgcatctgttcaagaatgtggaacccccggacaagaaccccattcgctgcgagttgagtgcagagtctcagaacgctgaaaccgaatttttttccaaagccagcaagaactttagcatcaagcgatcgagccaaaagctgagctcgggcaagatgcctattcatgaccacgatagcggggtggaagatgaagattttagtcctcgtccgatcccatctccacaccccgtgtcccagaagataagcaaaatccagccatcagtacctgaattgagtcttgtccttgatggcaatttcattgagagtaatccactgccaacaccattggagatggtgaataacgagaatcccccattaataaaccacctggagcatttgaaacccctgcaaccacagctgtatgacgagaaacattcaccagaggtggaagcaggagaacctagcctcagagggatccccaatcaactgaatcaagacaagccggctcttctgagacactgtaaagtgcgccagccacccgcgtacaagaagggaaacccccacactagaaatagcatcaagcctagcagtcataatggacccagccacgacatttttgagaagttgcagaccgtgtccgctggcaacgtgcagaacgaggagtaccctatccgccccagcaccctgaattctcgccagtcctcacttgctccgcagtcgcagccccacgattttgtgttttcccctcataattctggccgaccgatggagctccagattcccaccccccccctgccgagctactgctctactaatgtctgccgctgctgtcagcatcacagccacatccagtactcaccactgaattcatggcagggtgctaacactgtcggaagcatacaggatgtgcagtccgaagccttacagaagcactcattgttccatccatctggatgtccagccctttattgtaacgccttttgctccagcagctctcctatcgcattgcgcccgcaaggagatatgggcagttgctcaccccactctaatatcgaacctagtcctgtggcgagacctccaagccacatggacctctgtaatccccaaccgtgtaccgtttgcatgcacacccctaagaccgagagcgacaatgggatgatgggcttgtcacccgacgcatatcgatttctgactgaacaagatcgccaactccggctcctacaggcccagattcagagattgctcgaagcacaaagccttatgccctgttcccctaaaactacagccgtggaggacaccgtgcaggctgggaggcaaatggaattagtgagcgtcgaggcacagtcatcaccgggcttacacatgagaaagggggtgtctattgctgttagcacaggtgccagcctgttttggaatgcggccggggaggatcaagaacccgactcccaaatgaaacaggacgatactaagatttcttcagaggatatgaacttcagcgtagatataaacaatgaggtgactagtctgcctgggagcgcaagttcgctgaaagctgttgatatcccaagctttgaggagagcaacatcgccgttgaggaagagtttaaccagccactgtcagtgtctaacagtagtctggtggtgcgcaaagagccggatgtaccggtgttttttccatcaggacagctggccgagtccgtctcgatgtgcctccagacaggtcccacagggggtgctagtaacaactctgagacatccgaggagccaaagattgaacatgtgatgcaaccgcttctgcatcaaccttccgacaatcagaagatctaccaggacctgctgggccaggtgaaccatctgctgaattccagctctaaagaaaccgagcagccttcgacaaaagctgtcattattagccacgaatgcactaggacacagaatgtctaccacactaaaaaaaagacccatcattcccggttggtggacaaggactgtgtattgaacgctactctaaagcaacttcggagtctcggagtcaagatcgattcacccaccaaagtgaagaaaaatgcccacaacgtggaccatgcgagcgtgctcgcatgtatctcaccggaagcagtgatttcaggacttaattgtatgagctttgccaacgtcggtatgtccggcctgagccccaacggtgtcgatctgagcatggaagcgaatgccatcgcacttaagtacctgaatgagaaccaactgtcacaactcagcgtcacccggtccaaccagaataattgtgaccccttctctttactgcatattaatacggaccggagtaccgtagggctcagtcttatctcccccaataatatgagttttgctactaagaagtatatgaaaagatacgggttactgcaatcgtccgataactcagaggacgaagaggagccgccagataatgcagattctaaaagcgagtatctgttgaaccagaacctgcggtctatcccggaacaactgggcggccagaaggagccaagtaagaatgatcacgaaattatcaactgtagcaattgcgagtcggttgggaccaacgctgatacgcctgtgctcagaaacatcacaaacgaggtgctgcagaccaaggccaaacagcagcttaccgaaaaacctgcatttctggttaagaacctcaagccttcaccagcggtaaacctcaggacagggaaggctgaattcacacagcaccctgaaaaggaaaacgaaggtgacattacaattttcccagaatcactgcaaccgtcggaaactttgaaacagatgaatagcatgaactcagtcggaacttttttggatgtgaagagacttcgccagcttccgaagttgttttag

SEQ ID NO: 204318 - DNA, 3864 bp, synthetic construct
  misc_feature 1..3864: note = Description of Artificial Sequence: Synthetic coding sequence
  source 1..3864: mol_type = other DNA
atggagcccatctaccccttcgcccggccccagatgaacacccggttcccttcttctcgcatggtcccttttcactttcccccgtccaagtgtgcactctggaaccctacccccaccggagacttcatttatctgcacctgagctactacagaaatcctaaacttgtggttaccgagaagaccatccgcctggcatataggcacgcaaaacagaacaaaaaaaactcctcctgcttccttttggggtctctgacggctgacgaggatgaagagggggttactttaacagtggatagattcgatccaggccgcgaggttcctgaatgtcttgagatcacacccaccgcatcgctgcctggtgacttcttaataccctgtaaggttcacacccaagagctatgcagccgggaaatgatcgtccacagcgtagacgatttcagttccgcactgaaggctctgcagtgtcacatttgctcaaaagacagcctcgattgcgggaaactcctgagcctgcgagtccacataactagcagggaaagcctggactccgtcgagttcgacctccactgggcagcggtcacattagctaataacttcaagtgtacccctgtcaagccaatccctatcatcccaacagcgctggctagaaacctatcatcgaatctgaacatatctcaggtgcagggtacttacaaatacgggtacctgacaatggatgaaacaagaaagctgctgcttctacttgagtccgaccccaaggtttactcattgcctttagtcgggatatggctgtccggtatcactcacatctacagtcctcaggtttgggcctgttgcctgcgctacatcttcaatagcagtgtgcaggagagggttttttcggaatcagggaatttcattattgtcttatactctatgacccataaagaacccgagttttacgagtgcttcccctgcgatggtaaaataccagacttcagatttcagcttcttacctcaaaagaaaccttacatctgttcaaaaacgtcgagccacctgataagaaccctataaggtgcgagctgtcggcagaaagccagaatgccgaaacagagttcttcagcaaagcaagcaaaaacttcagcatcaagcgttcctcccagaaactatcttcaggcaagatgcccatccacgatcacgattcaggagtcgaggatgaagacttctccccgaggcccatcccctcaccacatccggtgtcacagaagatctccaaaattcaaccctctgtcccagagctaagcttggttctggatggaaattttattgaatcaaatccactgcccaccccgttggagatggttaataacgagaatccccccctcatcaaccacctcgagcatctgaagcctctgcagccacaactgtacgatgagaaacattcaccagaggtggaagccggagaacctagtcttagaggtatccctaatcaactgaaccaagacaaaccagctttgttgaggcactgcaaggtacggcagcctcctgcctacaagaaaggcaatccccacacccgaaactccattaagccctctagtcataatggacccagtcatgacatttttgagaaactgcagaccgtctccgctggcaacgtccagaatgaggaatatcctattaggcccagtactctgaactcaaggcaaagctctctggcccctcagagccagcctcacgacttcgtgttctccccacacaattccgggagacccatggagctccagattccaaccccacctctgccaagttattgttctactaatgtctgtagatgctgtcagcatcattcacacatccaatatagtcccctcaactcatggcagggcgccaacactgtggggtccatacaggacgtccagtccgaggctttacagaaacacagcctctttcatcccagcggatgccctgctttgtactgtaatgctttttgtagctcgtctagccctattgcgcttcgcccgcagggggatatgggctcttgttcaccccactctaacatcgagcccagtcctgtcgcgcgtcctccctcccacatggatttgtgtaatccacagccttgtacagtgtgtatgcacacacccaaaacagaatctgataacggcatgatgggcctatctcccgatgcctaccgatttctgaccgaacaggaccgccaactgagactcctgcaagctcagattcaacggttgcttgaggcacagtctttgatgccttgttctccgaagaccacagccgttgaagacacagtgcaggcaggccggcagatggagctagtgagtgtcgaagcccaaagctcgcctggcctgcatatgagaaagggagtgtccatcgccgtctcaaccggagcgtcccttttttggaatgctgcaggagaggatcaggagcctgactctcagatgaaacaggacgatacaaagattagttcagaggatatgaattttagcgtagatatcaacaatgaagtgaccagcctgccaggtagcgcatcatccctcaaagccgtggatataccatccttcgaagagtcgaatatagcggtggaagaggagttcaaccagccactcagcgtctccaatagctctctcgtggtgcggaaagaaccagacgtgcctgtgttcttcccgtcaggccagctggcagaatccgtgtccatgtgtttacaaactgggcccacaggtggggccagcaacaactcagagacaagcgaggagcccaaaatagagcatgtgatgcagccactcctgcaccagccctctgataaccagaaaatctatcaggaccttctggggcaggtcaaccacttattaaacagcagctcaaaggagaccgagcagccctcaacaaaggcagtgattatcagccacgagtgcactcgtacccaaaatgtatatcataccaagaagaagacccatcactcaagactagtggataaggattgcgtattgaatgctacactcaagcagctgcggtctctcggcgtaaagattgatagcccgacaaaagtcaagaagaatgcccataacgtagaccacgcctctgtgctggcctgtatctctcccgaggccgttatctccgggctgaattgcatgtctttcgctaatgttggcatgtcagggcttagcccaaacggtgtcgacctctccatggaggcgaatgccatagcattgaaatacctcaatgaaaatcaactcagtcagttgagtgtgacgaggtcgaatcagaataactgcgaccctttttctctgcttcatataaataccgaccggtcaacagtgggactgtcccttattagtccgaacaacatgtcttttgcgaccaagaaatatatgaaacggtacggactgctgcagagcagcgacaatagtgaagacgaggaggaaccacctgataacgcagacagtaaatccgagtatttgctgaatcagaatttgcggtcaatccctgaacaactgggcgggcagaaagagcctagtaaaaatgatcacgaaataattaactgcagcaactgcgagagcgtgggaactaatgccgacactccggtgcttaggaatattacaaacgaggtgctgcagactaaggcaaagcaacagctgactgagaagccagccttcttggtcaaaaatctgaaaccctcacctgcggttaatctgagaaccggtaaggcagagtttactcagcatccagaaaaggaaaatgagggagacataactatattccccgaatccctgcagccttcggaaactctgaagcagatgaactccatgaattccgtgggaacatttctggacgtcaaaagactgcgtcagttacctaagttattctag

SEQ ID NO: 204319 - DNA, 633 bp, synthetic construct
  misc_feature 1..633: note = Description of Artificial Sequence: Synthetic coding sequence
  source 1..633: mol_type = other DNA
cagctgtacgacgagaagcacagccccgaggtggaggccggcgagccttccttgcgcgggatacccaatcagctgaatcaggataaacctgcgctgctgaggcattgcaagccttgcaccgtgtgtatgcatacaccgaaaaccgagtctgataatggcatgatgggcctctcgccggacgcttaccggttcttgaccgagcaggataggcaattacgattgctacaggctcaaatccagcggctgctggaggcacaaagtctgatgccatgttcacctaagactaccgcagtcgaagataccgtccaggctggaagacaaatggaactggtcagcgtggaggcccagagcagcccaggcctccacatgcgcaagggggtgagcatcgcagtcagcaccggtgcgtccttgttctggaatgcagccggagaggatcaggagcctgattctcaaatgaagcaggacgacacaaagatctcttcagaagacatgaatttcagcgtcgacatcaacaacgaggtgacttctttgcctggcagcgcaagcagcttaaaggccgtggatatcccatcattcgaagagtcaaacattgcagttgaagaagaatttaatcaaccactctctgtgtcttag

SEQ ID NO: 204320 - DNA, 3867 bp, synthetic construct
  misc_feature 1..3867: note = Description of Artificial Sequence: Synthetic coding sequence
  source 1..3867: mol_type = other DNA
atggagcccatctaccccttcgcccggccccagatgaacacccggtttccatcatctaggatggttccttttcattttcctcccagcaagtgcgctctgtggaatccaaccccgaccggggatttcatatatctgcatcttagctactaccggaaccccaaactggtggtcactgaaaagacaatcaggctcgcgtacaggcatgcaaagcaaaacaagaaaaacagtagctgctttcttctgggatccctcactgccgacgaagacgaggagggggtgaccctgacagtcgacagattcgatccgggacgcgaggtccccgagtgtctagagatcactccaacagcttccctgccaggagattttctgatcccttgtaaggtccatacgcaggagttatgttctcgggaaatgatcgtacattccgtcgacgattttagcagcgccctgaaagccttgcagtgccatatctgtagcaaagacagcctggactgcggtaagcttctgtctttaagagtgcacatcacctcccgagagtctttggactccgtggagttcgatcttcactgggccgccgtgacactggccaataacttcaagtgcacccccgtaaagcctatcccaatcatccctaccgctctggcccgtaacctgagctcaaatcttaacatttcacaggtccagggcacatacaaatatggctacctgaccatggacgaaacccgaaagctgctgctgcttctggagtccgacccaaaggtgtactccctgcccctggtgggaatctggctgagcggcattactcacatttactctccccaggtgtgggcctgttgtctccgctatatttttaattcaagcgttcaggaacgtgtctttagcgagagcggcaactttatcatcgtcttgtactctatgacacacaaggaacctgagttttacgaatgctttccatgcgacggcaagatccctgactttcggttccaactgctgactagcaaagaaactctgcacctgtttaaaaacgtggaaccgcccgataaaaatcccatcagatgcgagctgagcgcagagagccaaaatgcagaaaccgagttcttcagcaaagcttccaaaaatttctcaattaagaggagtagccagaagctgtcctccggaaagatgccaattcacgaccatgactcaggggtggaagatgaggacttctctcccaggcccatcccaagccctcaccctgtctcacagaaaatctccaagatccagccaagtgtgcccgaattgtcacttgtcctggatgggaactttattgaaagtaaccccctcccaacccctctggagatggtgaacaacgagaatccaccactgatcaatcacctggagcatttgaagccgttgcagcctcagctctacgatgaaaaacactctcctgaggttgaagcaggggagccttctctaaggggtatccccaaccaattaaaccaggacaagcctgcgctgctacgacattgcaaggtgcgccagccaccagcctacaaaaagggaaatcctcatactagaaattccatcaagccatcaagccacaatggcccaagccacgatatttttgagaaacttcagacagtgtcagccggaaacgtccagaatgaggaatatcccattaggccctcaacactcaactctagacaaagttcacttgctccacagtcacagccacacgacttcgtcttcagtccccacaatagcggccggccaatggaactccaaattcctaccccccccttaccctcttactgctccactaacgtgtgtcgatgctgccagcatcacagtcacattcagtattcacctctgaattcttggcaaggggctaatactgtgggatccatccaggacgtccagagtgaagccctgcaaaagcactcacttttccacccgtccggatgccccgccctttactgtaatgctttctgcagctccagtagcccgatcgccttgcgcccacagggtgacatgggatcttgctcccctcattctaatatagagccttccccggtggcacggccaccatcacatatggatctttgcaatccccagccgtgcacagtttgcatgcacactccaaagaccgaaagcgacaatggcatgatgggtctttcacctgatgcgtatagattcctgactgaacaggaccgacagttacgcctgctccaggcacagattcagcgtctgctcgaggcccagagcctgatgccttgctccccaaaaaccaccgctgttgaagatactgtgcaggcaggccgacagatggaacttgtgagcgtggaggcacagtccagccctgggctccacatgcgcaaaggcgtttcaatagcagtgtcaactggggcttccctgttttggaacgctgccggtgaagatcaagagcccgacagtcaaatgaaacaggatgacaccaagatttcttcagaggacatgaatttctcagttgacatcaataatgaggtaacaagccttcctgggtcagcctcctctctcaaggcagtagacatcccatcctttgaagagtctaatattgcagtggaggaggagttcaaccagccactgtctgtttcaaattctagtagcctggtcgtgaggaaagagccagatgtgccggtgttttttccgtcaggccagcttgctgagagtgtcagcatgtgcctgcaaacagggcccactgggggagccagtaacaacagcgagactagcgaggaacccaaaatcgagcatgttatgcagcccttattgcaccagccctctgataatcagaaaatctatcaagatttactagggcaggtgaaccatctgttaaattcttcttctaaagagaccgaacagcctagcacaaaggccgtcattatttcacatgaatgtacaaggacacagaacgtgtatcatacgaaaaaaaagacacaccactctcggcttgtggataaggactgtgtccttaatgccacactcaaacagctgaggagtctgggagttaagatagatagcccaacaaaggttaaaaagaatgcacacaatgtggatcatgcttccgtgcttgcttgcatctcaccggaggcggtgatcagtggactgaattgcatgagcttcgctaacgtgggcatgtcagggctaagtcccaacggtgttgatctgtctatggaggcaaacgcaattgcactgaaataccttaatgagaaccagctgagtcagctaagtgtgacaaggtccaatcagaataattgtgacccattctcactgctacatatcaacaccgacagatcaactgttggcctctccctgatctcccctaacaatatgtcatttgccacgaaaaaatacatgaaacgctacggcctcttgcagtccagcgataattccgaagacgaagaagaaccaccagacaacgcagattccaaaagcgaatatctgttgaatcagaaccttcgctctatccctgaacagttggggggccagaaggagccgagcaaaaatgaccacgaaattataaactgctctaattgtgagtcagttggtactaatgccgatacccctgtcctccgtaatattaccaatgaggtgttacagaccaaagcaaagcagcagctcaccgagaagccagcctttctggtcaagaacttaaaacctagccctgccgtgaatctgcgaactggcaaggctgaattcacccaacacccagaaaaggaaaatgaaggggatattaccattttcccagagagcctacaaccctctgagacacttaaacagatgaacagcatgaactctgtgggaacttttttggacgtgaagaggctgcggcagcttccaaagttgttctag

SEQ ID NO: 204321 - DNA, 606 bp, synthetic construct
  misc_feature 1..606: note = Description of Artificial Sequence: Synthetic coding sequence
  source 1..606: mol_type = other DNA
atgagcttcgccaccctgcggcccgccccccccggccggtacctgtaccccgaggtatctcctctgtccgaagatgaggatagaggatcggactcatcgggatccgatgagaagccctgtcgcgtgcacgctgcaagatgcggccttcagggcgcccgaagacgagccggcgggcggcgggccggaggaggagggccagggggtaggccaggaagggaacccaggcagcgtcacaccgcgaacgctcgcgagagagaccgaaccaatagcgtgaacacagccttcacagcgctccgcacactgattcccacagagcccgcagacagaaagttaagcaagattgaaacccttaggctagctagcagctacatatcccacctgggcaatgttctactggcaggcgaggcctgtggcgatggacagccgtgccacagtggtccagctttctttcacgccgcacgcgcaggttctcccccgccacctccccctcccccacccgcacgcgatggcgaaaatactcagcctaaacagatctgtacattctgtctgagtaatcagagaaagctttccaaagatcgcgatcgcaagactgccatcagaagctag

SEQ ID NO: 204322 - DNA, 642 bp, synthetic construct
  misc_feature 1..642: note = Description of Artificial Sequence: Synthetic coding sequence
  source 1..642: mol_type = other DNA
atgcagctgcccctggccctgtgcctggtgtgcctgctggtgcacaccgcttttcgcgtggttgagggccaggggtggcaggccttcaaaaacgacgcgacagagataatacccgagctgggagaatatcccgagcctccccccgaactggaaaataataaaacaatgaatcgggccgaaaacggcggaagaccacctcaccacccgttcgagaccaaagacgtgtcagagtactcatgcagggagctgcattttaccagatatgtgactgatggtccttgcagatctgcaaagcccgtgacggagctggtgtgtagcggccaatgtgggcccgcgcgccttcttccaaacgctatcggcaggggtaagtggtggaggccaagtggacccgacttccgatgtattccagatcgctacagagcccagagagtccagctgctgtgcccaggtggtgaggctcctagagcccgcaaggtgcgtcttgtagcgagttgtaaatgcaaacgactgacccgctttcataaccagagtgaactgaaggacttcggcacagaggccgcacgcccgcagaaaggtcgaaaacccagaccacgtgcccggtctgcaaaggcaaaccaggccgagttagagaacgcctattag

SEQ ID NO: 204323 - DNA, 906 bp, synthetic construct
  misc_feature 1..906: note = Description of Artificial Sequence: Synthetic coding sequence
  source 1..906: mol_type = other DNA
atggccatgctggtgctggtgcccggccgggtgatgcggcccctgggaggccaactgtggcgatttctaccaagaggtctagaattctggggtccggcagaaggaaccgcgagagttctcctgcgtcaattctgcgcacgccaggccgaggcatggcgtgcctcagggaggcctggctattgcctgggaacgaggcctctgtcaactgctagacctcctcctccatggtctcagaaggggcctggcgacagtacaagacccagcaagccaggtcctgtgagctggaaatcccttgcaattacctttgccatcggcggtgcattattagctggtatgaaacacgtgaaaaaagaaaaggctgagaaactggagaaagagcggcagaggcacattgggaagccgcttctcggggggcccttttccctgacgacacacaccggtgagagaaagaccgacaaggattacctcgggcagtggttactcatttactttggcttcacccactgccccgatgtatgtccagaagaactggagaaaatgatccaggtagtggacgagatagactccatcactacactgcctgaccttacgcccttatttatttctatcgaccctgagcgcgataccaaagaagctatcgccaattatgttaaggaattttccccaaagctagtcgggctgacagggacacgggaggaagttgatcaagtagcccgggcatatagggtgtactactctcctggcccaaaggacgaggacgaagattacatcgtcgaccacaccataatcatgtatttaataggacctgacggggaattcctggattactttggtcagaataagcgtaaaggagaaatagctgcttcaattgcaacccacatgcgaccatatcggaagaaaagttag

SEQ ID NO: 204324 - DNA, 813 bp, synthetic construct
  misc_feature 1..813: note = Description of Artificial Sequence: Synthetic coding sequence
  source 1..813: mol_type = other DNA
atggccatgctggtgctggtgcccggccgggtgatgcggcccctgggcgggcaattgtggagatttctgccccgcggtctggagttctgggggccagccgaaggcacagcccgggttctgctgagacagttctgcgcgagacaagctgaggcttggagagccagcggccgtcccggctactgtttgggaactaggcccctgtccactgcccggcccccaccaccctggtctcagaaggggcccggtgactcgacccggccaagtaagcctggcccggtgagctggaaatccctcgcgatcaccttcgcgattggaggggctctgttagctgggatgaagcacgttaagaaagagaaggctgaaaagctggaaaaggaaagacagcgtcatattggcaaacccctgttggggggccctttttccctgactacccacaccggggaacgaaagacagataaggactacctcgattcgatcaccactttgccagatctgacaccccttttcatttctatagaccccgagagagatacgaaggaggcgatagctaactatgtgaaagagttttctcctaagctggtcggtctcaccggtactcgggaggaagtggaccaggttgccagggcctaccgggtatactactcccctggccctaaggacgaagacgaggactatatcgtggaccataccattataatgtacttaatcggaccagatggggaattcttggactatttcgggcagaataagcggaagggagagattgccgcctccatagctacgcatatgaggccttatcggaaaaagtcttag

SEQ ID NO: 204325 - DNA, 801 bp, synthetic construct
  misc_feature 1..801: note = Description of Artificial Sequence: Synthetic coding sequence
  source 1..801: mol_type = other DNA
atgctgctgctgacccggagccccaccgcctggcaccggctgagccaacttaagccgcgtgtactgcctggcacccttggcggccaagcattgcacctgagatcttggctcctgagcaggcagggcccagccgagacgggggggcaagggcagcctcaaggcccagggctgcgcactaggttactgataacggggctttttggggccgggctcgggggtgcctggttggctttgcgcgccgaaaaagagcgcttacagcaacagaagaggacggaggctctgaggcaggccgccgtgggccagggcgattttcacttgttggaccaccggggacgagctaggtgcaaggcagatttccggggacaatgggtgctgatgtacttcggttttacacactgcccggacatatgccccgatgagctggaaaagctggtgcaggtcgtgcgccagttagaagctgagcctgggttgccacctgtgcagccagtgtttataaccgtggacccggaacgtgacgacgtggaagctatggcacgatatgtgcaagactttcatccaagactgctggggcttaccgggtctacgaaacaggtggcacaggcctcgcattcctacagggtatactacaacgccgggcctaaagatgaggaccaggattacatcgtcgatcattctatagcaatctacttgctaaatccagacggcttgttcactgactactacgggcggtcccgctcggccgaacagatctccgattctgttcgccgccatatggccgcttttaggtccgtcctgtcatag

SEQ ID NO: 204326 - DNA, 801 bp, synthetic construct
  misc_feature 1..801: note = Description of Artificial Sequence: Synthetic coding sequence
  source 1..801: mol_type = other DNA
atgctgctgctgacccggagccccaccgcctggcaccggctgagccaactaaaaccacgggtgctgccgggaacactggggggccaggccctacatctccgctcctggctgttgtcccgccaggggcccgcagaaacaggagggcaaggccagccgcaggggccggggctgcgaaccaggttattaattacagggctcttcggcgccggcctgggtggcgcttggctggccctcagggccgaaaaggagcgcctccagcagcagaagcggacagaggctctgcgtcaggctgctgtggggcagggtgattttcacttgctggaccaccggggaagagcaagatgtaaggccgactttcgtggacagtgggtgttaatgtacttcggctttacacattgcccagacatctgccccgacgaactggagaaattggttcaagttgtgcggcaacttgaagcagagcccggattaccacctgtgcagccggtgttcattacagttgacccagagagagatgacgtcgaagcaatggcccgctatgtgcaggatttccaccctagacttctcggacttacagggtctactaagcaggtggcacaggcctcccacagttacagggtgtactacaacgccgggcccaaagacgaggaccaggactatattgtggaccactctatcgctatttaccttcttaaccctgacgggctttttacagactactatggaagaagtcggtccgcagagcagatttccgacagcgtgcggcgacacatggcagcctttagatccgtcctgtcctag

SEQ ID NO: 204327 - DNA, 411 bp, synthetic construct
  misc_feature 1..411: note = Description of Artificial Sequence: Synthetic coding sequence
  source 1..411: mol_type = other DNA
atgctgctgctgacccggagccccaccgcctggcaccggctgagccagctaaaacctagggtattacccggcacactgggtggacaagctttgcacctgagaagttggctgctgagcaggcaaggccctgcagagacgggaggccagggacagcctcagggtccgggcctgcggacacgtttgcttatcactggcctctttggtgcaggcctgggaggcgcctggctggctctgagagcggaaaaagaaagactgcaacagcagaaaaggaccgaagcacttcgtcaggccgctgtgggtcagggagatttccatttgctggatcatagagggcgagccagatgcaaagctgactttcgcggacagtgggtgttgatgtacttcggctttacccattgtcctgatatttag

SEQ ID NO: 204328 - DNA, 411 bp, synthetic construct
  misc_feature 1..411: note = Description of Artificial Sequence: Synthetic coding sequence
  source 1..411: mol_type = other DNA
atgctgctgctgacccggagccccaccgcctggcaccggctgagccaacttaaaccacgggtgctgcctggaacgttaggtggccaggccctacacttgcgcagctggctcctgagtaggcaggggcctgccgaaacaggcggtcagggtcagccacagggccctggccttcgcactcgtctgctcattactggcctcttcggcgcagggcttggcggagcttggctcgctctgcgggcagaaaaagagcgcttgcagcagcagaagcgcacagaagccctgaggcaagccgcagtgggccaaggagacttccacctgcttgaccacagagggcgggctagatgcaaagctgattttagaggacagtgggtcctcatgtactttggcttcacccattgccccgatatatag

SEQ ID NO: 204329 - DNA, 801 bp, synthetic construct
  misc_feature 1..801: note = Description of Artificial Sequence: Synthetic coding sequence
  source 1..801: mol_type = other DNA
atgctgctgctgacccggagccccaccgcctggcaccggctgagccagttaaagcctagagtgctgcctggaacgcttgggggacaggctcttcacttgaggtcatggttattgtcccgacagggccccgcagaaacagggggtcagggccagccacaaggacccggcttgcgtaccagactgctgataaccggcctgttcggagccgggctcggcggagcctggcttgccttgcgcgctgagaaggaacgactccagcagcagaagcggactgaagccctcaggcaggccgccgtcggccagggagatttccatcttctcgaccacaggggtcgagctagatgtaaagccgacttccgtgggcagtgggtgttaatgtacttcggttttacacattgtcccgacatctgtccagacgaactagagaagctcgtgcaggtggttagacagctcgaagcggagcctggcctccctcccgtacagccggttttcataaccgtcgacccggagagagatgacgtggaggccatggctcgctacgtgcaggactttcatccaagactgttaggactaactggatccacaaaacaggttgcacaggcctcccattcataccgggtatattacaacgccgggcccaaggatgaggaccaggattatattgtggatcactcaatcgctatatatctcctcaatcccgacggcctgttcaccgactattatggccgtagccgcagcgcagagcagatttcagatagcgtgcgcaggcacatggccgcctttcgctccgtgttgtcatag

SEQ ID NO: 204330 - DNA, 801 bp, synthetic construct
  misc_feature 1..801: note = Description of Artificial Sequence: Synthetic coding sequence
  source 1..801: mol_type = other DNA
atgctgctgctgacccggagccccaccgcctggcaccggctgagccaactgaagcctcgcgtgctgccaggaaccttgggggggcaggccctccacctgcggagctggttgttaagccggcaggggccagcggaaactggcggacaaggccagccgcaaggacctggtttgcgaaccagattgttgattactgggctgttcggggccggattaggaggagcatggttggcactgcgcgcggagaaggagaggctccagcaacagaagcgaacagaagccttaaggcaagcggcagtcggacaaggggacttccacctgctcgatcacaggggcagagcacggtgtaaggctgatttccgcggtcagtgggtactgatgtacttcggtttcacacattgccctgacatttgcccagatgaactagaaaagttggtgcaggtcgtaaggcagctcgaagctgaaccaggcttgccccctgttcaacctgtgttcatcactgtcgatccagaacgggacgatgtcgaggccatggccagatacgtacaagactttcacccacggctgttgggtctcaccgggagcacgaaacaggtggctcaggcatcgcactcctaccgagtttactacaatgctggccctaaagacgaggaccaggattacattgtggaccactctattgctatttatctgttgaacccggatggactcttcacggattattacgggcggagcagatccgccgagcaaatatccgacagcgttcgacgccatatggccgcttttaggagcgtgcttagctag

SEQ ID NO: 204331 - DNA, 1047 bp, synthetic construct
  misc_feature 1..1047: note = Description of Artificial Sequence: Synthetic coding sequence
  source 1..1047: mol_type = other DNA
atgccccggagcttcctggtgaagaaggtgaagctggacgccttctcatccgctgatttggagagtgcatatgggagggcccggtcagatcttggagcccccttgcatgacaaggggtatttgagcgattacgttggcccctcttctgtctatgatggagacgctgaggcagcgctcctgaaaggaccctcccctgaacccatgtacgccgctgccgtccgcggggagctgggcccagcagctgcaggaagcgcacctccgcctactccacgtcctgagcttgcaacagcggccgggggttacataaatggtgacgccgccgtgagcgaggggtacgcggcggacgcttttttcatcactgacggtcgctcaaggcgaaaggcctctaatgccggatctgccgccgccccatcaactgccagcgcagccgcaccagatggcgatgctggggggggcgggggtgccggcggccggtccttgggctccgggccgggaggacgggggggcacacgtgctggcgctgggaccgaagcccgcgcaggccctggcgccgccggcgccggcggcagacacgcttgtggagagtgtgggaaaacctatgcaacaagcagtaatctatcacgccacaaacagacacatcggtccttggattcacagctagccagaagatgtcctacttgtggcaaggtttacgtctcaatgccagctatggcaatgcacctcctgacccacgaccttagacataagtgtggcgtctgtgggaaggcattttccaggccttggctcctgcagggccacatgagaagtcacactggagagaaacctttcggatgtgcccactgtggtaaggctttcgccgacaggtccaatctgagggcacatatgcagacccacagcgcttttaaacatttccagtgcaagaggtgcaagaaatcgtttgctcttaagagttacctcaataagcactacgagtctgcatgtttcaaaggaggagcaggtggtcctgcagctcctgcccccccacagctgtcgcccgttcaagcttag

SEQ ID NO: 204332 - DNA, 4893 bp, synthetic construct
  misc_feature 1..4893: note = Description of Artificial Sequence: Synthetic coding sequence
  source 1..4893: mol_type = other DNA
atgctgaagtgcatccccctgtggcggtgcaaccggcacgtggagtcagttgacaagaggcactgttccctgcaagccgtcccagaggagatctaccgctacagcaggtctctggaggaactgctactggacgccaatcaattaagagagcttccaaagcccttttttcggcttctgaatctgcgaaaactgggattgtccgataacgaaattcaaaggctccccccggaagtcgccaactttatgcagcttgtagaattggacgtgagcaggaacgatatccccgagattccagagtcaattaaattctgcaaggccctcgaaattgccgatttcagcggtaacccattgtctagattgccagacggttttactcagctgcgctccctggcccaccttgccctcaatgatgtgagcctccaagcattgcctggtgacgtcggaaatctggctaatctagtgacgctcgagctgcgagagaacctcctcaagagcttgccagcaagcctgagcttcctagtcaagctagagcaactcgatcttggaggaaatgatctggaagtgctccctgatactcttggcgctttacccaatctccgggaactctggctggataggaaccagctgagtgccttgccgccagagctgggaaatctgaggcggttggtatgcctagacgttagtgagaatagactagaggagctgcccgccgaactgggggggctagtgctgctgactgatctgcttctgagccagaatctgctccggagactgccggacgggataggccaattaaaacagctgtctatcctgaaggtggaccagaacagactttgcgaagtgaccgaagctattggcgactgtgagaacctctccgagctgattctgaccgagaaccttcttatggcattacccaggagcttgggaaaactaaccaagctcacaaacctgaatgtggaccgtaatcacttagaggcccttccacccgaaataggcgggtgcgtggcattatccgttcttagccttcgtgacaatagattggcggtcctgccccctgagttagcgcatactactgagctgcatgtgctggatgttgccgggaataggctccaaagcctcccttttgccttgacccacctaaatctgaaggccttgtggctggccgagaaccaggcccaacctatgctcaggttccaaacagaggacgacgctcgtacaggcgaaaaggttctcacctgttaccttttgccccaacagccccctccttctctagaagatgccggacagcagggcagcctttcagagacttggtctgacgctcctcctagtcgggtttcagtcatccaattcctggaggcgccaattggtgacgaggacgcagaagaggcagctgccgagaagagaggtcttcagagaagagcgactccgcacccttccgaattgaaggttatgaagaggagtattgaggggaggagatctgaggcatgcccgtgccagccggacagcggatctccattacccgccgaggaggagaagcggctttcagcagagtcaggattgtctgaggactctcggccttcggcctctactgtgagcgaagctgaaccggagggtcctagcgctgaggcccagggtgggagtcagcaggaggctaccaccgcgggaggggaggaggacgctgaggaagactaccaggagcctactgttcattttgcagaggatgcactgctgccgggggacgacagggagattgaagagggccagcctgaagctccttggaccctgcccggtggacgccagcggttgatacgaaaagataccccgcattacaagaaacactttaagatcagcaagttgccccagcccgaggccgtggtggcactactccaggggatgcagccagatggagagggccccgttgccccgggcggctggcacaacggaccacacgctccgtgggcacccagggctcagaaggaggaggaggaggaagaggaggggtccccccaggaggaagaggtggaagaagaggaggagaacagggccgaggaggaggaagcatcaactgaggaggaggacaaggagggggctgtcgtgtccgctccaagtgtgaaaggagttagcttcgaccaggctaacaaccttctgattgagccggcccgcatagaggaggaggaactaactctgactatcttaagacagaccggtgggctggggatctccatcgccggaggcaaagggagtaccccctacaagggagatgatgaagggattttcatttcaagagtgtcagaagagggccctgccgctcgcgctggggtacgggtgggggataagttacttgaagtgaacggcgtcgctctgcagggcgccgaacatcacgaggccgtcgaggctctgagaggcgccgggactgccgtccaaatgagggtgtggcgggagaggatggtggagcctgaaaacgcagtcaccattacgccacttcggcctgaggacgattactcccctcgcgagaggagggggggcggcctgagactgccgcttttgccacctgaatccccaggcccactgcggcaaaggcacgttgcctgtctggcaaggagtgaaagggggctcggctttagcattgcagggggaaaaggctctacgccttacagagcgggtgatgccggcatcttcgtctcccggatcgccgaagggggcgccgcacatagggcaggtaccctgcaggtgggcgacagagtgctttctattaacggagtagatgtgaccgaggccaggcatgaccatgccgtttccttgttgacagctgcatcacccacgatcgccctgctcctggagcgagaggctggcggacctctgcccccaagcccacttcctcactcttcaccaccaaccgcggcagtggccactacgagtattactaccgccacgcccggcgtgcctggcttgccttcactggcaccatctctcctcgcggccgccctggaaggcccttaccccgtcgaagagatccgccttccaagagccggaggtcccttgggtctgtccattgtgggcggctccgaccactcgtctcacccattcggtgttcaggagcccggtgttttcatttccaaagtactgcccaggggtcttgccgctcggagcggactccgggtgggagaccgcattttggccgtgaatggccaagatgtgagggacgccactcatcaggaggccgtgtccgctttgctccggccctgcctggagctgtcactgctcgtgaggagagatcccgcccccccaggactgagggagttgtgtatacagaaagccccaggagaacggcttggtatttctataagaggcggcgcacgcggccacgccggaaatccgagagatcctaccgatgagggcatttttatctcgaaggtgtcacccaccggagctgctggacgcgatggtaggttgagagttggcctacggctgctggaagtcaaccagcagagtttgttaggtctgacccacggcgaagccgttcagctgctcaggtcagtaggagacacactgacagtgctggtctgcgatggctttgaagcctctaccgatgcagccctcgaagtgagccccggcgtgatcgctaatccatttgccgctgggatcgggcaccggaacagccttgagtccatatccagtatcgatagggagctgagcccggaaggccccggcaaagaaaaagagctgcccgggcagacccttcattggggcccagaggctacagaggccgctggacgaggtcttcagcccctcaagctggattatagagctctggctgcggttccatctgccggatctgtgcagcgggtaccgagcggtgcggccggtgggaagatggcagagagcccatgctctccatctggccagcaacccccttcgcctcccagccccgatgaacttcccgctaatgtaaaacaggcctaccgtgcctttgccgcagtgcccacatctcacccccctgaagatgccccagctcagccccccacacccgggcctgctgccagcccagaacagctatccttccgagagaggcagaaatacttcgagctcgaggtgcgtgtccctcaggcagaggggccacctaaacgagtgtctctcgttggtgccgatgacctgcgcaaaatgcaggaggaggaggcccggaagctccagcaaaaacgagctcagatgctgcgggaagcagccgaggcgggggccgaagcccgtctggctctcgacggggagacattgggcgaggaggaacaggaagatgagcagcccccttgggcatctccttctccgacgtcccgccagagccctgcgtctcctcccccattgggaggtggagccccagtcagaaccgctaaagcggaacggaggcatcaggagcgtctgagagtacagtcacccgagccgccggcaccagaaagagccctctcacctgccgaacttagggctctagaagccgagaaacgagcattgtggagagcagccaggatgaaatcccttgagcaagatgccctgagggcacaaatggttctgtctcggagccaggaaggccgcggaacgcgcgggcccctggaaaggctggctgaagcccccagcccagctcccacaccaagtccaactcctgtagaagacctggggcctcaaacatcaacaagtcctggcagacttagccctgactttgctgaagaactgagatccctggagccatcgccttcacccggccctcaggaagaggacggtgaggttgccctcgtcctcctcggaagaccctccccgggcgccgtggggcctgaagacgtggcgttgtgttcttctcgtcgacccgtgagacccggacggcgggggctgggccccgtcccaagctag

SEQ ID NO: 204333 - DNA, 4650 bp, synthetic construct
  misc_feature 1..4650: note = Description of Artificial Sequence: Synthetic coding sequence
  source 1..4650: mol_type = other DNA
atgcagctggtggagctggacgtgagccggaacgacatccccgagattcccgaatccatcaaattctgcaaagcactcgagatcgcagatttcagtggcaatcccctgagccggctgcccgatggatttacacagctgaggtctctcgctcatctggccttaaatgacgtgagtctgcaagctctgccaggtgacgtgggaaatttggccaacctggtgactctggagttgagggaaaacctcctaaagagcttgcctgcatctctaagtttccttgtcaagctcgagcaattggacctgggaggaaatgacctggaagtgctcccagacaccctgggcgcgctccccaatcttagggaattgtggcttgaccgtaaccaactaagcgccctaccgcctgaactaggcaatcttagaagactagtgtgcctcgacgtgtccgagaaccgacttgaggagcttcccgcggaacttggtggactggtgttactgaccgatttactcctgtctcaaaatctgctgagacggctccctgacggcatcggacagctgaaacagctgagtattctcaaggtggaccaaaaccggctgtgtgaggtcacggaggcaatcggcgattgtgagaacttgtccgagctgatcttgacggagaatctgctaatggctctgccccggtctctgggtaagttgacaaagctaaccaacttgaatgttgacaggaatcatctggaagctctccctcccgaaatcggaggatgcgtggcgctatccgtgctgtctctgagggacaaccggttagccgtcctgccccctgagcttgcgcatacgacagagttacatgtgctcgatgtagccggtaaccgcctacaatctttgccctttgccctaacccacttgaaccttaaggctctgtggctcgccgagaatcaggcacagcctatgctccggtttcagactgaagatgatgctcggaccggggagaaggttctgacctgctacctcctgccacagcagcctcctccaagtctcgaagacgcaggtcaacagggcagcttgagtgaaacttggagtgacgctccccctagtcgggtgtccgtgatacaatttctcgaggcaccaattggggacgaagacgcggaagaagctgccgccgagaaaaggggcctccagagacgagccaccccgcacccaagcgagctcaaggtaatgaagcgcagtattgaaggcaggcggtctgaggcttgtccctgccagcctgattcaggatcacctctgcccgcagaggaggagaagcggctatcggcggagagtggcttgtccgaggactctagaccatctgcctccaccgtatctgaggccgagcccgagggcccatctgcggaggcacaggggggtagccagcaagaagccaccaccgccgggggggaggaggacgcagaggaggattaccaggagcccacagtgcactttgcagaggatgctctgctcccaggggacgatagagagattgaggaggggcaacccgaggccccttggactttgccaggcggtaggcagagattgatcaggaaggacactcctcattacaagaaacatttcaaaatttcaaagctaccccagccagaggctgttgtggctttactacaggggatgcagcccgatggtgagggacctgtcgcgcccggtggctggcacaacggcccccacgcgccctgggccccccgcgcacagaaggaggaagaagaggaggaagaagggtccccacaggaagaagaggtggaggaagaggaagagaatagggcagaagaggaggaagcctctacggaagaggaagacaaggagggcgccgtggtgtcagccccatcagtaaaaggggtaagcttcgaccaggccaacaaccttctgatcgagccagctagaatcgaagaggaagagcttactttaacaatactgcgccaaacgggtggcctaggaatctccattgcggggggcaagggcagcactccctataaaggcgatgatgaggggattttcatctcaagggttagcgaggagggcccggcagcgcgggccggcgtaagggtaggagacaagttacttgaagtgaatggagtggcactgcagggagccgagcaccacgaggctgtggaagctctgcgaggcgctggcaccgccgtacagatgcgtgtctggagagaaagaatggtggagcccgagaacgccgttactataacgcccttgcgccctgaggatgactattcacctagagaacggcgaggtggtggactgaggctgcctctgctgccacccgagtcccccggaccactgagacaacggcacgtcgcatgcctagcccgttctgagaggggactcggctttagcattgctggaggcaaaggcagtactccgtatagggcaggcgatgcaggcattttcgtatctagaatagcagaaggtggcgccgctcacagagcagggacacttcaggtcggtgatcgggtgctctctatcaacggcgttgacgtgacagaggcacggcatgatcacgccgtatccttgctgactgcagccagtccaaccatcgcgctgttgctggaaagggaggctggcggccccctccctccatctcccctgccgcatagttctccccctaccgctgctgtggccactacgagtattactaccgccacacctggggtgccggggctgccaagcctggcacctagcctactggccgcagcactggaggggccttaccctgtggaggaaattagactgccgcgggctgggggaccccttggcctgtccatcgtggggggttcagaccactcctcgcacccattcggagttcaggaaccaggagttttcatatctaaggtgttacctaggggactggccgctcggagtggactacgagtgggcgatcgaatcctggctgtcaatggtcaggatgtccgggacgctacacaccaggaggctgtgagtgctttactgaggccgtgcctggaactgagcctactggtccgacgtgaccccgccccacctggtttacgcgagttatgtattcagaaagcccctggcgagagactgggcatatcgattcgcggtggagcccgcgggcatgccggtaaccccagggacccaaccgatgaaggcattttcattagcaaggttagcccaacaggcgccgcagggagggatgggcgcctgcgcgtcggtctccggctgttagaagtgaatcagcagagcttgctgggtctgactcacggcgaggccgtgcagttactaaggagcgtcggcgacaccctgacagtcctggtctgtgatggctttgaggcctcaactgacgcagcactggaggtgagcccgggcgtcattgccaacccattcgctgctggcatcggacaccgcaatagcttagagtctatctcatccattgatagagagctgtcgcccgagggccccggaaaagagaaggaactcccaggccagaccttgcactggggaccagaggcgaccgaggcagccggaagaggtttgcaaccattgaagttggactaccgggccctggcagccgttccttcggccggcagcgtgcagagggttcccagtggggccgccggcggcaagatggccgaatccccatgctctccatccggacagcagcccccaagcccaccctctcccgatgagctgcctgctaatgtgaagcaagcataccgggccttcgcagctgtcccgacgagtcacccacccgaagacgccccagctcagccacccacacctgggcctgccgcttctcccgaacagctaagttttcgcgagaggcagaaatacttcgagttagaagtccgagtgccccaagccgaagggccccctaagagggtaagccttgtgggtgctgatgatctccgcaaaatgcaagaggaggaggctaggaagctgcagcagaagagggcccagatgttaagggaggcggctgaggccggcgctgaggctagacttgctctggatggagagaccttaggagaggaagaacaggaggacgaacagccaccatgggcttctccttctccaacctcgcgccagtctccagcctcaccacccccactcggaggtggggctcctgtgagaactgccaaagcagaaaggcgccaccaagagcggctcagggtgcagtcccccgaaccccctgcacctgagcgcgctctatccccagcagaacttagagcattagaggccgagaagcgggccctatggcgggcagctagaatgaagagcctggagcaagacgctttgagagctcaaatggttttatcccgttctcaagaagggcggggcacccgcggtcccctggaacggctggcagaggcacctagtccagctcctacaccgagtccaactccagtcgaggacctcgggccacaaacttccacctcgccaggtcgcctttccccagattttgcagaagagctgcgctccctcgaaccatccccctcgccaggacctcaggaagaagatggggaggtggctctggtactgctgggtcggccttcaccaggtgcagtgggcccagaagatgtggcgttatgttcttcccgccggccagtgcgtccgggccgcagagggctgggccccgtgccgtcatag

SEQ ID NO: 204334 - DNA, 2268 bp, synthetic construct
  misc_feature 1..2268: note = Description of Artificial Sequence: Synthetic coding sequence
  source 1..2268: mol_type = other DNA
atgcagcccgacggcgagggccccgtggcccccggcggctggcacaacgggcctcacgccccatgggcgccccgagcccagaaagaagaggaagaagaagaggaagggagcccacaggaagaggaggtggaggaggaggaagagaatagggccgaggaggaggaagccagcacagaagaagaagacaaagagggggccgtggtctccgccccctcagtgaagggcgtttcttttgaccaagctaataacctgctgattgagcctgctcggattgaagaggaagagctgactctcaccatcctgcggcagaccggaggactggggatttccatcgctggaggaaaaggttctacaccatacaagggcgacgatgaaggaatcttcataagtcgtgtgtcagaagagggtcccgccgctcgcgcgggggtgagggtgggggataagcttttagaggtgaacggggttgctttgcagggtgcggagcaccatgaggcggtcgaagctctaagaggagccgggactgctgtccagatgcgggtttggcgagaaagaatggtagagccagagaacgccgtgaccattacccccctgaggccagaggacgattatagtccgagggagcgaaggggaggcggtctcagattgcctctgctgcctccagagagccctgggccacttcgacagcggcacgtggcatgcttagccaggtccgagaggggcctcgggttttcaattgctgggggaaagggatcaaccccttaccgcgcaggtgacgcggggatattcgtctcacggattgccgaggggggcgccgctcatcgcgctggcaccctgcaggtgggagaccgcgtgctgagtattaatggtgtggacgttacagaggccaggcatgaccacgccgtttccctgttaaccgctgcatcccctacaatcgctttactcctggagcgggaggctgggggtcccttacctccaagtccccttccccacagctctccccctaccgcagcagtagccactacttcaatcacaaccgctacgccaggtgtgccagggctaccctccctggccccatcattactagcagccgccttggaggggccctatcctgtggaggaaatcagactccctcgcgcgggcggccctttgggcctgtctattgtcggcgggagtgatcactcttcccaccctttcggggtgcaggagcctggcgtgtttatctctaaagttctccccagaggtcttgccgcccgtagcggactccgggtaggcgatcggattctggccgtaaacggacaagatgtgagggacgcaacacaccaagaggccgtgagtgccctgctgcgcccctgtttggagctcagcctgcttgtgcgtcgggatcccgcccccccagggctgagggaattatgtatccagaaagcacccggtgaacggctgggtatcagcataagaggcggggcccgcggacacgccgggaatcctagggaccccactgatgaagggatcttcatttcaaaagtgtctcctactggagccgctggccgcgacggacgcttacgggtagggcttcgattattggaggtgaatcagcaaagcctacttggcctcacacacggtgaagccgtccaactgctgagatcagtcggcgacaccctgaccgtgcttgtgtgcgatggtttcgaagcctcaacagatgcagcactggaagtgagcccaggcgtcattgctaacccttttgcagctggcattggacaccgaaattccctggaatctatctcctctattgatcgagagctgtctcctgaaggcccaggcaaggagaaagagttaccggggcagaccctgcactgggggcctgaagcaacagaagcagctggcagaggactacagcctctgaagttagattaccgagcactggcggcagtgccaagcgctggcagcgtgcaaagggtgcccagtggggcagccggaggcaagatggcagaaagtccttgcagcccttctggtcagcaaccccccagtccacccagccccgatgagttgcctgccaacgttaaacaggcgtaccgtgcatttgctgccgtccctaccagccaccctcccgaggatgcgcctgcgcagcctcctaccccagggcctgccgccagccctgagcaactatctttcagagaacgacaaaaatacttcgaattggaagttagggtcccccaggcagaagggcctctgcggccagggcgcaggggcctgggccccgtgcccagttag

SEQ ID NO: 204335 - DNA, 4968 bp, synthetic construct
  misc_feature 1..4968: note = Description of Artificial Sequence: Synthetic coding sequence
  source 1..4968: mol_type = other DNA
atgctgaagtgcatccccctgtggcggtgcaaccggcacgtggagagcgttgataaaagacattgctccttgcaggccgtcccagaggaaatttatcggtattcgagaagcctcgaggaactgctcctcgatgctaaccaactccgagagttacctaaaccgttctttagacttcttaacctgagaaagctggggctttccgataacgagattcagcgacttcctcccgaagtagccaatttcatgcagctggtcgagctggacgtttcgagaaatgacatccctgaaattccagagtccataaaattttgtaaagccctagagattgctgatttctcagggaaccctttaagtcgcttaccggatgggtttacccagctccggtcactggctcacctcgctctcaacgacgtaagtctgcaagcgctacccggcgacgtcggcaatttagccaatctcgttacactggagctgagagagaacctgctgaagtctctacccgcatctctcagcttcctggttaaactcgagcaactagatctgggcggaaatgacctagaggttctgcccgatacactgggcgccctgcccaacctgagagagctgtggctcgacagaaaccagttgtcggctctgccaccggaactggggaacttgagacgtcttgtgtgtcttgacgtgagcgaaaataggctggaggagctccctgcagaactcgggggactggtcctcctgactgatctcctgctgagccaaaatctgctgagacgcctacctgatggaataggacagctcaaacagttatccatactgaaggttgatcaaaatcgtctgtgcgaggtcacagaagcaatcggtgactgtgaaaatctgtccgagcttatacttacggaaaatctgctcatggcgctgccacggtccctcggaaaactgaccaaattaactaatctgaacgtggatcgcaaccacctggaagctttgccgcctgaaatcggcgggtgcgtagcgctaagcgttctcagtctgcgcgataatcgcctcgccgttctccctccagagctggctcacaccacagagcttcatgtgctggatgtggccgggaaccgtctacaaagcctgccattcgccttgacacatttgaacctaaaagccctgtggctggccgaaaaccaggcacagccaatgctgaggttccagactgaagatgatgccagaactggggagaaggtcctgacctgctatttgctacctcagcagcccccacccagtctcgaggacgctggccagcagggctctttatctgaaacctggtccgacgcgcccccctcacgcgtcagcgtgattcagttcctcgaagcccccatcggagatgaagacgccgaggaagctgccgccgagaagagggggctccagagacgcgcgacaccgcacccaagtgaactgaaagtcatgaagcgctccattgaaggtagacgctccgaggcctgcccatgccagccagacagcggatcccctcttccagccgaggaagaaaagcgtctgtctgccgagtctggtctctccgaggattcccggccgagtgcctccaccgtgagcgaagccgaacccgaaggacccagtgcagaagcccaaggcggctctcaacaagaagctaccaccgccggaggagaagaagatgctgaggaagattatcaggaacctacagtgcattttgccgaagacgcgctgcttcccggagacgaccgggaaattgaagaagggcagcctgaggccccttggactctcccgggtggtcggcagcggctcatccgaaaggatactccgcattacaagaaacatttcaagataagcaagctgcctcagccagaggcagtggtggcactgcttcagggcatgcagcccgacggtgaaggacccgtggcacccggtggctggcacaacggccctcatgccccttgggccccacgggctcagaaggaggaagaggaggaggaggagggctccccacaggaagaagaagtggaggaggaggaagaaaacagggctgaggaggaagaggcctcaaccgaagaggaagataaggagggcgcggtggtttccgccccatctgtgaagggggtgagttttgatcaagccaacaacttgttaatcgagccagccaggatcgaggaagaagagctgactctcaccattctgagacagacaggaggcctcggaattagtatcgccgggggcaagggatccactccatacaaaggcgacgatgaaggtatctttatctcgagggtctcagaggaaggcccagctgctcgggccggggtgcgcgtgggagataagttactggaggttaatggggttgctctgcagggggccgagcaccatgaggcggttgaagccttgaggggtgctggcaccgcagtgcagatgcgggtctggcgcgaacggatggtagaacccgaaaacgctgtcactattacaccattgagacccgaggacgactacagcccccgagagcgaagggggggcggtctgagattgcctctgctccccccagagtcaccaggtcctctacgacaacggcacgtcgcatgccttgcccggtcagagagagggctgggattcagtattgcaggaggtaaagggtccacgccataccgggccggcgacgccgggatctttgtgagccgcattgcagagggcggcgctgcacaccgagcggggaccctccaggttggggacagggtgctgtccataaatggcgttgacgtgaccgaagctagacacgaccacgctgtctccttgctcaccgccgcctcccccactattgccctgctgctggagagggaggctggcggacccctgcccccctctccactgccccattcgtcccccccaaccgcggctgtcgccacaacctcaataacaacagcgacaccaggggttcccggactgccaagtctggctccaagcttgctggccgcagcactggagggaccatatccggtcgaggaaattcgcctgcctcgcgcgggcggccccctcggacttagcatcgtaggagggagcgaccactcttcccacccctttggcgtccaggaaccaggagtcttcataagtaaagtgctgcctcgcggacttgcagcacgtagtggcctgcgggtgggagacagaatcctggctgtcaatgggcaggacgtgcgcgatgctacccatcaggaagccgtgagtgccctgctgagaccctgccttgagcttagtctcctggtcaggagggatcctgcaccacccggcctgcgtgaactgtgcatccagaaagccccaggcgaaaggctcggcatcagcatccgaggaggcgcaaggggccacgccggaaatccaagagatccaactgacgagggtatttttatcagtaaggtctcccccacaggggcagccggcagagatgggcgcctgagagtgggcctaagactgctggaagtgaatcagcaaagcctgttagggctgacccacggtgaggccgtccagctgcttcgatccgtgggtgacactctcactgttctcgtgtgtgacggatttgaggccagcacagacgccgcgctggaggtttctcctggtgtaatcgccaacccattcgccgctggcatcggccaccggaactcactggaatctatttcgtcaatcgatcgggaattgtcccccgagggacccgggaaggagaaagaattgcctggtcagacactgcattgggggcctgaggccacagaagcagctggtaggggtcttcagccactcaaactggattaccgcgcgctggccgccgtccctagtgcaggctccgtacagcgagttcctagcggcgctgctggagggaagatggctgagtcaccttgcagccccagcggacagcagcctccttcgccaccttctccggatgaactacctgccaatgtcaagcaagcgtatcgcgcctttgctgccgtgccgacctcccacccccctgaggacgctccagcgcagccccctacgcccggccctgccgcgagtccagaacagctcagtttccgggaaagacagaagtacttcgaactcgaggtcagagtgccacaggccgagggcccccccaagagggtctccctggttggcgctgatgatctccgaaagatgcaggaagaggaagctcgcaagcttcagcaaaagagggcccagatgctgcgcgaggctgccgaagctggggctgaggcccgcctggccctggacggggagaccttgggagaagaggaacaggaggacgaacagcccccgtgggcctccccatccccaacctcacgccaatctcccgccagcccccctcctttaggagggggcgcccccgtacggactgctaaggctgagagacggcatcaggaaagactccgggttcagagcccagagcccccagcccctgaaagagccttatcacccgctgagctacgcgctctggaagccgagaagagagccttatggcgcgctgcgaggatgaagagcctagaacaggacgcactgcgggcccagatggtcctgagtagaagtcaggagggacgcggtacacggggcccactcgagcgcttagccgaggcaccaagtcccgctcctacaccaagccctactcctgtggaagatctggggccccagacctccacatccccgggcaggctccccctgagcgggaaaaagttcgactatcgcgccttcgccgccctgccaagttctagacccgtatatgacattcagagcccagattttgccgaggaactccggagtttagagccatcaccttctcctggcccacaggaggaagacggggaggtggccttggtgctgcttggacgtccatctcccggagctgtcgggccagaggacgtggccctgtgcagcagtagaagaccagttcgccccgggagacgggggttgggccccgtaccgtcctag

SEQ ID NO: 204336 - DNA, 2427 bp, synthetic construct
  misc_feature 1..2427: note = Description of Artificial Sequence: Synthetic coding sequence
  source 1..2427: mol_type = other DNA
atgtggttcttcgcccgggaccccgtgcgggacttccccttcgagctcatcccagagccgcctgagggcggtctgcctggaccttgggctctccaccgcgggcgtaaaaaagccactggcagtccggtcagcattttcgtttacgacgtcaagcctggggcggaggagcaaacccaagtggcaaaggccgcgtttaagaggttcaagacattgaggcaccccaacattctcgcttatattgacggtcttgagactgagaaatgccttcacgtcgtcaccgaggccgtcacaccgttgggtatatatctcaaagcccgggtggaagccggcggcttgaaggagctcgagatctcctggggccttcaccaaattgtgaaagcgctgtctttcctcgtgaacgactgttccctgattcacaacaatgtctgtatggccgccgttttcgtggacagggccggggagtggaagctgggcggcttggactacatgtacagcgctcagggtaatgggggcggccccccacgaaaggggattcctgaactggaacagtatgacccccccgagctcgcggatagctccggcagagttgttcgggaaaagtggagtgccgatatgtggaggctgggatgtctcatttgggaggtgtttaacggtcctctgccgcgcgctgctgctcttcgcaatcctggcaagattcctaagacactggtccctcattattgcgagctggtgggagcgaaccccaaggtgagacctaatccggcccgtttcctccaaaattgcagggctcccggtggattcatgtcaaataggttcgtagaaaccaacctgttcttagaggaaatacaaatcaaagaacccgccgagaaacagaagttcttccaggagctgtccaagtctctggacgcgttccctgaagatttttgccggcataaagttctaccccagctgctcacagcatttgagttcggaaacgctggagcagtggtgcttacccccttgtttaaagtgggcaagtttttgtccgcagaagaataccagcagaaaatcatccccgtggtggtgaaaatgttcagttcaacggacagagcaatgagaatccggttgctacagcaaatggaacagttcatccagtatctggatgaacctactgtgaacactcagatctttccccacgtggtccacggattcttggacaccaatcctgccattagggagcagaccgtgaagtcaatgcttttgttggcccctaaactcaacgaggccaacctgaacgtcgagctcatgaagcacttcgcacggttacaagcaaaagatgaacaagggcctatccggtgcaatacaactgtgtgtttgggcaagatcggttcgtacttatcagccagtactcgtcaccgggtattgactagcgcattctctcgggcaactcgcgatcccttcgctccatcccgagtggccggggttctggggtttgcagccacccacaatctgtactccatgaatgattgcgcccagaaaatcctgcccgtgctatgtgggctcacggtggaccctgagaagtctgtgcgtgaccaggcattcaaagctattaggtccttcctcagcaaactggagagcgtgtctgaggaccctacccagctggaggaagttgagaaggacgtgcacgccgcctcctcccctggaatgggaggggcggccgcttcttgggcggggtgggctgtgaccggggtaagcagcctgacctccaagctaatcaggagccatcctacgacggctcctacagagacaaacatcccccagagaccaacgccagaaggcgtcccagccccagcccccactccagtgcccgccacacctacaaccagcggtcattgggaaactcaagaagaggacaaagatacggcagaggacagctcaaccgcagacagatgggacgacgaggactgggggtcactggaacaggaggctgaaagcgtcctcgcccagcaagatgactggtccacagggggacaagtctcacgtgcctcacaggtgtcgaatagcgatcataaatccagtaaatcccctgagtcagactggtctagttgggaagcggaaggaagttgggagcagggatggcaggaaccatccagccaggagccacccccagacggtacacgcctggcatctgagtacaattggggaggccccgaatcgtccgataaaggtgatcctttcgctactctgtctgctagacctagcacacagccaagacctgacagttggggcgaagacaattgggagggactcgagaccgacagtcgacaagtgaaagctgaactggcaaggaagaaaagggaagaacgccggcgggagatggaggcaaaacgtgccgaaagaaaggtcgccaagggcccaatgaagttaggagcacgaaaacttgactag

SEQ ID NO: 204337 - DNA, 2346 bp, synthetic construct
  misc_feature 1..2346: note = Description of Artificial Sequence: Synthetic coding sequence
  source 1..2346: mol_type = other DNA
atgtggttcttcgcccgggaccccgtgcgggacttccccttcgagctcattccagaacctcctgagggtggtctccctggaccctgggctttgcaccgggggcggaagaaggctaccggcagccccgtctccatattcgtgtacgatgtaaagccaggagccgaagagcagacccaggtcgctaaagctgctttcaagcggttcaaaacgttgcggcacccaaacatccttgcttatatcgacggactagagacagaaaagtgtttgcacgtcgtgacagaagctgtcacccctctagggatttatctcaaggctcgagtggaagccggcggactgaaggagctagaaatctcctgggggttacatcagattgtgaaagctctcagctttttagttaacgattgctccttgatccacaataatgtctgtatggcagcagtcttcgtggaccgcgcaggagagtggaagcttggcggtctcgactacatgtactctgctcagggtaatggcgggggtcccccaaggaagggcattccagagcttgagcagtatgatccccccgaactcgcggactctagtggccgcgtcgtgagagagaagtggagtgccgatatgtggcgcctgggctgcctgatttgggaagttttcaatggtcccctcccacgagccgctgccctcagaaaccccggaaaaattccaaagaccttggtcccacactattgcgaacttgtgggcgctaatcctaaggtccgccctaatcccgctaggttcttgcagaactgtagggctccggggggcttcatgagtaaccgtttcgttgaaaccaacctgtttttggaagaaatccagattaaagaaccggccgaaaaacaaaagttttttcaggagctgagcaagtcgctggatgcattccccgaggacttttgtaggcataaagtacttcctcaactgttgacagcctttgagtttgggaatgccggtgccgttgtcctgacgccactctttaaggtcggaaagttcctgagcgccgaggagtatcagcagaagatcataccagtggtcgtaaagatgttctcttccacagatcgggccatgaggatacggctgctgcagcagatggaacagttcattcagtatctcgatgagcccactgtcaatacccagatcttcccccatgtggtgcatggttttttggacaccaatccggcaatcagagaacagactgttaagtccatgttattactcgcgccaaagctgaatgaagcgaatttgaatgttgagctgatgaaacatttcgctcgcctccaggccaaggatgagcagggccctataagatgtaataccaccgtgtgcctgggcaaaattggctcgtacctcagcgcttcaactcgccatcgggtcttaacctcagccttttctagagctacacgagaccccttcgctccttctcgagtggccggggtgctgggctttgccgcaacgcacaatctgtacagtatgaatgactgcgcacagaagattctcccagtactgtgcgggctgaccgttgaccccgaaaaaagcgtgcgtgatcaagcctttaaagcaattcgttcatttctgagcaagctcgaatcagtgagcgaggatcctacgcagctagaagaggtagaaaaagatgtgcatgcagctagctctcctggcatgggtggagccgcagcaagttgggcaggctgggctgtgaccggcgtgtcgtcacttacctctaagctgattcgcagtcatccaactaccgcgcccaccgaaaccaatattccccagcgacctacccccgaaggcgtgcccgcccccgccccaacaccagtccccgcaacacctacaacttctggtcattgggaaactcaggaggaagacaaagacacagccgaggactcctctacagctgaccgctgggacgatgaggactggggcagcctggagcaggaggccgagtcagttctggctcagcaggatgactggtctacaggcgggcaggtgtcccgagcttcccaggtctctaatagtgatcacaaatcctcgaaatccccagagagcgactggtcctcatgggaagcggaagggtcttgggaacaggggtggcaggaaccctccagccaggagccaccacctgatgggacaaggttggcctccgaatataattggggagggccagagagcagcgacaaaggcgacccgttcgctacattgtcggccaggccctccacacaagaccgatctcgtctaagctggcccggcagatccgcccggtccggggggggccgttggcgcccaaacgcccctagaggccgatggccccgcgcaccctag

SEQ ID NO: 204338 - DNA, 2124 bp, synthetic construct
  misc_feature 1..2124: note = Description of Artificial Sequence: Synthetic coding sequence
  source 1..2124: mol_type = other DNA
atgtggttcttcgcccgggaccccgtgcgggacttccccttcgagctgatccctgagccacccgaaggcggtctgcccggcccctgggcactacataggggtcgcaagaaggccaccggctctcctgtctcgatcttcgtgtacgatgtcaagccaggggccgaagagcagactcaagttgcaaaagctgctttcaagaggtttaaaacgctccgccatcctaatatcttggcttacatcgatggtctggaaacagaaaagtgcctccacgtggttacagaggctgtaaccccactggggatctatctgaaagcgagggtggaagcaggcggactcaaagagctcgagatctcatggggactccaccagattgtgaaagctctgtctttcttggttaacgattgttccctgatccacaataatgtgtgcatggctgccgtgtttgtcgacagggccggggaatggaagcttgggggtcttgattacatgtactcagcacaggggaacggtggcgggccacctcgaaaggggatcccagagttggaacagtacgaccctcccgaactagcggattcttctggtcgagtcgtgcgcgagaagtggagcgccgacatgtggagactgggctgtttaatatgggaggtgtttaatggcccccttccgcgagcagcggccctacgcaatccaggaaaaatccccaagaccctggtgcctcattactgtgagctggttggtgccaatcctaaggtgcggccaaatccagcacggtttctccagaactgtagggcccccggcggcttcatgagcaatcgcttcgtcgagacaaatctttttttagaggaaattcaaataaaggagcccgccgagaaacagaaattttttcaagaattatcaaagtccctagacgcatttcccgaagatttttgtagacataaagtgcttccacagctgctaactgccttcgaatttggaaacgccggcgcggtcgtgttgacgcccctcttcaaggtcggaaagttcttaagcgccgaggaataccagcagaagattatccctgttgtggtgaagatgttctccagtacggatcgcgccatgcggatacggctgttacaacagatggagcagttcattcagtacctcgatgaacccactgtaaatacacagatttttcctcatgtggttcatgggttccttgataccaatccagccatccgggaacagactgttaaaagcatgctgttgctggctcctaaactcaatgaggccaatttaaacgttgaactgatgaagcactttgcaagattgcaagctaaggacgaacagggacccattagatgtaacaccacggtgtgccttggaaaaataggctcatatctgtctgccagcactcgacaccgcgtccttacatcggctttctctagggcaacaagggatccatttgctccaagtcgcgtggcaggtgttttaggtttcgccgcgacacataatctctactcgatgaatgattgtgcacaaaagattctgcccgtcctctgcggactgaccgtagatccagaaaaaagcgtgcgcgaccaagctttcaaggcaatccggtcttttctttctaagctagaatcagtatcagaggatccgacccagttggaagaagtcgaaaaagatgtgcacgcggcctcttccccaggaatgggaggtgctgctgcttcctgggcgggttgggccgtaactggagtgagcagcctgacctctaagcttatccggtcccatcctaccacggcacctacagagaccaacatacctcagaggcctactccagagggacactgggagacccaagagccaccccctgacgggacacgactggcttccgaatacaattgggggggtcccgaaagcagtgataagggcgatccctttgccacccttagcgctcgtcctagtacccagccaagacccgattcctggggagaggacaactgggaggggctggagacagatagccgccaggtcaaagccgaactagctaggaagaaacgggaggaacgccgaagagagatggaagcaaaacgggccgaaagaaaggtggcgaaggggccgatgaagctgggcgcgcgcaaactcgattag

SEQ ID NO: 204339 - DNA, 1071 bp, synthetic construct
  misc_feature 1..1071: note = Description of Artificial Sequence: Synthetic coding sequence
  source 1..1071: mol_type = other DNA
atgtggttcttcgcccgggaccccgtgcgggacttccccttcgagctgatccccgagcccccggaaggcggattacctggcccctgggctttgcatagaggcagaaagaaggccacgggaagccctgtgtctatctttgtgtacgacgttaagcctggagccgaagagcagacacaggttgctaaagcggcgtttaagcggtttaagaccttgcgccatcctaacatactcgcctacatagacgggttggagactgagaagtgtttacacgttgtcaccgaggcggtgacccctctcgggatctacctgaaggccagagtggaagccggaggcctgaaagagctagagatatcatggggcctgcatcagatcgttaaagcccttagttttctggtcaatgactgttccctcattcataataacgtctgtatggctgctgtatttgtggacagagcgggggagtggaagctcggcggtttggactacatgtactcggcgcaaggcaacggaggaggaccccctcgaaagggtattcccgagttagagcaatatgatcctccagagttggccgactctagcggtcgcgtggttcgagaaaaatggtctgctgatatgtggaggcttggctgtctcatctgggaggtattcaatggacctctacctagggcagcagcactgaggaatcccgggaagattcccaagactctcgtgcctcactattgtgaactggttggcgccaaccccaaggtgaggccgaaccccgctagatttctgcagaactgcagggcccccgggggcttcatgagcaatagattcgtggagactaatctgtttcttgaagaaattcagccgaaggaccccaggttaaaggaattcctcccacagcctcccccactgttcctaccacccttgcagcctcaagctaccgggcggaggcgccgcagaactcggacccagcagcgaactgctgcccttctgactgatgggactaccaagactggcgccgcgtggtctcggcggccctccctgtgttggccctctagaaccacgggagcgcctggagcaaaatag

SEQ ID NO: 204340 - DNA, 2376 bp, synthetic construct
  misc_feature 1..2376: note = Description of Artificial Sequence: Synthetic coding sequence
  source 1..2376: mol_type = other DNA
atgtggttcttcgcccgggaccccgtgcgggacttccccttcgagcttataccagagccccctgagggcggcctgcccggcccctgggcgcttcataggggaagaaaaaaggcaacaggcagccctgtttcgatatttgtatacgatgtgaagccaggggccgaagaacagacgcaggtcgccaaggctgctttcaaaaggttcaaaacacttagacaccctaatattctggcctacattgacggtctagaaaccgagaaatgcctgcacgtcgttaccgaggcggtcacccctctggggatatatctgaaagcaagggttgaggcgggaggattgaaagaactggaaatctcttgggggcttcatcagatcgtgaaggccctatcatttttggtcaacgattgttcccttatacacaacaacgtgtgtatggcagctgtttttgtggatagagccggagagtggaagctgggcggccttgactacatgtattcagcccagggaaacggcggtggtccaccgagaaagggaatacctgagctggaacagtacgaccctccagagttagctgacagttcagggcgcgtggttagagaaaaatggagcgccgatatgtggagactgggatgcctgatttgggaggtgttcaacggaccactgccaagggccgcagccttacggaatccaggaaagattcccaagacattggtaccccattactgtgagctggtcggtgccaatcccaaggtgagacctaaccctgcacgctttcttcagaactgtagggcccctggcggatttatgtctaatcggtttgtggaaactaatttattcctcgaggaaattcagataaaagaacccgccgagaaacagaagttcttccaagagctgtctaagtccctcgacgcctttcctgaagacttctgcagacacaaagtgctcccccaactgctgactgcctttgaatttggcaatgctggggcggtggtgctgacacctctcttcaaggttgggaagttcctgagcgctgaggagtaccagcaaaagattattcctgtggtggtaaagatgttctcttcaacagatcgcgccatgcggattcgacttttgcagcagatggagcagttcattcaatacctggatgaaccaaccgtgaacacccagatattcccacacgtggtgcatggattcctggacaccaaccccgccatcagggagcaaaccgtgaagagcatgcttctgctggcaccaaaactcaatgaggccaacctaaatgttgagttgatgaagcatttcgcgcggcttcaggcaaaagatgagcagggacctatccggtgtaataccacggtgtgccttggaaagattggctcttacctgtcggcgtcaacacggcaccgagtgttgactagtgcattcagcagagccacacgggacccattcgccccatcaagagtggcaggcgttttaggtttcgccgccactcataacctatactccatgaacgactgtgcacaaaaaattctccccgtgctgtgtggtctgactgtggatcccgaaaaaagcgtgagagaccaggcatttaaagccattcgctccttcctgtccaaactggagagtgtgagcgaggaccccacacagttggaagaagtcgaaaaggacgtccacgcagcctccagccctggcatgggcggggccgctgcaagctgggccggttgggcggtgactggagtgagtagcctgaccagcaagctcatcaggagtcaccccactacagcccccacagagaccaatatccctcagcggcctacccccgagggccactgggagacccaggaagaggataaggacaccgctgaagacagtagtaccgctgatcgatgggatgatgaggactggggaagtcttgaacaggaagctgaaagcgtcttagctcagcaagacgattggtcaacaggtggtcaggtctcacgcgctagtcaagtaagtaactcagaccacaagagtagtaaaagccccgagtctgattggagctcttgggaggccgagggatcatgggagcagggctggcaggagccctcctcccaggagcccccccccgacggcacccggctcgcctcagagtacaactggggtggccccgaaagcagtgataaaggtgaccccttcgctactctgtccgcccgccctagcacacagccccgccccgattcatggggggaagacaattgggaaggattggagacagactcaaggcaggtgaaggccgagttggcccggaagaaacgagaggagaggagacgggagatggaggctaaaagggcagagaggaaggttgccaagggcccaatgaagctcggggcacgcaagttagattag

SEQ ID NO: 204341 - DNA, 2343 bp, synthetic construct
  misc_feature 1..2343: note = Description of Artificial Sequence: Synthetic coding sequence
  source 1..2343: mol_type = other DNA
atgtggttcttcgcccgggaccccgtgcgggacttccccttcgagcttatccctgagccccccgagggcggcctacccggcccttgggccttgcaccgggggcgaaaaaaggccaccggttcacctgtgtcaatctttgtctacgatgtcaagcctggtgccgaggaacagacacaagtggcaaaggctgccttcaagcgattcaagacattgagacaccctaatattctggcttatattgatgggctagaaacggaaaagtgtctgcacgtggtgaccgaagcggtgacaccactcggcatctatttgaaggctagagtggaagccggcggtttaaaggaattagagatcagctggggactgcaccagattgtgaaggcattgagcttcttagtgaacgactgctcattgattcataacaatgtgtgtatggctgccgtgttcgtcgacagggctggcgagtggaaactcggaggacttgactacatgtactcagcccagggcaatggtgggggaccgcctagaaagggcatccccgaacttgaacagtacgaccctcccgaattggccgattcttccgggagagtcgttagggagaaatggtcagcagatatgtggagattggggtgcctgatctgggaggtatttaacgggccgctgccccgagctgccgccttgcggaatccaggtaaaattcctaagacactggtgccccactactgtgaacttgtaggcgcaaatcctaaagtccggcccaacccagcccgattcttacagaattgtcgggccccgggaggcttcatgagtaataggtttgtggaaactaatttattcctggaagagatccagatcaaggaacccgcagagaaacagaagtttttccaggaactcagcaagagcttagacgcctttcctgaagatttctgccgccataaggtgctccctcaactccttacagcttttgaatttggcaatgccggcgccgtggtgctcacgcctcttttcaaggttgggaaattcttaagcgccgaggaataccaacagaagatcattcctgtggtcgtcaagatgttcagctcaaccgaccgcgccatgcgcatcaggctgctccaacagatggaacagttcattcagtatctggacgaacccacagtgaatacccagatatttccccatgttgtgcacgggttcctggacaccaacccagcaatcagagagcaaaccgtgaagagcatgctcctgctggcgcctaagctaaacgaggccaacctgaatgtggagcttatgaagcattttgctcgactccaggccaaagatgagcagggtccaatccgctgtaatacaaccgtttgcctcggcaaaattggctcctatctgtcagcaagtacccggcaccgagtactgacctcagctttttcacgggccacccgggaccccttcgccccatctcgggttgccggggtgttgggattcgctgccacccataatctgtactccatgaacgattgcgcacaaaagatcttgccagtgctctgtggactgactgtggatcctgagaagtcggtacgcgatcaggccttcaaggccattaggtctttcctgtccaagctagagagcgtctccgaggacccaacccaattagaggaggtggaaaaggatgtgcatgccgcctcttcgcctggcatgggcggcgcagccgcttcatgggctgggtgggccgtgacaggtgtcagctcactaaccagcaaattgatccgaagtcaccctactaccgcccccaccgaaacgaacatcccacaaaggccaactcccgaaggagtgccagctccagcacctacacccgtccctgccacgcccacgacctccggtcactgggaaacccaggaggaggataaagacaccgctgaagattcttccacagccgaccgctgggatgacgaggactggggtagcctggaggaagccgagagtgtcttggctcaacaggatgattggagcacaggaggccaggtgtctcgcgccagccaggtcagcaatagcgatcataagtcatctaagtctccagagtcagattggagttcctgggaggccgagggcagctgggagcagggatggcaggagccttcgtctcaggagcccccacccgatggaacacgacttgcttccgagtacaactggggagggcctgaatcctctgacaaaggagatccattcgctaccttatcagcgcgcccatctacacaggaccggtcacgtttgagctggcctgggcgttcagcccgcagcggcggtggaaggtggcggccgaacgctccaaggggtcgttggcctagggctccttag

SEQ ID NO: 204342 - DNA, 2124 bp, synthetic construct
  misc_feature 1..2124: note = Description of Artificial Sequence: Synthetic coding sequence
  source 1..2124: mol_type = other DNA
atgtggttcttcgcccgggaccccgtgcgggacttccccttcgagttaattcccgagccccccgaaggagggctgcctgggccttgggctcttcataggggaagaaaaaaagctacggggagcccagtcagcatattcgtttatgacgtgaaacccggggccgaagaacagactcaagttgccaaagccgccttcaaacggtttaaaactctgcggcatccaaatattctcgcatacatcgatgggcttgagaccgagaagtgtcttcacgtggttaccgaggcagtaactcctctcgggatataccttaaagcccgggttgaagcaggcgggttaaaggaactggagattagttggggacttcaccaaattgtaaaggcgctgagttttctggtcaacgattgttccttaatacacaacaacgtgtgtatggccgccgttttcgttgaccgggccggcgagtggaaactcggagggttagattatatgtacagtgcgcagggcaatggcggcggccccccgcgtaaagggatacccgaactggagcagtacgacccccccgaactggcagactcctccggcagggtcgtgcgggagaaatggtcagctgacatgtggagactagggtgcctcatttgggaggtttttaacggcccccttccccgggccgctgccttgagaaatcccgggaagattccaaagactctggttccccactactgcgagttggtcggcgccaatcctaaggtccggcccaatcccgcccgattcctgcagaactgtagagcacccggggggtttatgtccaacagattcgtggaaactaacctgtttctggaggagatacaaattaaagaacctgcagagaagcagaaattctttcaggaactcagcaaaagcctcgatgcctttcctgaggatttctgtcggcataaagtgctcccccagcttctaactgccttcgaattcgggaatgccggcgccgtcgtccttacacccctattcaaggtggggaagttcctttcagctgaagagtatcagcagaagatcatacccgttgtggttaaaatgtttagctccacagatagggccatgaggattcggctgctgcagcagatggaacagtttatacagtacctcgacgaacccactgtgaatacacagatcttcccccatgtggtgcacgggtttctagacactaatccagccatcagggagcagacagtaaaaagtatgcttttgctggcacccaagttaaacgaggccaacttgaacgtggaactgatgaaacacttcgctcggctgcaggcaaaggatgagcagggccctataaggtgtaacaccaccgtgtgtctcggaaagataggatcttacctcagtgcgagcactaggcaccgggtgctcacctcagccttttcccgggcaactcgtgacccctttgcgccaagccgggtggccggcgtcctcggctttgctgctacacataacctctattcaatgaacgactgcgcccaaaagatccttcccgtgctgtgtggcctcacagtcgaccccgagaagagcgtgagggaccaggcctttaaagccatccgctcttttctctccaaactagaaagtgtcagtgaggatccaacgcagctggaggaggtagagaaagacgtccatgctgcctcttctcctggcatgggtggcgctgctgcatcttgggctggatgggccgtcacaggcgtatcctccctgactagcaagttaattcgaagccatcccacgaccgctccaacggagactaacatcccacagaggccaacccccgagggccattgggaaacccaggaacctccccctgatggaacacgcctggccagcgagtacaactggggagggcctgagtcttcagataaaggggatccgttcgctactctgtcagctcggccgtccacgcagccccggccagattcctggggcgaagacaattgggaggggctcgagaccgatagccgacaggtgaaagctgagctggcccgcaagaaaagggaggagaggaggcgcgaaatggaagccaaacgcgccgaaaggaaagtcgctaaagggccaatgaagctgggtgcccggaaactggattag

SEQ ID NO: 204343 - DNA, 2364 bp, synthetic construct
  misc_feature 1..2364: note = Description of Artificial Sequence: Synthetic coding sequence
  source 1..2364: mol_type = other DNA
atgtggttcttcgcccgggaccccgtgcgggacttccccttcgagctgatcccagagccccctgaggggggcttgcctgggccgtgggctctgcatagaggccgcaagaaagctacaggatctcctgtgagcatttttgtgtacgatgtgaagcctggcgccgaggagcaaacgcaggttgccaaagctgctttcaaaagattcaagaccctaagacaccctaatatactcgcatacatcgatggattggagactgagaaatgcttgcatgtcgttacagaagcggtaactccattaggcatctacctcaaagcccgggttgaagccggggggctgaaggagctcgaaataagctgggggctccaccagatcgtgaaagcactcagttttcttgtcaatgactgtagcctgatccataataacgtgtgcatggccgcagtgtttgtggatcgcgccggagagtggaaacttggcggtttggattacatgtacagcgcccagggaaacggaggcggcccgccacgcaagggcataccggagctcgagcagtacgatcctcctgagttagccgactcctcaggccgcgttgtgagggagaaatggtcagccgatatgtggcggctggggtgtcttatttgggaagtgtttaatggtccccttccaagggcggccgccctcagaaacccaggtaagattcctaaaactctggtaccccactattgcgagctggtgggagctaacccgaaggtcagacctaatcctgctcgctttctgcagaattgtcgagctccgggcggattcatgagtaatcgctttgtggagacaaaccttttccttgaagagatccagattaaggaacccgccgaaaagcaaaagtttttccaggagctaagcaagagtctggacgccttcccggaggacttctgcagacacaaggtgctgccgcagctgctgaccgcgtttgagttcggaaatgccggagccgtcgtgctgactcctctgtttaaggtgggtaaatttctctctgctgaggagtaccagcagaaaattataccagtagtcgtgaagatgtttagttcaacggatagggcaatgcgcatccggctgctgcagcagatggagcagttcatccagtacctggatgagcctacagtgaacacccagatattcccacacgttgtgcatgggtttctggacactaatccggccatccgcgaacagactgttaagtcaatgctgttgttggcccctaagctgaacgaggccaatctcaacgtcgaactcatgaaacattttgcacggcttcaggcaaaggacgagcagggtcctataaggtgcaacacaaccgtgtgccttggcaaaattggctcatatctttccgcttctaccaggcatcgtgtgctcacgtccgccttttccagggctacacgggacccatttgcaccttcacgggtggccggtgtcctggggtttgccgccactcacaacctgtatagtatgaacgactgcgcacaaaaaatactgcccgtgctttgcgggctgaccgtggacccggaaaaatccgtgagggaccaggccttcaaggccattaggtcttttctgtctaagttggaaagcgtcagtgaagatccaacacagctggaagaggtcgaaaaagacgtccacgctgcaagttctcccggaatgggaggagccgccgccagttgggctggctgggcagtgacgggcgtgagctctctcacaagtaagctgatccgctcacatccgactacggccccgaccgagaccaacatcccccaaagacccaccccagagggggttcccgcacctgcacccactccagtccctgccaccccgaccacctcggggcactgggagactcaagaagaagataaggatacagcagaggactctagcactgctgatcgatgggacgacgaggactggggcagcttagagcaggaggccgaatcagttttggcccagcaggatgattggagcaccggagggcaggtgtctagggcctcccagtcccctacaggcgccgccggtaaactgagagcccctggcaacagggctgggcggtcacaagcccccaggagtcacctcctcacagtccacggctggcccgcctctataacaggagtggcccaatcccccgctactagagctacccccagcctgccttgtctgcacgtgccggcgccctcacggggccagactctgggagttcgaaccacaggccgcgcctcgaggttaacagtagatagaagcaggctcagctggccgggtcgctccgcccgctcgggcggcggacgttggaggcccaacgctccccggggaagatggcctagggccccttag

SEQ ID NO: 204344 - DNA, 663 bp, synthetic construct
  misc_feature 1..663: note = Description of Artificial Sequence: Synthetic coding sequence
  source 1..663: mol_type = other DNA
atgatcaagcccaagtggggcggcctggtgtgggcccagtggcacggcccactcgccaggccctccggaaccctgccatttgccagcagtatgccatccccagtcgatgcctcctctgccgatggaggttccggcctcggctcccatcgcagaaaacgaacaactttctcaaagggccagctgcttgaactggagcgggccttcgccgcgtggccctatcccaatatcagcacacatgagcatctggcctgggtgacctgtctccccgaagccaaagtccaagtgtggttccagaagagatgggcgaaaattattaagaatagaaaatccggcattctgtccccggggtcagagtgcccccagtctagttgtagcttgcccgacacgctccaacagccttgggacccgcaaatgccaggtcagccaccgccgagctcagggacaccccaaagaacgtctgtatgccgacacagctcttgccctgcccctggtctctccccgcgccaaggctgggaaggagcaaaagccgtcgccccgtggggtagcgcaggggcatccgaagttcacccctcacttgagcgggctacccctcagaccagcctggggtcactttctgatcttatctatgcactggccattgtggtcaacgtagaccacagctag

SEQ ID NO: 204345 - DNA, 651 bp, synthetic construct
  misc_feature 1..651: note = Description of Artificial Sequence: Synthetic coding sequence
  source 1..651: mol_type = other DNA
atgggcggcagcggcgtgggcaccgcctggcacggccccctggcccgacccagtggaactcttccgttcgcgtctagcatgccatccccagtggacgcatcctctgccgacggcggcagtgggttagggtcccaccgaaggaaaaggaccaccttctctaaaggccagctgctggaacttgagagggcgtttgcagcctggccttatcccaacatcagtactcacgaacaccttgcttgggtgacctgccttccggaggccaaagtccaagtgtggttccaaaagcgctgggcaaaaatcatcaagaaccgcaagtcaggaattctcagtcccgggagtgaatgtcctcagtcaagctgttccttacctgacaccctgcagcagccttgggatccacagatgcccggacaacccccaccatctagcggcacccctcagagaacctcagtttgccgtcattcttcatgcccagccccaggattatcccctcgacaaggctgggagggcgcaaaagcagtcgcaccatgggggagcgctggggcctcagaggtgcacccatcactcgagagggccactcctcaaacatctctggggtccctttccgaccttatatacgcgttggccatcgtggtcaacgttgatcacagctag

SEQ ID NO: 204346 - DNA, 648 bp, synthetic construct
  misc_feature 1..648: note = Description of Artificial Sequence: Synthetic coding sequence
  source 1..648: mol_type = other DNA
atgatgaccaccggctggaccggcctgtgcctgccccccgtgaacccaagtcgtgtgtcctctagcagcttggaaacctctacaacagagagtatctttgctcacgatggaggctcgggcctgggaagtcacaggaggaaaaggaccacatttagcaagggccaacttctcgagttagaaagagcttttgcggcatggccataccccaacatcagcacccatgagcatctggcctgggtcacatgtctccctgaggccaaggtgcaggtttggttccaaaagcgttgggccaagatcataaaaaaccgcaaatcaggcatcctgagtcctggcagcgaatgtccccaatcttcatgtagcctccctgacacactgcaacagccttgggacccacagatgcctgggcagccgcctccatccagtggcacgccccaaagaacctctgtgtgccgacacagctcctgcccagctccagggctttcacctaggcagggatgggaaggggcgaaagctgtcgcaccatggggtagcgcgggcgcgtcggaggtgcatcctagcttggaaagggccaccccacagacatcactcgggtctctgtctgacctaatttacgcactcgccatcgtggtgaacgtggaccattcttag

SEQ ID NO: 204347 - DNA, 648 bp, synthetic construct
  misc_feature 1..648: note = Description of Artificial Sequence: Synthetic coding sequence
  source 1..648: mol_type = other DNA
atgatgaccaccggctggaccggcctgtgcctgccccccgtgaacccatccagagtgagctcatcgtctctggagacctccaccacagaaagcatcttcgcccatgatggcgggagtggcctcggatcccaccgacgaaaaaggactacctttagcaaaggacaactgctggagttagagcgcgcttttgccgcatggccttatccgaacataagtactcacgagcatctcgcctgggtgacatgtctgcccgaggccaaagtacaggtttggttccagaagcgctgggccaagattatcaagaaccggaagtctgggatcctctcacctgggagtgagtgcccacaaagttcatgtagcctgcctgatactctccagcagccctgggacccacagatgccagggcaaccccctccttcaagcggtactcctcagaggacgtcagtctgccggcattcctcatgccccgccccgggcctgagcccccgccagggatgggagggcgctaaggcagtggccccctgggggagcgctggggcatccgaagtccacccatctctcgaaagagccactccacagacgagcttgggaagtctgtcagaccttatctacgcattggctatagtggttaacgtagatcactcatag

SEQ ID NO: 204348 - DNA, 1212 bp, synthetic construct
  misc_feature 1..1212: note = Description of Artificial Sequence: Synthetic coding sequence
  source 1..1212: mol_type = other DNA
atgagcggccgggtgggcgacctgagcccccggcagaaggaggcccttgccaaattccgcgagaatgtgcaagacgtccttccagcattacccaaccctgacgactattttctccttaggtggcttagggcgaggtcttttgatctgcagaagtccgaggctatgttgcgtaagcatgtggaattccggaaacagaaagacattgataacatcatctcctggcagcctccagaagttatacagcagtatctttcgggcggtatgtgcggttacgatctggatggctgccctgtttggtacgatattattggacccctcgacgcgaaaggcctcctcttcagcgcctccaagcaggaccttctgaggacgaagatgagagagtgcgagctgttgctgcaggagtgcgctcatcaaacaaccaaactgggcagaaaggtggaaaccatcacaattatatacgactgcgaaggtctgggattgaaacacttatggaagccagccgtcgaagcctacggagaatttttgtgcatgtttgaggaaaattacccggagaccctcaagcggctcttcgttgtcaaggcccccaagctgttccctgttgcctataatctgatcaagccttttctctccgaggacactaggaaaaaaatcatggtgctcggggccaattggaaagaggttttgctcaagcacatcagtccggaccaggtacctgtggaatacggaggcacaatgacagatcccgacgggaatcctaaatgtaagagtaaaattaattatggtggtgatatcccccgcaaatattacgtgcgggaccaggtgaagcagcaatatgaacactctgtgcaaattagtagaggcagctctcaccaggtcgagtatgaaatcctgttcccagggtgtgtcctgagatggcagtttatgtcggatggtgctgacgtggggttcgggattttcctcaaaacgaaaatgggagagaggcagagagctggcgagatgaccgaggttttaccaaaccagcgctacaatagccatttggtcccagaagacggaaccctcacttgttcagacccaggaatatacgtacttcggttcgacaacacctattcattcattcacgcgaagaaggtgaatttcacagtggaggtacttcttccggataaggcgtcagaagagaagatgaaacagctgggagcaggaacacccaagtag

SEQ ID NO: 204349 - DNA, 963 bp, synthetic construct
  misc_feature 1..963: note = Description of Artificial Sequence: Synthetic coding sequence
  source 1..963: mol_type = other DNA
atgagcggccgggtgggcgacctgagcccccggcagaaggaggccctggctaagtttagggagaatgtccaggacgtacttcccgccttgcctaacccagatgactacttcttactgcggtggctgagagcaagatctttcgacctgcagaaaagcgaagccatgctccgaaaactggggcgaaaagtggaaactattacaataatttatgattgtgaggggctcggccttaagcatctgtggaagccagcagtcgaggcatatggcgagtttttgtgcatgttcgaagagaactatccggagaccctgaaacgactcttcgtggtgaaggctccgaagctctttcccgtggcgtataacctaatcaaacctttcctaagtgaggacactagaaaaaaaattatggttttaggcgccaactggaaagaagtgctgctgaaacatatctcgccagaccaggtgcccgtggagtatggaggcaccatgacggatcccgatggaaatccaaaatgtaaatcaaaaatcaattacggcggcgacatcccacgcaagtactatgttagagaccaggtgaagcagcagtacgaacactcagtgcagatatccaggggctcttcacatcaggtcgaatacgagatactgttccctggttgcgtgttaagatggcagtttatgtccgacggggctgatgttggcttcggtatttttctgaagacaaagatgggagagaggcagagagccggggaaatgaccgaggttctcccgaatcagagatacaattcccacctggtacccgaagatggcacactcacatgtagcgatcctggcatttacgtcctacgttttgataacacttactcctttatacatgccaagaaagtgaattttacagtagaagtacttcttcctgataaggcctctgaggaaaagatgaaacagttgggagcggggacgcccaaatag

SEQ ID NO: 204350 - DNA, 990 bp, synthetic construct
  misc_feature 1..990: note = Description of Artificial Sequence: Synthetic coding sequence
  source 1..990: mol_type = other DNA
atgctgcggaaggtgatccagcagtacctgagcggcggcatgtgcgggtatgacctggacggatgtcctgtatggtacgacatcatcggtccgcttgatgcaaaggggctgctgttttccgcttcaaagcaagacttgttgcggaccaaaatgcgggaatgcgaacttctactccaggagtgtgcccaccagacaactaaactggggaggaaggttgagacgatcacaatcatatacgactgtgagggtcttggcctgaagcacctttggaaacctgcggttgaagcctatggggagttcctgtgcatgttcgaagagaattaccctgagaccttaaagcgcctctttgtggtgaaggcccctaagcttttcccagtggcctacaaccttataaaacctttcctgagcgaagatactcgtaagaaaatcatggttttgggcgcaaactggaaggaggtcttgctgaagcacattagtcccgaccaggtgcccgttgaatacggaggtactatgacggatcccgacgggaatcctaaatgcaagagcaagatcaactacggcggcgacatcccacggaagtactatgttagggaccaggtcaagcaacagtacgaacattcagttcagataagtaggggttcaagccaccaggtggagtatgaaattctttttcctggctgtgttctcagatggcagtttatgagtgacggcgccgatgttgggttcggaatcttcctgaagactaagatgggagagaggcagagagccggggagatgacagaagtcctgccaaatcagcggtataatagccacttggtcccagaggacggtacactgacctgctccgatccagggatctacgtcttgcgcttcgacaatacttacagctttatccacgcaaaaaaagttaatttcacagttgaggtccttctacctgacaaagccagcgaggagaaaatgaaacagcttggagcgggaactccaaaatag

SEQ ID NO: 204351 - DNA, 1179 bp, synthetic construct
  misc_feature 1..1179: note = Description of Artificial Sequence: Synthetic coding sequence
  source 1..1179: mol_type = other DNA
atgagcggccgggtgggcgacctgagcccccggcagaaggaggccttagctaagttccgtgagaacgtgcaggacgtcctcccagcactacccaaccccgacgactatttcctgctgaggtggctgcgtgctcgcagttttgatcttcagaagagcgaagcgatgcttagaaagcacgtggagtttaggaaacaaaaggatatcgacaacataataagctggcaaccaccggaggtgattcaacagtaccttagcggtggaatgtgtgggtacgacctggatgggtgtcccgtatggtacgatatcatcggtcccctggacgccaaaggactgttatttagcgctagcaagcaggatctgctgcgtacaaagatgagagagtgtgagctcctgttgcaggaatgtgcgcatcagactacgaagttgggccgtaaggttgaaactattaccattatctatgactgcgagggcctgggccttaagcacctgtggaagccggccgtagaagcatacggagaattcctgtgtatgttcgaggagaactatcccgagactttgaaaagactatttgttgtaaaggcacccaagctcttcccagtggcctacaatcttattaaacctttcctcagcgaggataccagaaagaagatcatggtactgggggctaactggaaagaagtcctgttgaagcacatttcaccagaccaggtcccagtggagtacggcggtactatgactgatccagacggaaatcccaagtgtaagtctaagataaattacggcggcgacattcctaggaagtactacgttcgcgaccaggtaaagcaacagtacgaacatagcgtgcaaatttctcgtggcagttctcatcaggtagaatacgagattttattccccgggtgtgtccttagatggcaatttatgtctgatggagccgacgtaggattcggcatcttcctgaagacaaagatgggcgagaggcagagggccggagagatgactgaggtgctgccgaaccagcgctacaactctcacctcgtcccagaggatggaaccctgacctgcagcgatccaggcatttgcaaatacttgtgcctcggcaacgccctcaagccccacgtacagctttctgcttgtgaggttcctcttccaccatggattttcggcagtgagtgctag

SEQ ID NO: 204352 - DNA, 1119 bp, synthetic construct
  misc_feature 1..1119: note = Description of Artificial Sequence: Synthetic coding sequence
  source 1..1119: mol_type = other DNA
atgagcaaggccttcggcctgctgcggcagatctgccagagcatcctggccgagagttctcagagtccagccgacttggaagagaagaaggaagaggattctaatatgaaacgcgagcagcccagagagcggcctcgggcctgggactatccccatggcctagtaggtctgcacaatattggccagacctgctgcttaaacagccttatccaagtctttgtaatgaatgtggatttcacacgcatattgaagaggatcaccgtcccacggggcgcggacgagcagaggaggtcagttcctttccaaatgctgctgctgctcgagaaaatgcaggacagccgccagaaggcggttcggcccctggagctcgcttattgcctgcaaaagtgtaatgtacccctattcgtgcagcatgatgccgcccagctctacctgaagctgtggaacctcatcaaagaccaaattactgatgttcacttagtggagcgcctccaggccctttacacaattcgggtgaaggacagcctgatatgtgtcgattgtgcaatggagtcatctcggaattcctccatgctgaccctgccactgtctctgtttgatgtggactctaagcccttaaagactctggaggatgcgttgcactgcttctttcagccgcgggagttatcaagtaaatctaagtgcttctgcgagaactgtggtaagaaaacccgcggcaagcaggtcctgaagcttacgcacctcccccagaccctaacaatacatctgatgcgattctctatcagaaactcacaaacacgaaagatttgccatagcctctattttccacagtccctggacttctcacaaatcctgcccatgaaaagagagagctgcgatgccgaggagcagtctgggggacaatacgagctgtttgcagtcatagcacacgtgggtatggcggacagcggacactactgcgtttacatccgcaacgctgtggacggaaaatggttctgtttcaatgatagcaacatctgtcttgtatcttgggaagatattcaatgcacctatggaaatcctaactaccattggcaggaaactgcgtatctcctggtgtacatgaagatggagtgctag

SEQ ID NO: 204353 - DNA, 1062 bp, synthetic construct
  misc_feature 1..1062: note = Description of Artificial Sequence: Synthetic coding sequence
  source 1..1062: mol_type = other DNA
atggagttccggaagaccatggacatcgaccacatcctggactggcagcctcctgaggtaatccagaagtatatgccggggggactctgtgggtacgatcgggatggctgtcccgtgtggtacgatatcatcggcccacttgatcccaaggggctcctgttttctgtgacaaagcaggacttactgaagaccaagatgcgggattgtgagcgcattctgcatgagtgcgacctccagactgaaagacttgggaaaaaaatcgaaactattgtcatgatattcgactgtgaggggttgggacttaagcatttctggaaacccctggtggaggtataccaggaattttttggccttctcgaggagaattatccagaaactctcaagtttatgctcattgtgaaggctactaagctattcccagtgggttacaacctcatgaagccattcctgtctgaggatactagaaggaaaataatcgtgctagggaataactggaaagagggcttgctgaaactgatttcaccggaagagctgcctgcgcagttcggaggtacgctgaccgatccggacgggaacccaaagtgtctgactaagatcaattatgggggagagatccccaagagcatgtacgtgagggatcaggtcaagacccagtacgagcattctgtgcagataaatcgcggcagcagccaccaagtggaatacgaaattctttttcccggctgtgtgttgcgctggcagtttagctcagacggggccgacattgggtttggggttttcctgaagactaaaatgggcgaacggcagagggctggagagatgaccgacgttttgcctagccagcgatacaacgcccacatggtcccggaggatggaaatcttacttgcagcgaagccggagtgtacgtggagagcgagagtggcaagagttgctgccacttgcctgtcatcatctgcagccacgagctgcagaactcccatagcaatagccaggttatggcctaccagatggtgagaaagtgtaagctgagtaggcccctccctctcccggcgagtaactag

SEQ ID NO: 204354 - DNA, 1026 bp, synthetic construct
  misc_feature 1..1026: note = Description of Artificial Sequence: Synthetic coding sequence
  source 1..1026: mol_type = other DNA
atggagttccggaagaccatggacatcgaccacatcctggactggcaacctccggaggtgatacagaagtacatgcctggcgggttatgtggttatgacagggatggttgcccagtctggtacgacattattggccctctggatcctaaaggactgctgttttcagtgacaaagcaggacttgcttaaaacgaaaatgcgggactgcgagaggattctgcacgagtgtgacctgcagacggagagactcggcaagaagattgaaacaattgtcatgatttttgattgtgaaggcctaggactgaaacacttttggaaacccctcgtggaagtatatcaagaattctttggcttacttgaagaaaattaccccgagaccctgaagtttatgttaatcgtaaaagctactaagctgttcccagtgggctacaatctcatgaagccgtttttatctgaggatactcgtaggaaaatcatcgtgctgggcaataactggaaggaaggccttctcaaattaattagcccagaggagctgccagctcagttcggcgggactcttacagaccccgacggtaaccccaaatgtctgacaaagatcaactatgggggtgagattcctaagtcaatgtacgtcagagaccaggttaaaacacagtacgagcactccgtccagatcaaccgcgggtcatcacatcaggtcgagtacgagatactgtttcccggatgcgtgttgcgatggcagttcagtagtgatggcgcagacatagggttcggagtgttcctgaagaccaagatgggtgagcgccaacgcgccggggaaatgacggacgtcctgcctagccagagatacaacgcccatatggtgccagaggatgggaaccttacttgcagcgaggccggggtatatgtgctgcgatttgataacacatacagtttcgtccatgctaaaaaggtgtcttttaccgtggaggtgttactccccgacgaagggatgcagaaatacgataaagagctgactccagtgtag

SEQ ID NO: 204355 - DNA, 972 bp, synthetic construct
  misc_feature 1..972: note = Description of Artificial Sequence: Synthetic coding sequence
  source 1..972: mol_type = other DNA
atggtgatccagaagtacatgcccggcggcctgtgcggctacgacagagacggctgccccgtatggtacgatatcattggccctctggatccaaaggggctgctattctctgtaacaaagcaggacctcctaaaaacaaaaatgcgggactgcgagcggattctgcatgagtgtgacttgcagaccgagcgtcttggcaagaagattgagacgatcgtcatgatattcgactgtgagggattgggcctgaaacatttctggaagccgctggtggaggtgtatcaggagttttttggattgctggaagagaactaccctgaaacattgaagttcatgctgatcgtgaaagccaccaagttatttccagtggggtacaacctgatgaagcctttcctctccgaggacactaggcgaaagattatcgtgctcggaaataattggaaagagggattgctgaagctcattagtcccgaagagttgcctgctcagttcgggggaacactgacagatcccgatggaaacccaaaatgtctgactaagatcaattatgggggcgagatccccaaatctatgtatgtgcgcgaccaggtgaaaacgcaatacgagcattccgtgcagatcaacagaggcagctctcatcaggtggagtacgagattctgttcccaggttgtgtgttaaggtggcagttctcctccgatggagcggatattggctttggagttttcctcaaaacaaagatgggtgaaaggcaaagagccggcgagatgacggatgtgcttccaagccagcgttataacgctcatatggtgccggaagacggcaacctgacgtgttccgaagctggggtgtacgtgctaaggtttgacaacacatacagcttcgttcatgctaaaaaggtgtctttcacggtggaagtgctcctgcccgacgagggaatgcagaagtatgacaaggagttgaccccagtgtag

SEQ ID NO: 204356 - DNA, 972 bp, synthetic construct
  misc_feature 1..972: note = Description of Artificial Sequence: Synthetic coding sequence
  source 1..972: mol_type = other DNA
atggtgatccagaagtacatgcccggcggcctgtgcggctacgaccgagacggctgtcctgtctggtacgacattattggccctctggacccaaaggggcttcttttctccgtcacaaaacaggacctgttaaagactaaaatgcgcgactgcgaaagaattctgcacgaatgtgacctgcaaactgagcgcctcgggaaaaaaattgagactatcgtgatgatttttgactgtgaaggactaggtctaaaacacttctggaaaccattagtagaggtgtaccaggagtttttcggtcttctggaagaaaattatcctgaaactttgaaattcatgttgatagtaaaagcaacaaagctgttcccagtcggatacaacctaatgaagccatttctctcggaagatacaagacggaaaattattgtcttggggaacaattggaaggagggcctgctcaagctgatcagccctgaggagctcccagcacagttcggaggcacccttaccgacccagacggaaatcccaaatgtttgaccaaaataaattatggcggcgaaatccccaagtcgatgtatgtgagagatcaggttaaaacccagtacgaacactcagtgcagattaacagagggagttctcaccaggtggaatatgagatactgttccccggatgcgtactgagatggcagtttagtagtgatggcgcggacatcggctttggagtctttctgaagaccaaaatgggggagcgacagcgagccggcgaaatgaccgacgtcctcccttctcagagatacaatgcccacatggtccccgaagacggaaatctgacctgcagtgaggccggtgtgtacgtgctgcgctttgataatacttattcttttgtgcacgcaaagaaggtgagctttactgtcgaagtgctcctccccgacgagggcatgcaaaagtacgacaaggagcttacacccgtgtag

SEQ ID NO: 204357 - DNA, 1221 bp, synthetic construct
  misc_feature 1..1221: note = Description of Artificial Sequence: Synthetic coding sequence
  source 1..1221: mol_type = other DNA
atgagcagccgggtgggcgacctgagcccccagcagcaggaggcccttgctagatttcgtgagaacttgcaagacctgctgcccatcttaccgaacgccgatgattattttttacttcgctggcttcgcgctagaaacttcgatctgcagaagagcgaggatatgttgcgacgccacatggaatttcggaagcagcaggacctcgataacattgttacctggcagccccccgaagtgatccagttgtacgattctggtggcctctgcggatacgattacgaaggctgtcccgtttatttcaacatcatcggatcactagatccgaagggcctgttgctgagtgcaagcaagcaggacatgatccggaagaggattaaggtttgtgagctgcttctccatgaatgcgagttacagacacagaagctaggtcgaaagattgagatggctttgatggtttttgatatggaagggctttctttgaagcacctgtggaaaccagctgtggaggtgtaccagcaattcttcagcattttagaagccaactatcctgagactctcaagaatctcatcgtgattagagcccccaagctcttcccagtggcgttcaatttagtcaagtcattcatgtccgaggagacaagacggaagatagtgattctaggcgataactggaagcaggagctaacaaagtttatttctccagatcagctccctgtggaatttgggggtactatgactgaccctgatggaaatcctaaatgtctgaccaaaatcaactacggcggggaggtgccaaagtcatactatctgtgcgagcaggtacgattacaatacgagcacactaggagcgtgggacgtggttcaagtctgcaagtggagaatgagatcctcttccccggttgtgtgctgaggtggcagtttgcgtccgatggaggtgacatcgggtttggagtgttccttaagactaagatgggtgagcagcagagcgccagggagatgacggaggtgctcccatcccagaggtacaacgcccacatggtcccagaggatgggtctctcacatgcctgcaagccggggtttacgtgctgcgctttgacaatacatacagccggatgcatgctaaaaagttgagttacaccgttgaggtgctcctgccagacaaggcaagtgaggagacactgcagtcacttaaggccatgcgcccgagtcccactcagtag

SEQ ID NO: 204358 - DNA, 1083 bp, synthetic construct
  misc_feature 1..1083: note = Description of Artificial Sequence: Synthetic coding sequence
  source 1..1083: mol_type = other DNA
atgagcagccgggtgggcgacctgagcccccagcagcaggaggccctggccaggtttagagagaatctgcaggatctactacctatcctgcccaacgctgacgactatttcttgctccggtggctccgagcacgcaacttcgatctacagaagagcgaagacatgctccgccggcacatggaattcagaaaacagcaagacctagataacattgtgacctggcagccccccgaggtgatccagctgtatgattcagggggcttatgcggttacgattacgagggttgtcccgtctacttcaacatcatcggatccctggaccctaaaggactgctactgtctgctagtaagcaggatatgatcagaaagcggatcaaggtctgcgagctgctgctccacgagtgtgaactgcagacacagaagctcggtaggaagatcgagatggctctgatggtgttcgatatggaagggctgtcacttaagcacctgtggaagccagcagtcgaggtataccaacagtttttctctattctcgaggccaactatcctgagacactcaagaatttgatcgtgataagggcaccaaaactctttccggtcgctttcaaccttgtgaaatcatttatgtcagaagagactcgcaggaaaatcgtgatcctcggcgacaactggaagcaagagctgacaaagttcatttccccagaccagttgccggttgaatttgggggcaccatgaccgatccggacgggaatccgaagtgcctgacaaagataaattatgggggggaggtccccaagagctactatttatgtgagcaagtccgcctgcagtatgaacacactcgatctgtgggacggggaagctctctgcaggtggaaaacgagatcctgttccctggctgtgtgcttagatggcagtttgccagcgacgggggtgacatcgggtttggggtgtttctgaaaactaagatgggtgaacaacaatcggcccgggaaatgacagaggtgttgccttcacagcggtacaacgcccatatggttccagaggacggaagtttgacttgcctgcaggccggagtctag

SEQ ID NO: 204359 - DNA, 1083 bp, synthetic construct
  misc_feature 1..1083: note = Description of Artificial Sequence: Synthetic coding sequence
  source 1..1083: mol_type = other DNA
atgctgcggcggcacatggagttccggaagcagcaggacctggacaacatcgtcacgtggcaacctccggaggttatacaactctacgatagcggcgggctatgcgggtacgactacgagggatgccctgtatacttcaatatcattggctctctagacccaaaagggctgctgctgtccgctagcaagcaggacatgatccgtaagagaattaaggtgtgtgagttgctgttgcatgaatgtgagctgcagactcaaaaacttggtaggaaaatagaaatggcattgatggtcttcgatatggaaggtctcagtctgaagcacctgtggaaacccgccgtcgaagtctatcagcagtttttctccattctggaagccaactacccagagacacttaagaaccttatcgtcatccgcgcccccaaactgttcccagtagccttcaatctagtgaaaagcttcatgtccgaggagacccgcaggaagattgtgatacttggagataactggaaacaggaactgacaaagttcatctctcctgatcagttacccgtggagttcggcggcacaatgacagatcccgacggcaacccaaaatgtcttactaaaataaattatgggggagaagtgcctaagagctattatctatgcgagcaggtgcgactgcagtacgagcataccaggtccgtgggccggggatcatccttacaggtggagaacgagatcctgttcccaggatgtgttctgaggtggcagttcgcttccgacggtggggatattggcttcggtgtttttttaaagaccaaaatgggagagcaacagtctgcccgcgagatgacagaggtgctgccctcacagagatataatgcacacatggtgccagaggacgggagtcttacctgtctacaggcaggtgtgtacgttcgaggattgtgttccctaatcacctctccctccctgcaaatgagttgcgctagcacaactcccacagctggatgcatgccacgtagcagtgccacgctctggcgctgctgttttccgacgaggcctctccgccgcagatgtagagtcagtcgccgatag

SEQ ID NO: 204360 - DNA, 1176 bp, synthetic construct
  misc_feature 1..1176: note = Description of Artificial Sequence: Synthetic coding sequence
  source 1..1176: mol_type = other DNA
atgctgatgaccaccagcagctgcgccggctgcgagctggagaccttgacgtgccgcaatcccaagacttgtagcgaaggccccaagagcccccagcccacctcatgcccacacgcactgagagcatggcacatggaatttcgaaagcagcaggacctggataatatcgtaacatggcagccgcccgaagtaatacagctgtatgatagtgggggcctgtgcgggtatgactacgagggatgccctgtgtactttaacattattggatccctggatcccaaggggttgctgctatcagcctctaagcaagacatgatacggaaacggatcaaagtgtgtgagttgctgctccatgagtgcgagctgcaaacacaaaagcttggccgaaagattgagatggcgttgatggtctttgatatggaaggattgtctctcaagcatctctggaaaccagcagtcgaagtgtaccagcagtttttctccatattggaggccaattacccggagacactcaagaacttgatcgtcatacgcgcacctaagttatttccggtggccttcaatctcgtaaagtcttttatgtctgaagaaactcgcaggaagattgtgattcttggtgataactggaaacaggaactaacaaagtttataagcccagatcagctcccagtggaatttggcgggacgatgacagaccccgacggcaatccgaaatgtttaaccaaaatcaattacggaggtgaggtgcctaagtcatactatctctgtgagcaggttcggttacagtacgaacatacccgttccgttggcagggggagctccttgcaggttgagaacgagattctgtttccgggatgtgtgctgcgctggcagtttgcatctgacgggggcgacatcggattcggagtgtttctgaagacaaagatgggggagcagcaatctgctcgggagatgaccgaggtgcttccttctcagcggtacaacgcacatatggtgcccgaggacggaagtttgacttgtctgcaggcgggcgtctacgttctgcgttttgataacacttatagcaggatgcatgctaagaagttatcttacactgtggaggtgttattgccagacaaggcttccgaagagacactgcagtctttgaaagccatgagaccatcccctactcagtag

SEQ ID NO: 204361 - DNA, 2256 bp, synthetic construct
  misc_feature 1..2256: note = Description of Artificial Sequence: Synthetic coding sequence
  source 1..2256: mol_type = other DNA
cccgccgccgccgccagcagcctggagcgggagaccgagcggttcagagagctgttattgtatgggaggaagaaggatgcactggagtccgccatgaaaaacgggctttggggtcacgccttattactggcttcaaagatggattcgcgcactcacgcgagggtaatgacgaggtttgctaactctctgccgattaacgaccccctgcagaccgtctaccagctgatgtctggtcgcatgcccgccgcttctacatgttgtggggatgaaaaatggggcgattggcgacctcatctcgcgatggtgctttctaacctgaataataatatggacgtcgaatccagaactatggccacaatgggcgataccctggcatcccgaggtcttctcgacgcggcacatttttgctacttgatggcacaggccgggttcggcgtgtatacaaagaaaactaccaagttagtgctgattggcagcaaccactctctgcctttcctgaaattcgcgacaaatgaggccattcagagaacggaggcttatgaatacgctcagtccctgggggctgaaacttgtcccctgccttcctttcaggtgtttaagttcatttatagctgccgacttgccgagatgggactggcgacacaggctttccattattgcgaagccatcgcgaagtccattttgacacagccacacctctactctccggtgttgatttctcaacttgtacaaatggccagtcagctccgcctgtttgacccacaattgaaggagaaacctgaggaagagagtctggctgcgcccacttggctggtgcacttgcaacaggtggagaggcagatcaaggaaggggccggcgtgtggcatcaggacggggcactgccgcagcagtgccccggaacaccatcaagtgaaatggagcagctcgatagacctggcctgagtcagccaggcgccctcggaatcgccaacccgctgttggcagtgcctgcaccaagcccagaacatagttcaccatcagtgagattgcttcccagcgccccacagacactgcccgacggccctctcgcgagccccgctcgggttcccatgtttcccgtacccctgcccccggggcccctggagccagggccaggatgtgttacccctggccctgccttgggttttttggagccctccggtccaggactgccccccggagtcccccccctacaggaacgccggcatctgttacaggaggccaggtctcccgaccctgggatagtgcctcaagaggcccccgtgggcaacagtctgagcgagctcagcgaagagaattttgacggtaaattcgcgaaccttacgccctcccgtactgtacctgattccgaagctccccctggatgggatcgcgcagattcgggccctactcagcctccactcagtttaagtccggcgcctgagactaagagacctggacaggctgccaagaaggaaaccaaagagcctaaaaagggcgagtcttggtttttcagatggcttcccggaaaaaaaaaaaccgaggcctatttgcccgatgataagaacaaatccatcgtctgggatgagaagaaaaaccagtgggtaaacctcaatgaacctgaagaggagaaaaaggcacctcctccacctcccactagtatgccgaagaccgtgcaggctgcccctcctgccctgcctggacctccaggtgcaccggtaaacatgtattcccggagagcagcaggcactcgagcccggtacgtggacgtgctgaatcccagcggtacacagcggtccgaacctgccttagcgcccgctgatttcgttgccccactcgctcctttaccaattccttccaatctttttgtgcctacgccagacgccgaggagccccagctcccagacggaacaggccgggagggccccgctgcagcaaggggtcttgctaatccagaacctgcccccgagcctaaagtgcttagttcagcagctagccttcctggcagcgaactgccgagctctcgcccggaagggtcacaaggtggagaactctcacgctgcagttcaatgtccagcttatctcgcgaagtcagccagcatttcaaccaggcaccgggggacttgcccgctgccggcggacctccttcgggtgctatgcccttctataaccccgcccagctggcacaggcctgtgcaacctccggaagcagtcggctcgggagaatcggtcagcgcaaacatcttgttctgaactag

SEQ ID NO: 204362 - DNA, 6480 bp, synthetic construct
  misc_feature 1..6480: note = Description of Artificial Sequence: Synthetic coding sequence
  source 1..6480: mol_type = other DNA
atgcccggcctggaccggcccctgagccggcagaacccccacgacggagtagtaacccccgccgcaagccctagtcttcctcagcctggactgcagatgcctggacagtggggcccagttcagggtgggccacagccgtccggtcagcacagaagcccttgccccgagggtcccgtacccagtggagtaccttgtgccacaagtgtcccccacttccccacccccagcattcttcaccaaggccctggccatgagcagcactcccctctcgtggcccccccagctgcgctacctagcgacggaagggatgaggtctcccatttacagagcggttcacacctagcgaataactcagacccggaatcaactttccggcaaaacccccgcatcgtgaaccactgggcgtcacccgagctccgacagaatcccggagtcaagaatgagcatcggccagcttccgcactggtcaaccctctggcaagaggggattctcctgagaatcgcacacaccatcccctgggcgcgggggcgggctccggctgtgccccattggaggcagactccggcgcatccggtgcgcttgccatgttttttcaagggggggaaactgagaatgaggagaatttgtccagcgagaaggcgggtctttcggggcaggccgatttcgacgatttctgcagcagtcccggcctagggaggcccccagcaccaactcatgtgggtgcaggaagcctgtgtcaggccctgttgcccggcccatcgaacgaagccgctggtgatgtgtggggagataccgcctccaccggagtccctgacgcctctggcagccagtatgagaacgtagagaacctcgagtttgtccagaatcaggaagtcctcccgtcagagcctctgaatctggacccctcatctccctcagaccaatttagatacggccctctgccaggccctgccgttccacgccacggagcagtgtgtcataccggtgctcccgacgctaccctccacaccgtccacccagactctgtgagctcatcctactcctcaaggagtcatgggaggttgagcggcagcgccaggcctcaggagctggtgggcaccttcattcagcaggaagtggggaagccagaagacgaagcctcgggttccttcttcaaacagatcgacagttcccccgtcggtggagaaacggatgagacgaccgtctcacaaaactatcgcggcagtgttagccaacccagtacaccaagccccccgaagcctacaggtatttttcagacctctgccaactctagctttgagcccgttaaaagccacttagtcggggtcaagcccttcgaggctgatcgagccaatgtcgtcggtgaggtgagagaaacctgtgtgagacagaagcagtgtcgaccagccgccgctctcccagatgccagcccaggtaatcttgaacagcctcctgataacatggaaaccctctgtgctccacaggtgtgtcctctcccactgaattccacaaccgaggcagtccacatgttgccccatgccggggcgcctccccttgacaccgtctatcctgcgcctgagaagcggcccagtgcgaggacccagggtcccgtgaagtgcgaatcgccggctaccactctgtgggcacagagcgaactgcctgactttggcgggaatgtcctgctggccccagccgctcctgcgctgtacgtctgtgcaaagccccagcctcctgtggtccaacctcccgaggaagcaatgtcaggccaacagagccgtaacccctcttccgcagcccccgtgcagtcccgcggcggtattggcgcttctgaaaacctggagaacccaccgaagatgggggaggaggaggcattgcagagccaagcctctagcgggtatgctagcctactgagctccccacccaccgagtctctacagaacccaccagttctgatcgctcagcctgatcactcatacaacctggcgcaaccaattaatttttctgtgtccctgtccaactcacatgagaagaaccagagttggcgcgaagccctcgtcggagatcggcctgccgtgagctcatgggccttagggggtgatagcggggaaaataccagcctttcaggtattcctacatcctccgtactgagcctctcgctgccatcctcagttgcccagtcaaacttcccccaaggctcaggagcttccgaaatggtctctaaccagccagccaaccttttggtgcagcctccaagccaacctgtccctgagaacttagtgcctgagtctcaaaaggatcgcaaggccgggagcgctctgccaggcttcgccaactcaccggccggttccactagcgtggtgcttgtacctcccgcccacgggaccttggtccccgatggcaataaagcaaaccattccagccatcaggaggacacatacggagcactcgactttacgctgtcaagaacccttgaaaatccagtgaatgtgtacaacccctcccactcggattccctcgccagtcaacagagtgtcgcaagtcatccgcggcagtcaggaccgggcgcgcccaacctggaccgcttttaccagcaagtaactaaggacgcacagggacaacctggcctggagcgggcccagcaggagctggtcccaccacagcagcaggcgtccccacctcaactccccaaggcaatgtttagcgaactatcgaatcctgaaagcctccctgcccaggggcaggctcaaaactccgctcagagtcctgccagtctcgtactggtcgacgccgggcagcagttgccccctagaccccctcaatcctcttcggtgtctctcgtgtcttcaggtagtgggcaagcagctgtgccctccgaacagccttggcctcagccagttccggctctcgcccctgggccaccaccgcaggacttggctgcctattactattaccgccctctttatgacgcttatcaaccacagtacagtttgccctatcccccagagcctggcgcagccagcttgtattaccaggacgtgtacagcctgtatgaaccacgatatcgcccctacgacggcgccgcaagcgcctacgcacagaactatagataccccgagccagagcgtccatccagtcgtgcctctcacagctccgagcgcccgccacctcgtcagggatatcccgagggatattatagttctaagagtgggtggtcttcgcagtcagactattatgcttcttattattcaagccagtatgattatggggaccccggccattgggatagatatcattactcagcccgcgtgagagatccgaggacctatgaccgaagatactggtgcgacgcagagtatgacgcctacaggcgggagcattctgcctttggtgataggcccgagaaacgcgataataactggagatatgatcctcgctttaccgggtctttcgacgatgaccccgaccctcatcgggatccttacggcgaggaagtcgatagacgtagcgtccactcggagcacagtgcccggtccttgcacagcgcacattcattggcttcccgccgatcaagcctgagttctcactcgcaccagtcacaaatctataggagccataatgtggccgcaggttcttacgaagctccattacctcctggatcatttcatggggacttcgcctatggcacataccgctcaaattttagctctggaccgggctttccagagtatggatacccagccgataccgtgtggcctgctatggagcaggtgtctagtagaccaactagccccgagaagttttctgtgccacacgtgtgcgcacgcttcgggcctggcggtcagttgatcaaagtaatccccaatctgccatcagagggccaacccgccttggtggaggtgcacagcatggaagctcttctccagcacaccagcgagcaagaagagatgagggccttcccaggccccctggctaaagatgacacgcataaggttgatgtcatcaatttcgcgcagaacaaggcaatgaaatgtctgcaaaacgagaaccttatagataaagaatctgctagccttctttggaattttattgtgcttctgtgcagacagaacggaactgtagttggtaccgacattgcggagcttctgttgcgagaccacagaactgtgtggttgccaggaaagagccctaatgaagcgaaccttatcgacttcacgaacgaggctgtagagcaggtcgaggaggaagagtctggcgaagcccagctttcatttctgaccgggggtccagcggccgcagctagctccctggaaagggagacggaacgcttccgcgaactccttctctatggccgcaagaaggatgctctggaaagcgctatgaaaaacggtctgtggggccatgcacttctgctcgcttccaaaatggactctcggacccatgccagagtaatgacccggttcgccaattccctgcctatcaatgacccccttcagactgtgtatcaactgatgagcggacgtatgccagcagcaagcacctgttgcggcgacgagaagtggggagactggcgaccccacctggctatggttctttcaaatctcaataataatatggacgtcgagagtagaaccatggccaccatgggcgataccctggcttcgcgggggctgctcgatgcggcgcacttctgctatctgatggcgcaggccggatttggggtctataccaagaaaactaccaagctcgtgctgattgggtccaatcattccctgccatttctgaagttcgccaccaacgaagccatccaacggaccgaagcttatgagtatgcccagtccctcggcgcagaaacatgccctctcccctccttccaggtctttaaattcatttacagttgccgcctagctgaaatgggtttggctacccaagctttccattactgcgaggccattgccaagtctattttgacacagccacacctttactcaccagtgttaatatcacagctggtccagatggcaagccagctgcggcttttcgatccacagttgaaggaaaaacctgaggaggaatcactggcggctcccacctggctggtgcacctgcagcaggtggagcgacagatcaaggagggcgccggtgtatggcaccaggatggcgctctgccacaacagtgcccgggtacaccctcctccgagatggaacaactggatcgcccgggtctgagtcagccgggcgctctcggcatcgcaaatcctctcctggccgtgcccgctccgagccctgaacattcttctcctagcgtcaggcttctccccagcgccccccagacattgcctgatggccctctcgcatctcctgcccgagtgcctatgttccctgtgcctcttccaccaggcccgcttgagccgggccccggatgtgtaacacctggtcctgcattgggctttcttgaacctagtggacccggactcccccctggtgttccgcctctccaggaaagaaggcacttgctgcaagaggctcgcagtccagacccaggcatcgtccctcaggaagcaccagttggcaattccctgagcgaactcagtgaggagaacttcgacggtaagtttgctaatttaacaccatcccggactgtcccagattccgaagcccctcccggctgggaccgcgccgactccgggcccacacagccgcccctgagtttatcgcccgcccctgagaccaagcgccctggccaggccgccaaaaaggagactaaagaacctaaaaaaggtgagtcatggttctttagatggctcccaggcaagaagaaaacagaggcatatttacctgacgacaagaataagtctatagtgtgggacgaaaaaaagaaccaatgggttaatcttaatgagccagaggaagagaaaaaagcacccccaccgcccccgacaagtatgcctaaaaccgtgcaggcagcgccccctgcgctgcccggtccaccgggggccccagtgaatatgtattctagaagggctgcggggactagggctcgatacgtcgacgtcctgaacccgtctgggacccaaagatcagaaccagccctcgccccggccgatttcgtggcaccactcgccccgctcccaattccgtctaatctcttcgttcccactccagacgccgaagaaccccagttgcccgacgggaccggtcgagaggggcccgctgccgcccgaggcttggctaatccggagcctgcccctgagccaaaggtactgagcagcgccgcttcgctgcctggaagcgaactaccctcaagcagaccagagggtagccagggaggggaggccccaggagatctgcctgctgctgggggaccgccatctggcgctatgccattttacaacccggcccagttagctcaggcatgtgctacgagcggctcatcgcgcctaggcagaattggtcagagaaaacatctcgtattaaactag

SEQ ID NO: 204363 - DNA, 7074 bp, synthetic construct
  misc_feature 1..7074: note = Description of Artificial Sequence: Synthetic coding sequence
  source 1..7074: mol_type = other DNA
atgcagccccccccccagaccgtgcccagcggcatggccggcccccccccggccgggaaccctagatctgttttctgggcttcgtcaccgtacagaaggcgcgcgaataataacgccgccgttgcccccaccacctgtcctctgcaacctgtgacagaccccttcgccttctccaggcaggcccttcagagcaccccccttggaagttcctctaagagcagccctcccgtgttgcaggggccagctccggccggattctctcaacaccctgggttgttggtgccccatacccacgccagggattcttcgcagggaccctgcgaaccacttcctggccccctaacgcaaccacgggctcacgcatctcctttctcaggtgcactcacgccaagtgcgcccccaggccccgagatgaacaggtccgccgaagttggtccgtcctcagagcctgaagtccagaccctcccttatctgccacattacattcccggggttgaccctgaaacatctcatggcggacaccctcacggcaacatgcccggtctggaccgcccactaagtcgccaaaaccctcacgatggcgtggttacacccgcagcgtccccatctctgccgcagcctggcttacaaatgcccggacagtgggggcctgtccagggtggcccgcagcccagcggccagcatcgcagcccatgtcccgagggccctgtaccaagtggagtgccatgcgccacttcggtcccccactttccgacgccatccattctgcaccagggacccggacatgagcagcactcccccttggtggccccacctgccgccctacctagcgacggcagggacgaggtctcccacttacagtccggctctcacttggccaacaatagtgaccccgaatctacctttcgacaaaacccgcgcatcgttaaccattgggcctcccccgagctcaggcagaatcccggggtaaagaacgagcaccgaccagcgtcagcgctggttaacccactcgcccggggggacagccccgagaatcgtacacatcatccactgggggcaggggccggcagtgggtgtgcgcctctggaagcagattctggcgctagcggagctctggccatgttctttcagggtggcgagaccgagaacgaagaaaatcttagctccgaaaaagcagggctttcaggacaagctgacttcgatgacttttgcagtagtccggggctgggaagaccaccagcaccaacgcatgtaggggccggcagcctctgccaggccctgctcccaggtccatctaatgaagcagcaggcgatgtatggggcgatacagcctccactggagttcctgatgcatcgggttcccagtatgagaatgttgagaatctggaattcgtacagaatcaagaagtacttccatcagaaccactcaacctcgatccatccagtcctagcgaccagtttcgatatggacctctcccaggaccagccgtaccccggcacggcgctgtctgtcacacaggcgcgccggacgccactctgcataccgttcatcccgatagtgtcagttcctcctattcctcgcgttcccacggtcgactctctggttctgcaagaccacaggaattagttggcaccttcatccaacaggaagtcgggaagcctgaggacgaagcaagcggatcattctttaagcagatagactctagccccgtgggcggcgaaacagacgagaccacggtctctcagaactatcgtggatctgtgagccagccatccaccccctccccccccaagcccaccggaatattccagacgagcgctaacagttctttcgaacccgtcaagtcacacctagttggcgtcaagccatttgaggctgaccgtgccaatgtggtgggagaggtacgagaaacttgcgtcaggcaaaaacagtgcaggcctgccgccgccctgccagatgcaagtccagggaacttggagcaacccccagacaacatggaaacactctgcgcgccccaggtctgccctcttcctctcaactccaccaccgaagccgttcacatgttgcctcatgctggggctccgcctctggacactgtgtaccccgcccccgagaaacggccatccgcccggacccaggggcccgttaagtgcgagagcccagcaacaaccctatgggcgcagtccgagctccctgactttggagggaacgttcttttggcacccgctgccccagcactgtatgtctgcgccaagccacagccccccgtggtgcaaccccctgaggaggcaatgagcgggcagcagagcaggaatccatcttcagctgcgcctgtacaatcaaggggaggaataggggcgagcgaaaatctcgaaaatccacccaaaatgggcgaagaagaggccctccagtcgcaggcgtctagcgggtatgctagcctgctctcctccccacctacagaaagcctgcaaaatccaccagtgctgattgcacagccagaccacagctacaatcttgctcaaccaattaatttcagcgtcagcctctctaattcccacgagaaaaaccagtcgtggcgggaggcactcgttggagacaggcccgcagtaagctcctgggccttaggcggcgactctggtgagaacacaagcctttccggaattccaacaagcagcgtactgagcctcagcctgcctagctccgtggctcaatccaatttcccacagggctcaggcgcctccgagatggttagcaatcaacccgcgaacctacttgtgcagcccccttctcaacccgtccccgaaaatctggtccccgagtcacagaaggatcggaaggctggatccgcgctgccaggctttgctaattcccctgccggcagtacaagcgtagtcctggttccaccagctcacggaacccttgtccctgacggaaataaagccaatcattcatctcaccaagaggatacctatggggctctagattttaccctgagtaggaccctcgagaaccccgtcaatgtgtacaacccatcccacagtgactctttggcgagtcagcagagcgtggctagccatccgcgccagagtggtccaggcgcacccaatctcgataggttttatcagcaagtgacgaaggatgcgcaaggacagccgggcctcgaacgcgctcagcaggaacttgtgcctccccagcagcaggcttcccctccacagctgcctaaggccatgtttagcgaactatcaaatcccgagagtcttcccgcgcagggccaggcccagaactccgcccagtcacccgccagcctggtcctagtggacgccggtcaacagttgccacctcgcccgccacagtcaagctctgtctctctggtctcttcaggatccggccaggctgctgtgcctagtgagcagccatggcctcagcccgtccctgctctggccccaggccctccccctcaggacttggccgcgtactattattatcggcccttatatgatgcttaccagccgcagtactcccttccatacccaccagagcctggggctgcctccctatattatcaggatgtgtactctttatacgaacccagataccgaccctacgacggagccgcgtccgcatatgctcagaattatagataccccgaacccgagaggccaagttcaagagccagccacagtagcgagcgcccccctccgcgccaaggatacccagaaggctattattctagtaagagcggctggagcagccagtcagactactacgccagctattatagctcccagtacgactacggcgatcctggtcattgggataggtaccattattccgccagggtgagggatccccgtacatacgatcgcagatattggtgcgatgccgagtacgacgcttataggagagaacattctgcgttcggagatcgccccgagaagcgagacaacaactggcgatacgatccacgatttacaggcagttttgacgatgacccagaccctcacagggatccttacggggaggaagtagatcggagaagcgtgcacagcgagcactcagctcgctccctgcactccgcccatagtcttgcttctcggcggtcctcacttagttcccactcgcaccagagccaaatttatcgttctcacaacgtagccgcgggctcttacgaagcaccgctgccacctggcagctttcatggtgatttcgcctacggtacataccgcagcaacttttcctcgggccccgggtttcccgagtacggatacccggctgacaccgtctggccagcaatggagcaggtttcctcacggcccacatcccctgaaaagttttctgtgccacacgtgtgcgctcggttcggtccaggtggccagctcataaaagtgatccccaatttgccatccgaggggcagccagcgctggtggaggtgcatagcatggaggccttgttgcagcacaccagtgagcaggaggagatgcgggcgtttcccggaccgttggccaaagatgatacgcataaggtggacgtaataaacttcgcacagaataaggccatgaaatgtctgcagaacgagaatctgatagacaaagagagcgcctccctgctgtggaacttcattgtattgttgtgccgccagaacggcaccgtggttggtaccgatatcgcagagctgttgctcagggatcacagaacagtctggctcccaggaaagagcccaaatgaagccaatctgatcgactttaccaatgaggcagttgaacaggtggaggaggaggagtctggggaagcacagctgagttttctgacaggagggcccgctgctgcggccagctccttggaacgcgaaaccgagcggtttcgggaacttcttctctacggaaggaagaaagatgccctcgagagcgcaatgaaaaacggcctgtgggggcatgcgttactcctcgcgtccaagatggactcaagaacgcacgctagagtgatgactaggttcgctaacagccttcctattaatgatcccctgcagactgtgtatcaactaatgtccggtaggatgcctgccgcttctacatgttgtggagacgagaagtggggcgactggcggccgcatttagccatggtccttagtaatctcaataacaatatggatgttgagagtcgaacaatggctacaatgggagatactctcgcctctaggggcttgctcgatgccgcacatttttgctacctcatggctcaggccggctttggcgtgtatacgaaaaaaacaaccaaattggtgcttataggttctaaccacagtctgccatttctgaagttcgccaccaatgaggcaatacagcggactgaggcctacgagtatgctcagagtttgggcgctgagacgtgtccacttccatccttccaggtcttcaaatttatttactcttgtcgccttgcagaaatggggctggcaactcaagccttccactattgcgaagctatagccaaatctatcttgacacaaccacacttgtattctccggtgctgatttcacaactggttcagatggctagccaactgaggttgtttgacccgcaactgaaggaaaagccggaggaagaatcactcgccgcaccaacgtggctggtgcacttgcagcaggttgagagacaaattaaggagggagcaggcgtgtggcaccaggacggcgccttgcctcagcaatgcccaggcaccccaagctccgagatggagcaacttgatagaccaggcctttcccagcccggggccctaggtatcgctaatcccctcttagctgtgccggccccctcgcccgagcactcaagcccctccgttcgactgcttccctccgcaccccaaacccttccagatgggcctctggctagtccggcaagggtccccatgttccctgtcccactcccaccaggacccttagagccgggacccggatgtgtcacccccggacccgcgctcggcttccttgagccctccggaccaggactcccacctggtgtgccgccacttcaggagcgtcggcatctcctgcaggaagccaggtctccagatccagggatagttcctcaggaagcaccagtggggaacagtctgtctgagctgtcagaggaaaacttcgatggtaagtttgcaaatctgacccctagtaggaccgttccggattcagaggctccacccggctgggatagagccgatagtgggcccactcagcctcccctaagcctgagcccagcccccgagaccaagcgacccgggcaagcagcaaagaaggagacaaaggagccaaaaaaaggagagagttggtttttcaggtggctgcctggcaagaagaagactgaggcttacctccccgatgacaagaataagtcgatcgtgtgggacgagaagaaaaaccagtgggtaaatcttaatgagcccgaggaagaaaaaaaagcaccgccccctccaccaacttctatgccaaagacagtacaagctgctccccctgcgctgcctggccccccaggggcaccagtcaatatgtactccaggcgggctgcagggacacgcgcccgctatgtagacgtgctgaacccatccgggacccagcgctctgaacccgccctggctcccgctgattttgtggcccctctcgcaccactgcccattccgagcaacctcttcgtacccactcccgatgccgaggagccgcagctccccgacggtaccgggagagaaggccctgcagcagcccgcggattggccaatcccgagccggctccagagccaaaggtgctgtcctctgccgcatcactccccggctccgaactcccaagcagtcggccagaaggctctcagggaggtgaattaagtcggtgctctagcatgtcctcgctgtcacgcgaggtgagccaacatttcaaccaggcccctggggacctgcccgccgctggcggccccccatccggcgcgatgcctttttacaacccggcccaactggctcaagcgtgcgcgacttcgggctcttcgaggctgggtcggataggccagcggaaacatctggtgcttaactag

SEQ ID NO: 204364 - DNA, 1158 bp, synthetic construct
  misc_feature 1..1158: note = Description of Artificial Sequence: Synthetic coding sequence
  source 1..1158: mol_type = other DNA
atggacctgctgcccaccagcatcctgctggccagcctgtggatctgctcccatcttcacccacctggggtgtcggtcgatctaccccccaccagcatattgctggtctctctttggatctgctcccatttgcacccccccggagtgagtgtagatcgccctccacccccttcctcatggtgcttatgtggtagccctcctaccagcatactcctagttagcctctggatctgctctccccctccaagttcatggtgtctgtgcgggagcgcgcccaccagcattctccttgtttccctctggatatggagactgtggggcctgactgagggcgagtcttggttcttcaggtggctgcctggcaagaaaaagaccgaggcataccttcctgacgataagaataagtcaatcgtctgggatgagaagaagaaccagtgggtgaacctgaacgagcctgaagaggagaaaaaggctccacctccacctccaacctcaatgccaaaaactgtgcaggccgcccctccagcactgccagggccccccggggcccccgtgaatatgtatagtcgcagagccgccggcaccagggcaaggtacgtcgatgttctgaatcctagtgggactcagaggtctgagcctgctctggcacccgccgacttcgtggcccctctggcccccctcccgatccctagtaacctgtttgtcccgacgcctgttagctcggtccggcctcaagggcgttcaggtcgaaacgatggactactcgctctctccagccctgacgccgaggagccacagctgcctgacggcacaggcagggaggggcccgctgcagcaagggggctggcaaaccctgagcctgcgccagagcccaaggtgctttcatccgctgcgtcgctgccagggtctgagctgccttcttctagacccgagggatctcagggcggcgaattgtctcgctgctcttctatgtcgtcactgtctagagaagttagccagcattttaaccaagctcctggtgatctcccggctgccgggggccctcctagtggggctatgcctttttacaatccagcccagttggcccaggcctgtgcgacttccggcagctcaagactcgggagaatcgggcagagaaaacacctagttctcaattag

SEQ ID NO: 204365 - DNA, 6405 bp, synthetic construct
  misc_feature 1..6405: note = Description of Artificial Sequence: Synthetic coding sequence
  source 1..6405: mol_type = other DNA
atgcccggcctggaccggcccctgagccggcagaacccccacgacggtgttgttacaccggctgcttcaccaagtcttcctcagcccgggttgcagatgccgggccagtggggtcccgtccagggtggacctcagccctctgggcagcaccggagtccttgtcctgagggtcccgtgcccagcggtgttccttgcgctacctctgtgcctcattttcccaccccaagtatacttcatcagggccctggccacgagcagcatagcccgctggtggcaccacctgccgccctgccttccgatggcagagatgaggtaagccatctgcaaagcggaagtcatctggctaataactccgatcccgagtcaacattccggcaaaacccccggatagttaatcattgggctagtcctgagctgcgacagaatccgggggttaagaacgagcacaggccagcctcggctttggtgaatcctttggctcgcggagactcaccagagaatcgcacccaccatcccctcggcgccggggccggctccggatgtgctcccctggaggccgactcaggggcctccggtgcactcgccatgttcttccaaggaggcgaaacagagaacgaggagaatctgtcctccgagaaggccggcctctcgggacaggccgacttcgacgacttttgctcatcacccgggttggggagaccaccagctcctactcatgttggagctggcagcttatgtcaggcattactcccgggcccgtccaacgaggccgcaggggatgtgtggggagacaccgcatctactggggtgcctgatgcatctggctcgcaatatgaaaatgtggagaatcttgagttcgtgcaaaatcaggaggtcctgcctagtgagccacttaacctagacccctctagcccttccgatcagtttagatatggtcctctccctggcccagctgtgcctcggcacggcgccgtctgccacacaggtgccccagacgcaacactgcacactgtccatccagattctgtgagctcatcatattccagcagatcgcatgggagactgagtggatcagctcgccctcaagaactggtaggcacattcatccagcaggaagtgggcaaacccgaggacgaggccagcggctcatttttcaaacagatcgactccagtccagtgggtggagaaaccgatgaaaccactgtcagccagaattatcgggggagcgtgtcgcaaccttcaacaccatctcccccaaaaccgactggaatctttcaaaccagtgccaattccagctttgagccggttaaaagccacttggtgggagttaagccatttgaagccgatcgcgccaacgtcgtaggcgaggtgcgcgagacttgcgtccgccagaagcagtgtcgccccgcagccgccctacccgacgcaagccctggaaatctggaacagcctcccgacaatatggaaaccctctgcgcaccgcaggtgtgccccctgccactcaattctactacagaggcagtgcatatgctcccccatgcaggcgcacctcccctagatacagtctaccccgctcctgaaaagagaccgagtgctagaacgcagggcccagtcaagtgtgagagtccagctactaccttatgggcccagagcgaactccccgactttgggggaaacgtcctgctcgccccagccgcacctgctttatacgtgtgcgcaaagcctcagccaccggtggtccagccacctgaggaggctatgtcaggacagcagtcaagaaatccaagtagcgcagcccccgttcaatccagagggggaataggggcatcggaaaacctggagaacccgcccaagatgggcgaggaggaggcactacagagccaggcctctagcgggtacgctagcctattgtcctcccctccaaccgagtctttacagaaccccccagtactgattgcccagcctgaccacagctataacttggcgcagcccattaacttttcggtgagcctgtcgaactcccatgagaaaaaccagtcttggcgcgaagccctcgtgggtgatcggcccgcggtgtcctcatgggctctcgggggcgactctggggaaaataccagcctcagcgggatcccaacttccagcgtgctatctctttctctgccatctagcgtggcccagtctaacttccctcagggttctggggcctctgaaatggtgtctaaccagcccgctaacctcctcgtgcaaccgccttctcagccagtgcccgagaaccttgtgccggaatctcagaaagataggaaagccggaagcgcgctcccaggctttgccaactctcctgccggatctacctcagttgttctcgtccctcctgctcacggcaccctggtgccagacgggaacaaagccaaccacagttctcaccaagaagatacctatggagcactggatttcaccttgtcaagaaccctggagaatcccgtgaatgtctataaccctagtcactccgactcattggcctcacagcagagcgtagcctcccacccaaggcagtccggtccaggcgctcccaacctcgatcgcttttaccagcaagtcacaaaagacgcccagggacaacccggactcgaacgcgctcagcaggagctcgtgccaccccaacagcaggcctctccacctcaactgcctaaggctatgttctccgagctgagcaacccagagtcgctgcccgctcagggccaggcccagaattcagcccagagccctgcctctttggtgctggtcgatgctgggcagcaacttccgcccagacccccccagagttcatctgtgtcactggttagttctggctcaggtcaggccgcggtgcccagtgagcagccatggcctcagcccgtgcctgcactcgctcctggtccacctccgcaggatctggccgcctattattactaccgcccactctatgacgcgtatcagccacagtactctcttccctatccacctgaaccaggtgctgcttctctctactatcaggacgtctactctctgtatgagcctcgctatagaccgtacgatggcgctgcttccgcttatgctcaaaactatcgctatcctgagccagaacggcccagctcaagagcctctcattcctctgaaaggcctccacctaggcaggggtacccagaggggtactactcttcgaagagtggctggagctctcagtccgactactatgccagttactattctagtcagtacgattatggagatcctggacactgggaccggtatcattacagcgcacgcgtgcgggatccaagaacatatgaccgacgatactggtgtgacgctgaatacgatgcctacaggagggagcattcagctttcggcgacaggccggagaagagagataataactggcggtacgatccccgatttaccggaagcttcgatgatgatcccgatccccacagagatccctacggcgaagaagtggaccgaaggagcgtgcatagtgagcacagcgcacgatccctacattctgcccactcactggccagccgacgtagctccctcagctctcatagccaccaatcacaaatttaccgttcacacaatgttgccgccggtagttacgaggctcccctaccaccggggagtttccacggcgatttcgcttacggcacataccgttccaactttagtagtggtccgggattccccgaatatggttatcctgccgacacggtgtggcccgcaatggaacaggtgtcatcaaggccaacctcccccgaaaagttcagcgtgccacacgtttgcgcaagattcggacccggaggtcagcttattaaggtgatcccaaatttgccctccgaggggcagccagctcttgttgaggtgcactccatggaggctttgctccagcatactagtgagcaagaggagatgagagcttttccaggacccctcgccaaagatgatacgcataaagtagacgtgattaattttgcccagaacaaagccatgaagtgtctgcaaaacgagaacctgattgacaaagagagcgcgagcctattatggaatttcattgtccttctctgccgccagaacggaaccgtggtagggaccgacattgctgagctcctgctcagagatcataggaccgtctggctccccggtaagtcaccaaatgaggcaaatctcatcgactttaccaacgaagctgttgaacaggtagaagaagaggagtcaggagaggcacagctttcgtttcttaccggaggcccagccgccgccgccagctctctcgagagagaaacagagcgctttagggagctcctgttgtacggtagaaagaaagacgcactggagtctgcgatgaaaaatggactgtgggggcacgcactgctgctggcgtccaagatggatagtcgtacccacgctagggtaatgacccggttcgccaacagtctgcctataaatgatcccttgcagacagtatatcagctaatgtctggcagaatgccagccgcgtctacgtgttgcggagatgaaaagtggggcgattggagacctcatttggccatggtcttgagtaatctgaacaataacatggacgttgaatcaaggactatggctactatgggtgataccctggctagcagaggcctcctagatgcagcgcacttttgctatcttatggctcaggcggggtttggggtttacacaaagaagacaaccaagctcgtgctaattggctccaaccattccctgccatttctgaaatttgccaccaatgaggccatccagcgtaccgaggcatacgagtatgcccaatcactaggcgctgaaacttgcccgttgccgtcttttcaggttttcaaattcatttattcctgtcgtttggcggaaatgggcctggctactcaggccttccattactgtgaagcaatcgcgaaatcaattctcacccagccacatttatattctcctgtcctgatcagccaactggtgcaaatggcttcgcaattgcggctgttcgatccccagttgaaggaaaagccagaagaggagtctctggcggctcctacctggttggttcacctccagcaggtagagcgtcagatcaaggagggagcaggagtgtggcaccaggacggagccttgccccagcagtgcccaggcactccgtccagtgagatggaacagcttgataggccaggattatcccagccaggtgccctgggtatagctaacccgctgctggctgtgcctgcccctagtccggagcactccagtccttctgtgcgactcctccctagcgcacctcagacactgccggatggcccactggcatcacccgcccgcgtgccaatgttccccgtgcctttacctccaggcccgttggagccaggccccgggtgcgtgacacccgggcccgctcttggcttcctggaacccagtggaccaggtctaccccccggcgtacctcctcttcaagagagaagacatctcttgcaggaggcccggagtcccgatcccggaattgtcccacaggaggcccccgtgggtaactctctaagtgagttaagcgaagaaaattttgatggcaagttcgctaaccttacccccagcagaactgtccccgacagtgaagctcctcccggctgggatcgggcggactctggtccaacccagcctcccctatcgctctcgccagcccctgaaacgaagcggcccggacaggcagctaaaaaggagaccaaagaacccaagaagggtgaatcctggttcttcagatggctgcctgggaaaaagaagacagaagcatacctgccagatgataaaaataaatccattgtatgggatgaaaaaaaaaatcagtgggtcaatctaaatgaacccgaagaggaaaagaaagcgcccccccctccaccgacttctatgcctaagaccgtccaggctgcgccaccagctctgcctggacctccgggcgcaccagttaatatgtacagccggcgcgccgctggaactcgagcaaggtacgtggacgtgctgaacccgagtgggacccagcgttctgagccagccctggcacctgcagactttgtcgccccactggcccccctacctatcccttctaacctgtttgttccaacccccgacgctgaagaaccgcagctgcctgatggaaccggccgggagggacctgcagccgcccggggcttggctaacccagagcctgctcctgaacccaaggcccccggggacctacctgccgctggagggcctccgtccggcgctatgcctttttacaatccagcacaacttgcccaagcctgcgccacgtccggatcatcgcggttgggacgaattggccaacgcaaacacctggtgctcaattag

SEQ ID NO: 204366 - DNA, 423 bp, synthetic construct
  misc_feature 1..423: note = Description of Artificial Sequence: Synthetic coding sequence
  source 1..423: mol_type = other DNA
atggacctgctgcccaccagcatcctgctggccagcctgtggatctgctctcatctccatcctcctggtgtctccgtcgacctgcctccgacttcaattctgctggtgtccctgtggatatgctcccacctgcacccacccggggtatctgttgatcgccccccaccccccagttcatggtgcctgtgtggctctcctcctactagcatattattagtatctttgtggatctgcagccctcccccttccagttggtgcttgtgcggatctgctccaaccagcatcctcttggtctcactctggatttggagactctggggtcttacggaggtaggacatgtggagtttgtcttcctgccttggttgatctcctggaacataatgttttccaagctttttagctgcttcttgtacctgggctag

SEQ ID NO: 204367 - DNA, 2205 bp, synthetic construct
  misc_feature 1..2205: note = Description of Artificial Sequence: Synthetic coding sequence
  source 1..2205: mol_type = other DNA
atgttcagcgagctgagcaaccccgagagcctgcccgcccagggccaggcacaaaacagtgcccaaagcccagcgtcattggtgctggtggacgccgggcagcagctgcccccaaggccaccacagtcatcttccgtatcattagtgagttccgggtcaggacaggcggccgtgccatcagagcagccatggccccagcccgtgccagctctcgctcccggcccaccaccgcaagatcttgctgcatactactattatcgccctctctatgatgcctatcagcctcaatattcactcccttatccccctgagccaggtgccgcatcattgtactatcaggacgtctattcactgtacgaacctcgctatcgaccatatgacggtgcagccagcgcctacgcccagaattataggtatcccgagcccgagagacccagctcaagagcatctcacagctctgagcgccccccgcctagacagggatatcctgaaggttactactcttctaaatctggatggagcagccagtccgactattatgcaagttactactcgtcccagtacgattatggtgatcccggacactgggaccgataccactattcagcccgcgtaagggacccaaggacgtatgataggagatactggtgtgatgcggagtacgatgcataccggcgcgaacacagtgccttcggagaccggcccgaaaaacgcgataacaattggagatacgacccccgcttcactggaagctttgacgatgacccagatcctcaccgagatccatacggagaagaagtcgaccgccggagcgtccattccgaacactccgccaggagcctccactccgcacacagcctggctagcaggagaagcagcctaagcagtcatagccaccagagtcagatttaccggtcacacaatgtagcagcgggaagctacgaagccccactccctccggggtctttccacggcgattttgcttacggcacataccggtcaaacttctcctcgggacccggatttcctgaatacggatatcgcccggccctgggcttcctggaaccaagtggccccggactgcctccgggcgtacctccactgcaggagaggaggcacttgcttcaggaggctagaagccccgacccaggcatcgtgcctcaggaggctcccgtcggcaatagtctgagcgaactctctgaggagaatttcgacggaaaattcgccaaccttacccctagtagaacggttcccgactcagaagcacctccaggctgggacagggcggactccggacccactcagccgcccctgtccctcagcccagcgccagaaactaaacgccctggccaagccgccaaaaaagagacaaaagagccaaaaaagggcgaatcatggttttttcgctggctgcccggaaagaagaagaccgaagcttacctgcccgacgataaaaacaagtctatcgtgtgggatgaaaagaaaaatcagtgggttaatctgaacgaacccgaggaagagaagaaagcccctcccccgcctcccacaagcatgccaaagacagtacaggccgccccaccggctctacctgggcctccgggagcccccgtcaacatgtatagccgaagagccgccggaactagagcacgatatgtagacgtgctaaacccttccggcactcagagatcagagccagccttggctccagcggattttgtcgctccactggcacctctaccaattcccagtaacttgttcgttccgacacccgtgagacctcaggggagaagtggacgcaacgacgggctacttgccttgtcgtccccagacgccgaagagcctcagcttcctgacggcactggaagagagggccccgccgccgcgagaggactagcaaatcctgaacctgcccccgagccgaaggtcttaagtagtgccgcgtctctgccggggtctgagttgccctcctccaggcctgaagggagccagggcggagaactgtcccgttgcagcagtatgtcttctttgtctagagaggtatcccagcattttaatcaggcgccgggggatctgccagcggctgggggtcctcctagcggagccatgcctttctacaatcctgcccaacttgctcaggcgtgcgccaccagcggctcctcgcgactcggcagaattggtcaacgaaagcacctggtcctcaactag

SEQ ID NO: 204368 - DNA, 5184 bp, synthetic construct
  misc_feature 1..5184: note = Description of Artificial Sequence: Synthetic coding sequence
  source 1..5184: mol_type = other DNA
atgttcttccagggcggcgagaccgagaacgaggagaacctgagcagtgagaaggcggggctttccggccaagcagactttgacgatttttgctcttcccctggattgggacgcccccccgccccaacacacgtgggagcagggagtttgtgccaggcactgctgccgggcccttctaacgaggctgcgggcgatgtctggggcgatactgcctcaaccggtgtaccggacgcaagcgggtcgcaatacgagaatgttgaaaatcttgagtttgtccagaaccaggaagtgcttccctcggaaccactgaacctggatccctcatctccttccgaccaatttcgctatgggcctctgcctggacctgccgtgccccgtcacggagccgtgtgtcacacgggtgcccctgatgcgactctgcacactgtgcaccccgattccgtgtctagttcctatagttcgcgtagccatggacgcttatccggaagtgcacgcccccaggagcttgtgggaacattcattcaacaagaagtaggcaagcccgaggacgaggcttctgggtcgttttttaagcagatcgactcaagtcctgtgggaggtgaaacagacgaaactacagtgtcacaaaactataggggatcagtaagccagcccagtactccctccccccctaaaccaaccggaatcttccagaccagcgcgaattcttcctttgaacctgtgaaatcacatttggtgggtgttaaaccattcgaagctgacagagccaatgtcgtcggcgaggtacgagaaacctgtgtccgccagaagcagtgccgacccgctgccgccctacccgatgcctcccccggtaacctcgagcaaccacctgataatatggagacactatgtgctcctcaggtgtgtcctcttcccctgaatagtaccacagaagctgtacacatgctgccccatgccggggctccgccactggatactgtgtaccctgcccctgaaaagcggccgtcagctcgcacccagggccccgtgaagtgcgagagccctgctaccactctctgggcccagagcgagctcccagatttcggtggaaacgtactgctagcccctgccgctccagccctctacgtgtgtgccaaaccacagccccctgtggtgcagccccccgaagaggccatgtcaggccagcagagtcggaacccatctagcgcggcaccggtgcagagccgaggcgggattggagccagcgagaatctcgagaatccccccaaaatgggcgaagaagaagcactgcagtcccaggtgaccaaagacgctcaaggtcaacctggccttgagagagcccagcaggaacttgtgcccccgcagcaacaagccagcccccctcagctaccaaaggccatgttttcggaattaagcaatcccgagagtctccctgcccagggtcaggctcaaaactctgctcagtcacccgcctccctggtcctggtcgacgccgggcagcagctacctccaagacctccacagtcttcttctgtatctctagtctccagcggaagcggccaggccgccgtgccaagtgaacagccatggccacagccagtgcccgcactggctcctgggcctcctccacaagatcttgccgcctactactattatcgacctctgtatgatgcctaccaaccccaatactcacttccatatcctcctgagcccggggcagcttccctctattaccaggatgtgtactccctttacgagccaaggtatcgaccctacgacggcgccgcttcggcttatgcacagaactatcgataccccgagccagaaaggcctagtagcagagctagtcattcctccgaacgccccccaccaagacagggctaccctgaggggtattattcatccaagagcgggtggtccagccaaagcgattactatgctagttactacagtagccagtacgactatggcgaccccggacactgggacagatatcactactctgcaagggtcagggacccaagaacctacgaccggcgctattggtgtgatgcagagtacgatgcatacaggagagagcatagtgcattcggcgatcgtcccgaaaagcgtgataataattggcgctatgatccacgcttcactgggtcttttgacgatgacccagaccctcatagggacccttacggggaagaggttgaccgccgctccgtccattcagagcactccgcccggagcctacactcggcacactccctcgcaagcaggcgtagtagcctgtcttcacatagtcatcaaagccagatataccggagccacaacgtggcggcagggtcttatgaggcgcccctgccccctggctctttccatggggactttgcttatggcacttaccgcagcaatttctcatctgggcccggcttcccagagtatggatatcccgccgacactgtgtggcctgcaatggagcaggtgtcaagcaggccgacaagccctgagaagttttccgttccacacgtttgtgctcggtttggaccaggcggccaactcattaaggtcattccaaatctgccatcggaggggcaacctgcactggtggaggtgcacagcatggaagccctcctgcaacacacatccgaacaggaggaaatgcgtgctttccccgggccacttgcaaaggacgatactcataaggtggacgttatcaacttcgcacaaaataaagccatgaaatgtctgcaaaacgaaaacctcattgataaagagagtgcatccttgctgtggaatttcatagtgctactgtgtcgacaaaatggtacagtcgttgggaccgacatcgccgagctgctgctgagggaccatcggactgtctggctgcctggcaagtcccctaacgaggctaacctgatcgacttcactaacgaggcggttgagcaggtggaagaagaggaaagcggagaggcacagcttagtttcctgacaggcgggccagctgcggctgcctcttccttagaacgagaaacggagcggttcagagagcttctgctttatggtcgcaagaaagacgcccttgagagcgctatgaagaacggcctctggggccatgcactcctcctggctagcaaaatggactctaggactcatgcccgggttatgacccggtttgccaattccctgcctattaatgaccctctgcagaccgtgtaccaactgatgagtggaaggatgcctgcagcttccacgtgttgcggagacgagaagtggggagactggaggccccacctagccatggtgcttagcaatctcaacaacaatatggatgtggagagccgcacgatggctacaatgggtgacaccctggcctcaaggggcctgctagacgccgcccacttctgctacctcatggcacaagccggatttggggtgtacaccaagaagacgacaaaattagtgctcattggatctaaccacagcctgcccttcctcaagtttgcgaccaacgaggcaatccaaaggacagaagcttatgaatacgctcaatcccttggcgcagaaacttgcccgctgccttcgtttcaagtgttcaagttcatctattcctgcaggctggccgagatggggctcgcaactcaggcattccactactgcgaagccatcgccaaatccattttaactcagccccacctatactcacctgtgttaatctcacaactcgtccagatggcaagccagctccgtttgttcgatccccagctaaaagaaaaacccgaagaagagtcgctggcagcacctacttggctggtccatttacagcaggtggagagacagataaaggagggtgctggcgtctggcatcaggatggcgctctgccccagcagtgtcctggaacccccagtagtgagatggagcagcttgatcgcccgggcctctcacagccaggtgctctgggcatcgccaacccccttcttgcggtacccgccccctctcccgaacacagttcaccatccgtgaggttactcccttccgctccacaaacactgcctgatggtcctctggcctcccccgcacgggttcccatgttccccgtcccacttccaccaggaccccttgagcccggcccaggttgtgtaaccccaggtcccgccctggggtttctggaacctagcggtccaggcttgcctcctggggtccccccactgcaggagcgcaggcatcttctgcaggaagcgcgttccccagaccctggtattgtgcctcaggaagcccctgtgggcaactctctgagtgagttgtccgaagagaacttcgatggcaagttcgcgaaccttacaccatcccgcaccgtgcccgacagcgaggccccacccggttgggatcgagctgattcagggccaacccagccccccctatccctgtctccagcaccagagactaagcgcccaggacaggccgccaagaaagagacaaaagagcccaaaaaaggtgagtcttggttttttcggtggctgccaggcaaaaagaagacagaagcctatctgccagatgacaagaataaaagcattgtatgggacgagaagaagaaccaatgggtgaacctgaacgaacctgaggaggaaaagaaggcaccaccgccccctcccacttctatgcccaaaactgtgcaagctgcaccgcctgccttacctggaccaccaggggcacctgtgaatatgtattcccggcgggctgccggaacaagagcccgatacgtggatgtcctgaacccgtcaggcacacagagaagtgagcccgcccttgcgcctgctgacttcgtagcccctctggcaccactgcctataccctctaatctcttcgtgccgacacctgatgcagaggaaccacagttaccagatggcaccggcagggaaggcccagcagccgcccgcggattagctaatccagagccggcacccgaaccaaaggtgttgtccagtgccgcctcccttcccggatccgaactgcccagttctcgcccagaaggctcacaaggcggcgaggcgcccggtgatctccccgcggcaggggggcctcctagcggtgccatgcccttttacaatcctgcgcagctggcccaggcatgtgcaacgtctggatcgagcaggcttggtcgcataggacagcgaaaacatctagtcctgaattag

SEQ ID NO: 204369 - DNA, 6465 bp, synthetic construct
  misc_feature 1..6465: note = Description of Artificial Sequence: Synthetic coding sequence
  source 1..6465: mol_type = other DNA
atgcccggcctggaccggcccctgagccggcagaacccccacgacggagtggtgacccccgccgcctctccgagtctccctcaacccggcttacaaatgcccgggcaatggggacccgtgcagggtggacctcaaccaagcggccagcaccgctccccatgtcccgaagggccagtgccctccggagttccatgtgctacatccgtgcctcactttccaacaccatcaatactgcaccagggacccgggcatgaacagcactctcccctggtcgcccctcctgcggccttgccaagcgacggaagggacgaagtaagccatctacaaagcgggagtcatctggccaacaatagtgatcctgagagtactttcaggcagaatcctcggatcgtgaaccactgggcaagtcctgaactaagacagaatccaggtgtcaaaaacgagcatcgcccagctagtgccttggttaacccattggcacgtggagatagcccagagaacagaactcaccatcctcttggcgctggcgccggtagtggctgcgcgcccttggaagctgacagtggagcgtccggggccctcgcgatgttctttcagggcggagagactgaaaacgaagaaaacctgtcctccgaaaaggcagggctgtcaggacaggcggatttcgacgatttctgcagctcacccgggttggggagaccaccagcgcctacacatgttggggccgggtctttgtgccaggctctcctgcccggtccctccaacgaagccgccggcgacgtctggggtgacacggcttccacgggagtcccagacgccagcggctctcagtacgagaatgtcgagaacctggagtttgtgcagaaccaagaggtcctgccaagcgagccactaaatctggatccttcatccccatctgaccagtttagatacggccccctcccaggccccgcagttccacgacatggcgcagtgtgtcatacaggagcacctgatgcgacactccacactgtgcatcccgacagcgtcagcagcagttactcttcacgttctcacgggaggctgagcggctccgctaggccccaagaactggtgggcaccttcattcagcaggaagtgggtaaaccagaggacgaggctagtggctcgtttttcaagcagatcgattcatccccagtcggaggcgagacagacgagactactgtgagccagaattaccgaggatccgtttcgcagccctccacaccatcccctcccaagcctacaggcattttccagacaagtgccaattcaagcttcgaaccagttaaatcgcatttggtgggtgtcaagcctttcgaagctgatagagctaatgtagtcggagaggtaagggagacttgcgttcggcagaaacaatgtagacccgctgccgcgctgcccgacgcatcccccgggaatttggaacagccaccggataatatggaaaccctttgtgctccccaggtttgtcccctcccattgaattcaacaacggaagcagtgcacatgttgccacacgccggcgctccacctctcgacacagtctaccccgcacccgagaaaaggcccagtgctcggacacagggacctgtgaaatgcgagagtcctgccaccactctgtgggcacagtctgagttaccggactttggggggaatgtcctgctggctcccgccgccccagctctgtacgtgtgcgccaagccacagcctcctgtggtccagcctcccgaggaggctatgtctggacaacagtctcgtaacccatcatcagctgcccctgttcagtcgcgaggcggtattggagctagcgagaacctggagaacccgcccaagatgggggaggaggaggcactgcaaagtcaggcctcctccggctatgcgagcctcctgtcgtctcctcctacagagagtctgcaaaatccgcccgtgctgatcgcccagcccgaccacagctacaaccttgcccagcccatcaacttttccgttagcctgtcgaattctcacgaaaaaaatcagtcatggcgggaagccctggtgggcgacaggcccgcagtgtccagctgggccctggggggagatagtggagagaatacttctctgtctgggatccctactagctcagttcttagtctctcactgcctagcagcgtcgctcagtcaaactttccacagggttcaggagctagcgagatggtctctaatcaaccggccaaccttctggtgcaaccaccttctcagcccgttcctgagaatctggttcctgagtctcagaaggaccgcaaggccgggtccgccctccctggctttgctaattcccctgccggctccacctcagtggtcctggtccccccagcacatgggacccttgtgcctgacgggaacaaggcaaaccactcaagtcaccaggaagacacctatggcgcactggacttcaccctgtcgcggactctggagaaccctgttaacgtatataacccaagccattccgacagcctggcaagtcagcagagcgtagcgtcgcacccgcgtcaaagcggacctggtgctccaaacttggacaggttttatcagcaggtgacaaaagacgctcagggacagcccggtctggagagggcccagcaagagctggtgcccccacaacagcaggctagccctccacagctgcccaaagctatgttctccgagctatcaaacccagagagccttccagcccaggggcaagcacagaacagcgcgcaaagcccagcatcattggtgcttgtcgatgccgggcagcagctaccacctcggcctccccagtctagcagcgtgtccctggtgagcagtggaagcggtcaggcggccgtgccgtcagaacagccctggccccagcccgtgccagctctggcccccggaccacctcctcaggatctggctgcttattactattacaggcccttgtacgatgcctatcaacctcaatatagcctgccttacccacccgaacccggcgccgcctcactgtactatcaagatgtttactctctgtacgaaccaaggtataggccttatgacggagccgcgagtgcctacgctcagaactatagataccccgaaccagaacggccgagttcccgggcatcacactccagcgaaaggccgccacctcgccaagggtaccctgagggctactactcgtcaaagtctgggtggagcagtcagtctgattattacgcgtcatactacagctcccagtacgattacggggacccaggacattgggatcggtaccattactccgctcgcgtcagagatcccaggacatacgatcggcgatactggtgtgacgcagagtacgatgcttaccggcgcgaacacagtgcatttggagatcgccccgaaaagcgcgacaataactggcgctatgaccctagatttacaggaagcttcgacgacgaccctgatcctcaccgcgatccgtacggagaagaggtcgatcgaaggtccgtccacagtgaacacagcgcgcgatcactccacagtgctcacagtctcgcgtcccggcggagcagcctaagcagtcattctcaccagtcacagatttatcgctcgcataatgtggccgcaggctcttacgaggcgcctctgccacctgggtcattccatggagattttgcctatgggacctacagatcaaacttctcttccggccccggattccccgagtatggctatcctgcggacacggtatggcccgctatggaacaggtctcatctaggcccacgagtccagaaaaatttagtgtgccccacgtatgcgccaggtttggcccgggcggccaactcattaaggtgatccctaatcttccgtccgagggacaaccagcgttagttgaggttcattctatggaggctttactccagcacacgtccgaacaggaagaaatgagggctttcccgggacctcttgccaaggacgacacccacaaagtagacgtgattaacttcgcccagaataaagctatgaagtgcctccagaatgagaacttgatcgacaaggaaagcgcttccttactctggaatttcatcgtgctcctatgcaggcagaatggcactgtggtcggcacagacatcgcagaactcctcctgagagatcataggacagtttggcttcctggaaaatcccctaatgaggccaacctcattgacttcacaaatgaggctgtggaacaagtggaggaggaagaaagcggagaagcccagcttagcttcttaaccggaggcccagccgccgctgcgagctccctggaacgtgaaactgaacggtttagagagctgctcctatacgggcgtaaaaaagacgcgctcgagtctgccatgaagaatggtctgtgggggcacgctctgttgctggcttccaagatggatagcagaacacatgccagagtgatgactcgatttgctaactccctccccatcaatgatcctctccagaccgtgtatcagttaatgagtggacgaatgcctgccgctagcacatgttgcggcgatgaaaagtggggtgattggcggcctcacttggctatggttctttctaacctgaataataacatggacgtggagtcaaggaccatggctacaatgggggatactctcgcttcaaggggccttttggatgccgcccatttttgttatctgatggcccaggccggctttggggtttataccaagaagaccaccaaactcgtcctgatcggatcaaaccacagcctgccgtttttgaagttcgccactaacgaagccatacagcggaccgaggcatatgagtacgcccagtccctgggggccgaaacatgtcccctgcctagttttcaggtttttaaatttatctactcatgccgcctggccgaaatgggcttggccacccaggctttccactactgtgaggcaatcgctaagagcatcctcacccaaccccacctttatagccctgtgctcatctcccagctggtccagatggccagtcagctccgtctcttcgatccgcagcttaaagaaaagcccgaggaggaatctcttgccgcccctacatggctggtgcacctgcagcaggtggaacgccagatcaaggaaggggcgggtgtgtggcaccaggacggcgccctgccacagcagtgtccagggacacccagttccgagatggagcaactggaccgaccaggactgagccagccaggtgcgcttggcattgctaacccccttcttgctgtgcccgccccttctcccgaacattcatcaccaagcgtaagactgttgcccagtgcaccgcaaaccctgccggacggccctttggcctctccagctagggtgccgatgtttccagtgccgttgcccccaggcccgctggagcctggcccgggttgtgttacaccagggccagctttgggctttttagagcccagcggtcccggactacctcccggagttccccccctccaagaaaggagacacctgctccaggaagccaggagccctgacccaggaatcgtcccacaggaagcccccgtcggcaatagcctgagcgaattgagtgaagaaaatttcgacggaaaatttgccaacctgaccccgagcaggacggtgccagattccgaagccccccctggctgggaccgtgctgatagcggtcctacacagcctccgttaagcctctctccagcccccgaaacaaaaaggccgggacaggcggcaaaaaaagagactaaggagcccaagaaaggagaatcctggtttttcagatggctgccgggaaaaaaaaagacagaggcttacttaccagatgataagaataaaagtatcgtctgggacgagaagaaaaatcaatgggtgaaccttaatgagcccgaggaggagaagaaggccccgccgccaccccctacatccatgcctaaaacagtgcaggccgccccacctgctctccctgggccaccaggcgcccccgttaatatgtactctcgcagagcggccggcacccgagcacgctatgtggatgtgttgaacccatccggaacccaacggtctgagccagcactcgcgccggccgacttcgtggcccccttagcgccactcccaatcccaagcaatctttttgtgcctactccggacgctgaggagccacagctccctgacggaaccggacgcgaaggacctgccgcggcaagaggattagccaacccagagcctgctccagagccaaagctgtctcggtgttcgagcatgtctagcctctcgcgggaagtgtcccagcactttaaccaggcgcccggcgatttgcctgcagccgggggcccccccagtggtgccatgcccttttacaatccagctcagctagcgcaggcttgtgcaacaagtggaagctcgcgacttggtcgcattgggcagcgcaaacatttagtcctgaattag

SEQ ID NO: 204370 - DNA, 1521 bp, synthetic construct
  misc_feature 1..1521: note = Description of Artificial Sequence: Synthetic coding sequence
  source 1..1521: mol_type = other DNA
tgaagcgccttcggcgaccggcccgagaagcgggacaacaactggaggtatgatccccggtttacaggctcattcgacgacgatccagacccccacagggacccatatggtgaggaagtcgataggcggtctgtgcactccgagcacagtgcaaggtccctacacagtgcccatagcttggccagccgccggtcgagcctgtcaagccacagtcaccagagtcagatctaccggagtcataacgttgccgctggtagttacgaggctccactcccccctggttcttttcacggtgatttcgcctacgggacttacaggtcaaacttctcctcggggcccggctttccagaatacgggtaccccgctctgggattcctcgagccctctgggccagggttacccccaggcgtgccacccctgcaagagcggagacacttactgcaggaggcccgaagccctgatccaggaattgtcccacaagaagcccccgtcgggaacagcctgtccgagttatctgaggagaattttgacgggaaattcgccaatctgactccaagcagaaccgtgcccgactccgaggctccacctggatgggaccgagctgattccggtcctactcagcccccattgagtttgtcgcctgcccccgagaccaaaagacctggccaggcagcaaaaaaagaaactaaggaacccaaaaaaggtgaaagctggttcttccgatggctgcctggaaagaaaaagacagaagcgtatctgcccgatgataaaaacaagagtattgtttgggacgaaaagaaaaaccagtgggtaaatctgaacgaaccagaagaggaaaaaaaagcaccccctcccccccctactagtatgcctaaaactgtccaagcggcacccccagctctgccgggtccacctggagcccccgtgaacatgtattcccgtcgtgccgccggcaccagagccaggtacgtcgatgttttgaacccctccggaacacagcgcagcgaacccgccctggcacctgctgattttgtggccccactggccccgctgcccattccatcaaatctgtttgtgcccacccctgttcgaccccagggacgttctgggcgtaacgatggtctcttagctctctcctcccctgatgccgaggaaccacagctcccggacggtacaggcagagagggccctgcagcggccagaggcttagcgaaccccgagcctgccccagagcctaaggtgttgtcttctgctgcttccttgcccggctccgagctgccttctagcaggcccgaaggctcccaggggggagagttgtctcgctgtagttcaatgtcatccctgagtcgagaagtttcccagcatttcaaccaggctccaggggacctacccgctgctggaggaccaccatctggtgcaatgcctttctacaacccagcccagctcgcccaagcctgtgccaccagcggcagctctcgattggggaggattggacagcggaaacacctcgtcctcaactag

SEQ ID NO: 204371 - DNA, 3180 bp, synthetic construct
  misc_feature 1..3180: note = Description of Artificial Sequence: Synthetic coding sequence
  source 1..3180: mol_type = other DNA
gcccgggtgcgggacccccggacctacgaccggcggtactggtgcgatgctgagtatgacgcatacaggcgggaacattcagcatttggggacaggccagaaaaacgggacaataattggcgatacgatcccaggtttacaggcagcttcgacgacgacccagacccacatagagacccctatggcgaggaggtcgaccggaggtcagtccattctgagcacagcgctagatccctgcactcagcacactctctggccagccgtcggagtagcctctcttcacacagccaccagtctcagatttatcgttcccacaatgtggccgccggcagttacgaggcacccttgccacccggaagtttccatggcgatttcgcatacggcacctaccgctccaacttcagcagtgggcccggattccctgagtacggctacccggctgacactgtgtggcctgccatggaacaggtaagttccagacctacatctcccgaaaagttctccgtgccacacgtctgcgcgaggtttgggcctggaggccaacttataaaagttatccctaacctcccttccgaggggcaacctgcactagtggaggtccacagtatggaagccctgcttcagcacacctctgaacaagaagagatgagggcgtttccaggtccgctcgccaaggacgatactcacaaggtggacgtgattaactttgcccagaacaaggcaatgaagtgtctgcagaatgagaacctcatcgacaaggagagtgcgagtcttctgtggaatttcatcgtgctcctctgccgccaaaatggaaccgtggtcggcaccgatatcgcagagctccttctgcgcgatcatagaactgtttggctgcctggaaaatctcccaatgaggccaacttaatcgacttcactaatgaagccgtagaacaggtggaagaagaggaatctggcgaggcccagctttctttcttgaccggcggcccagccgcggcagccagtagcttagagcgagagaccgaacgctttagagaattacttctctacgggagaaaaaaggatgctttggagagcgccatgaagaacggactatggggacatgcactgcttcttgcttcgaagatggatagtagaacccacgctcgggttatgactaggtttgccaacagcctacccattaacgatcccctgcagacagtataccagctcatgtccggacggatgccagccgcgagtacctgctgcggcgatgagaaatggggggattggcgcccccatcttgctatggtgctgtctaacctgaacaacaacatggacgtggagtcacggacgatggctactatgggagacacgctggctagccgcggcctgctggacgcggcacacttttgttacttaatggcacaggccgggtttggcgtatacaccaagaagaccactaagctggttctcatcgggtctaatcacagcctgccattcctgaagttcgccacaaacgaggccatccagcgaaccgaagcctacgagtatgctcagagtctgggtgccgaaacttgccccctgccaagcttccaagtgtttaagttcatctattcctgtagattagctgagatgggtctggctactcaggcctttcactactgcgaggccatcgccaagtcaatcctgacacagcctcatttgtattcacccgtgctgattagccaactggtgcaaatggctagtcagctccggctttttgatccccagctgaaagagaagccggaggaggaaagcctggcagcccctacatggctagtgcacctgcagcaagtcgagaggcagatcaaggagggggcaggagtctggcaccaagatggggctctgccacaacagtgccccggtactccctcttcagagatggaacagttagacaggcctggtctgagtcaaccgggagccctcggaatagctaatccactgttagccgttcccgcaccatccccagagcattcatctccctcagttcggctgcttcccagcgcaccccagaccctccctgatggccctctggccagtccggcacgagtcccaatgtttcccgtacctctgcctccaggccccctcgagcccggtccgggctgtgtaacccccggacctgccctgggcttcctggagccttccggtccagggctgccacccggggtgccgccactgcaggaaaggcgccacctcctgcaagaagctaggtcacctgaccctggtatagtccctcaggaggcccctgtggggaactctctgtcggagctgagcgaagaaaattttgatgggaaatttgcgaacttgacgccttcccggaccgtgcccgattccgaagctcccccaggttgggaccgggcagattccgggcccactcagccaccattaagcctgagccctgcacccgagacgaagagaccggggcaggctgccaagaaggaaaccaaggaacctaagaaaggagagagttggttctttcgatggcttcctggcaagaagaagacagaggcctatttgcccgatgacaagaacaaaagcattgtttgggacgaaaaaaaaaatcaatgggtgaatctgaacgaacctgaggaggagaagaaggcaccacctcccccccccacaagcatgcccaagactgttcaggctgcccctccggcccttcctggaccaccgggtgcgccagtcaatatgtactccaggagggcagctggaacccgagctcggtatgttgatgttctgaacccttccggcactcagcgcagtgagccagctctcgccccagcagacttcgttgcccccctggcccctttaccaatcccctctaatttatttgtccccactcccgatgcagaggaaccgcagctacccgacgggaccggtagagagggccccgctgcggcccggggcctagctaatcccgaacccgctccagaacctaaagttttatcctcagctgcaagtctgccgggaagtgaactgccgtcaagccgaccagaaggcagccagggcggcgaagctcctggggatctcccagctgctgggggtcccccgagcggggcgatgcccttctacaaccctgcgcaactggcacaagcttgcgccacaagcgggagctcaagattagggcggattggccagcgaaagcatttagtgctgaactag

SEQ ID NO: 204372 - DNA, 603 bp, synthetic construct
  misc_feature 1..603: note = Description of Artificial Sequence: Synthetic coding sequence
  source 1..603: mol_type = other DNA
atgcccaagaccgtgcaggccgccccccccgccctgcccggccccccaggagcacccgttaatatgtatagtcgtagagctgctgggactcgcgcccgctatgtagatgtcttgaacccatcaggcacccagagatccgaacctgctctggctcccgcagattttgtggcaccactggcgccactgccgataccttctaacctgtttgtaccaacccctgtgtcatccgtgcgtccacaaggccggagtggtcggaacgatggcctgctcgccctgtcgagtccggacgcagaagaacctcagctcccggatggaaccggcagagaaggacctgccgccgctagggggttagccaatcccgagccagctccggagcccaaggtgttatcttcagcagcgtctctgcccggttccgagctgcctagttccagacccgaggggtctcagggtggcgaggcgcccggagatctgccagccgccggtggacctccttcaggggcaatgcccttttataatcccgctcaattagcccaggcctgtgctacttctggcagcagccgactggggcggattggccagaggaagcaccttgttcttaactag

SEQ ID NO: 204373 - DNA, 924 bp, synthetic construct
  misc_feature 1..924: note = Description of Artificial Sequence: Synthetic coding sequence
  source 1..924: mol_type = other DNA
atgagcatgatcctgagcgccagcgtgatccgggtgcgggacggcctgccactgtctgccagcactgattatgagcagtcaaccggcatgcaggaatgcaggaagtacttcaagatgctctcccggaagctggctcagttgcccgatcgatgtaccctcaagaccggccattacaatatcaatttcattagctcccttggagtgagttatatgatgctttgcaccgagaattaccctaacgttctcgccttttcattcctcgacgaactccagaaggaattcattaccacctataacatgatgaagaccaataccgccgttaggccttactgttttattgagtttgacaattttattcagaggactaagcagcggtacaataatcctagaagtttatcaaccaaaattaacttaagtgatatgcaaacggagataaagctgcgccctccctaccaaatctcaatgtgtgagctcggctcagctaacggcgtgacctccgctttctcagtggattgcaaaggtgccggaaagatctcatctgcccaccaacgcctggagcctgcgactctttccggaatcgtgggcttcatcttatctttgttgtgtggcgctctcaatctcattagggggtttcatgccatagagtctctcctgcagtccgatggggatgacttcaactacataattgccttcttcctaggcacagctgcctgtctgtatcagtgttacttgctggtctactacactggctggcgcaacgtgaagagttttcttacctttggtctcatatgcctgtgcaatatgtatctctatgaactgaggaacctgtggcaactatttttccacgtcaccgtgggagctttcgtcacactccaaatatggctgaggcaggcccagggcaaagccccagactatgacgtatag

SEQ ID NO: 204374 - DNA, 330 bp, synthetic construct
  misc_feature 1..330: note = Description of Artificial Sequence: Synthetic coding sequence
  source 1..330: mol_type = other DNA
atgagcatgatcctgagcgccagcgtgatccgggtgcgggacggcctacctctgtctgcttcgaccgactacgaacaaagtactggtatgcaggagtgtagaaagtatttcaaaatgctctcgcggaagctggctcagttgcctgaccgttgcaccctcaagactggacactacaatatcaactttatatcaagcctcggggtgtcttacatgatgctctgcaccgagaactatccgaacgtgttggctttctcctttcttgacgagttacaaaaagaattcatcacgacgtacaatatgatgaagacgaacaccgccgtacggccatag

SEQ ID NO: 204375 - DNA, 870 bp, synthetic construct
  misc_feature 1..870: note = Description of Artificial Sequence: Synthetic coding sequence
  source 1..870: mol_type = other DNA
atgagcatgatcctgagcgccagcgtgatccgggtgcgggacggcctgcccttaagcgccagcactgattatgagcaaagtactggaatgcaggaatgtaggaagtactttaaaatgttgagtagaaagctggcacagctgccggacagatgtactctgaaaacgggccactataatattaactttatcagctccttgggagtgtcatatatgatgctctgcaccgagaactacccaaatgttctggcattttcttttctcgacgagctgcagaaggagttcatcactacatataacatgatgaaaacgaacactgctgttcggccatactgcttcatcgaattcgataactttatccagcggactaagcagagatataacaatcctcgtagcttgagcaccaaaattaacctctctgatatgcagacagagattaagttacggccaccgtaccaaataagcatgtgtgagcttggtagtgctaacggtgtaacgtctgccttttctgtggactgtaagggggcaggcaagatttcaagtgcccaccagaggctggaaccagcgaccctcagcggcatagtcggttttattctctccctgctgtgtggggctctgaatctgataaggggctttcatgcaatcgagtcattactgcagtctgacggcgacgactttaactatattatagcttttttcctagggacagcagcttgcctctaccaatgttacttattggtgtactatactggatggcgcaacgtaaaaagtttccttacatttgggctgatatgtctatgcaacatgtacctttatgagctgaggaatctgtggcaacttttttttcacgtcactgtgggggcttttgtctag

SEQ ID NO: 204376 - DNA, 417 bp, synthetic construct
  misc_feature 1..417: note = Description of Artificial Sequence: Synthetic coding sequence
  source 1..417: mol_type = other DNA
atgagcatgatcctgagcgccagcgtgatccgggtgcgggacggcctgcctctatccgcatctaccgattatgaacagagtaccgggatgcaggaatgtcggaaatattttaaaatgttgagcagaaagcttgcacagctgccagacaggtgcacacttaagacgggacactataacattaactttattagctcgctgggtgttagttatatgatgctgtgtaccgagaattaccctaacgtgctggccttcagctttttagacgagctccagaaagaatttatcacaacctacaatatgatgaagaccaacacggccgtgagaccctattgctttatcgagtttgataattttatacagcgcaccaaacagcgatataataaccccagaagtctttccacaaagattaatctttag

SEQ ID NO: 204377 - DNA, 657 bp, synthetic construct
  misc_feature 1..657: note = Description of Artificial Sequence: Synthetic coding sequence
  source 1..657: mol_type = other DNA
atgagcatgatcctgagcgccagcgtgatccgggtgcgggacggcttacccctctccgcttcaaccgactacgaacagtctacaggtatgcaagagtgcagaaagtacttcaaaatgctgtcaagaaagctcgcacagctccccgataggtgcacccttaaaactggtcactacaatatcaactttattagctcgttgggtgtaagctatatgatgctctgtaccgagaattatcccaatgtacttgcgttcagtttccttgacgaattgcagaaggagttcatcaccacgtacaatatgatgaaaacaaataccgcggttagaccgtactgctttatagaatttgataatttcatacagcgtaccaagcaacgttacaacaaccccaggtccctctccaccaaaatcaatctctctgatatgcagaccgagatcaaactgaggcccccctatcagatatctatgtgcgaactcgggtcagctaacggcgtaacatcagctttttctgtcgattgcaagggcgcaggcaagattagctccgcgcaccaacggctcgagccggccactctcagtggtatcgtgggatttatattatctttgttgtgtggcgccctgaacctgattcgcgggttccatgccatcgaatccctgctctag

SEQ ID NO: 204378 - DNA, 306 bp, synthetic construct
  misc_feature 1..306: note = Description of Artificial Sequence: Synthetic coding sequence
  source 1..306: mol_type = other DNA
atgagcatgatcctgagcgccagcgtgatccgggtgcgggacggccttccactgagtgcatcaacggactacgagcaatcaaccggtatgcaggaatgtcggaaatacttcaaaatgctaagccgcaagctggcccagttgcccgacaggtgcacactgaagaccgggcattacaacatcaactttataagcagccttggggtttcctatatgatgctgtgcactgagaactatcctaatgtgctggccttcagcttcttggacgaacttcagaaagagtttattaccacatacaacatgatgtag

SEQ ID NO: 204379 - DNA, 924 bp, synthetic construct
  misc_feature 1..924: note = Description of Artificial Sequence: Synthetic coding sequence
  source 1..924: mol_type = other DNA
atgagcatgatcctgagcgccagcgtgatccgggtgcgggacggcctgcccttatcggccagcacagattatgagcagagtacagggatgcaggaatgccggaagtacttcaaaatgctgagcaggaaactcgcccaacttcccgacagatgcacactgaagacgggccattacaacatcaacttcatcagctcactcggtgtatcctatatgatgttatgtacagaaaattatccaaacgtgctagccttctccttcctggacgagctccagaaagagttcatcactacatacaacatgatgaaaacaaacacagccgtcaggccttattgttttatcgagttcgataacttcatccagaggacgaaacagcgctataataatccccgcagtttgtctacaaagatcaatttgagcgacatgcagaccgagatcaagcttaggcctccctatcaaatcagcatgtgcgagctgggatcggcaaatggcgttactagcgcctttagcgtggattgcaagggcgctggaaagatttcaagcgcccaccagcgcctcgaaccagccactttgagcggcatagtaggttttatcttgagtctgctgtgtggggcactaaacctcatccgaggattccatgctatcgagtcacttctccaatctgatggggatgatttcaattacatcatcgcttttttcctggggactgctgcatgcctgtaccagtgctatctcctggtctactacaccggttggaggaacgttaagagttttctcactttcggtttgatctgcctgtgtaacatgtacctgtatgagctccgcaatctgtggcagcttttctttcacgtgactgtgggtgctttcgtcacactgcagatatggctgcggcaggctcagggcaaagcccccgactatgacgtgtag

SEQ ID NO: 204380 - DNA, 2298 bp, synthetic construct
  misc_feature 1..2298: note = Description of Artificial Sequence: Synthetic coding sequence
  source 1..2298: mol_type = other DNA
atgaccacctacctggagttcatccagcagaacgaggagcgggacggcgtccggttcagctggaatgtttggccctcgtcacggttggaagcgacccggatggtggtgccggtagccgccctgttcacaccccttaaggagagaccagatctgccccccatccagtacgagccagttctatgtagccggaccacctgtcgcgcagtcttaaatcccttatgtcaagtagactatagggccaagctgtgggcttgtaacttttgttaccagagaaatcagttcccccccagttacgcaggaatctcagaactgaatcagcctgcagagctcctgccacaattctcctcaatcgagtacgtggtcctgaggggccctcagatgcctttgattttcctgtatgtggtggacacctgtatggaagacgaggaccttcaagccctgaaggaatccatgcagatgagcctgtcactgttgcccccaaccgccttggtgggtttgattaccttcggaaggatggttcaggtacatgaactggggtgcgagggtatctcaaaatcctatgtgtttcgaggtacaaaagatttatccgccaagcagctgcaggaaatgctcggtctgagtaaagtccccttaacccaggccacacgcggacctcaggtccagcagcctcccccctcaaatcggttcttacagccagtacaaaaaatagatatgaacttaactgatttattgggcgagctgcagcgcgacccttggcctgtgcctcaagggaagcgcccactccgcagctctggcgtggctctgagtatcgcagtcgggttactggagtgcacttttccaaacactggagcgagaattatgatgttcatcgggggccctgctacacaaggcccagggatggtagtgggggatgagctgaagaccccaatacggagttggcacgacattgacaaggataacgccaagtatgtgaagaaaggcactaaacactttgaggcactcgccaatagagccgcgacgactggacatgtgatcgatatctacgcctgtgcactggaccaaacagggctactggaaatgaaatgctgccccaacctgacaggcggctatatggtgatgggagactcctttaatacctcattattcaaacaaacttttcaacgggtattcaccaaggatatgcatggccagttcaagatgggtttcgggggcacactcgaaattaagacgtcccgggagattaagatctccggtgcaattgggccttgtgtgagcctgaacagtaagggcccttgtgtgtcagaaaatgagattggtaccggaggcacatgccaatggaagatttgtggactgagtccgaccacaacactggccatttatttcgaagtcgttaaccagcacaacgcacccatccctcagggtggaaggggcgccattcaattcgtcacgcagtaccagcacagtagcgggcagagaaggatcagggtgaccaccatagcccggaattgggccgacgcccagacccaaattcaaaatattgctgcctcttttgaccaggaggcggccgctattcttatggctagactggccatttatagagctgaaacagaggaaggcccagatgtgcttcgctggttggatcgacagctgataaggttgtgtcagaagtttggggaataccataaagacgacccatcctcatttcgcttctccgaaacttttagcctttaccctcaatttatgtttcacctcagaaggagctctttcctccaagtgtttaacaactctcccgacgaaagcagttactaccggcaccacttcatgcgccaagacttaacacaatctctgattatgattcagccaatcctgtatgcgtactctttctcggggccccctgagcccgtgctgcttgactcctctagtattttggctgaccgtattctgctgatggacaccttcttccagattttaatctaccacggcgagacaatcgctcaatggcggaagagcggctatcaggacatgcctgaatacgagaactttcggcatctgctccaagcccctgtcgacgacgcccaggaaatactgcactcaaggtttcctatgcccagatacatcgacacagagcacggtggctctcaggcccgatttctgctttcgaaggttaaccccagccaaacccacaacaatatgtatgcttggggccaagaaagcggtgcgccgatccttacagacgacgtgtcactgcaggtctttatggatcatttaaagaagctggctgtcagcagcgctgcatag

SEQ ID NO: 204381 - DNA, 1992 bp, synthetic construct
  misc_feature 1..1992: note = Description of Artificial Sequence: Synthetic coding sequence
  source 1..1992: mol_type = other DNA
atgcccctgatcttcctgtacgtggtggacacctgcatggaggacgaggacctgcaggctttaaaggaaagtatgcagatgtccctgagtctattgccaccgaccgctctcgtgggcttaatcaccttcgggaggatggttcaggtgcatgagttggggtgcgaggggatctcgaaaagctatgtgttcagaggcaccaaagatctgagtgctaagcagctccaggagatgttgggcctctccaaagttccattgacccaggccacgagggggccacaggtgcagcaaccgccaccaagcaatcgcttcctacagccggttcaaaagatcgacatgaatctgaccgacctgctgggggagctgcagagggacccctggccggtcccacaagggaagaggcccctcaggagctctggcgtggccctcagtattgctgttggcttgctggaatgcaccttccctaacaccggcgcccgcatcatgatgttcatcggcgggccagccactcagggtcccggtatggtagtcggcgacgagctcaagacaccaattcgctcatggcatgatatcgacaaggacaatgcgaaatatgtgaagaaggggacaaaacactttgaggccctcgcaaatagggctgccaccacaggccacgtgatcgacatttatgcttgtgcgctcgaccaaacagggctcctcgagatgaaatgttgcccgaatctcactggtggttatatggtgatgggggactcctttaataccagcctgttcaagcaaacatttcagcgcgttttcacgaaggacatgcacggtcagttcaaaatggggttcgggggcacattggaaattaagacatcaagggaaattaagattagcggagctatcgggccctgcgtgagcctaaactcaaagggcccctgtgtttccgaaaatgaaataggcactggaggtacctgtcagtggaagatatgtgggttatcccccacaactaccctcgccatttatttcgaggtcgtgaatcagcataatgccccgattccccagggcggccgcggagccatccagttcgtgactcagtatcagcatagctccggccagaggagaatcagagtaactaccattgcgagaaattgggccgatgcccaaacccagattcagaatatcgccgctagcttcgatcaggaagctgcggctattcttatggcacgcctagccatctaccgtgcagagaccgaggaaggccccgacgtcttacgctggctggatcgacagttgataaggttgtgccagaaattcggcgaatatcataaagacgatccaagctcttttcggttctctgaaacattcagcctgtatccgcagaggcgagattttcccaagacaagcggcgagatcctggaaaatcaggaaaaagccaggtcagcctgtctgaagtttatgtttcatctgcgaaggtcctcgtttctgcaagttttcaataactcccccgatgagtcctcgtattatagacaccatttcatgcggcaagatctaacgcaatctcttattatgattcagcctatactgtacgcatacagcttctctggcccccctgaacccgttctgctagattcaagctctatactggccgatcgcatcctacttatggacactttttttcagatactgatctatcacggggaaaccatagcacagtggaggaaatcagggtatcaggatatgcccgagtatgaaaacttcaggcatctgcttcaggctccagtagacgacgcccaggaaatactgcatagccgcttcccaatgccgcggtacatcgatactgaacacggtgggtcacaggccagattcctgctctcaaaggttaacccatcacaaactcacaacaacatgtacgcttggggacaggagagcggcgctccaatcctgaccgatgatgtgagtttgcaggtgttcatggatcacctcaaaaagctcgcagtcagctccgcagcatag

SEQ ID NO: 204382 - DNA, 1692 bp, synthetic construct
  misc_feature 1..1692: note = Description of Artificial Sequence: Synthetic coding sequence
  source 1..1692: mol_type = other DNA
atgctgggcctgagcaaggtgcccctgacccaggccacccggggcccccaggtccagcaaccaccacctagcaaccgattcctccagcccgtgcagaagattgacatgaacctcacagatctgttgggagagctccagcgggacccctggcccgtcccccaaggaaaacgaccgttgagatcttctggagtagcactcagcattgctgttggactgctcgagtgcacattccctaatacgggtgcgaggattatgatgttcatcggaggtccggcaacacagggacctggtatggtggtgggggatgagctgaaaactccaattaggagttggcatgatatcgacaaggacaacgccaagtatgtcaagaaaggcacaaagcattttgaagcactcgcaaaccgtgcagccacgaccggccatgttatagatatctatgcctgcgccctcgaccagaccgggctactggaaatgaagtgctgtcctaatctgacagggggatatatggttatgggcgacagttttaacacctccttgtttaaacagacattccaacgggtgttcactaaggatatgcacgggcagtttaagatgggattcggaggtactctggagatcaaaacatctcgcgagattaagatcagcggtgctattggtccatgcgtgagcttaaactctaagggaccatgcgttagtgaaaacgaaataggaacaggtggtacctgccagtggaagatctgcgggctgtcacctaccaccaccctagcaatttacttcgaggtcgtgaatcagcataacgccccgatccctcagggaggtagaggcgctatccagtttgtgacgcaatatcagcattccagtgggcaaaggcgcattagggtcaccacaattgccagaaactgggctgatgcccagactcagattcagaatatcgctgcttccttcgaccaagaggccgccgctatcctgatggccaggttagccatctatagggccgagacagaggaaggcccggacgtgctgagatggctggacagacagctgatcagactgtgtcagaaatttggcgagtaccacaaggatgatcccagctccttcaggttctccgagaccttcagtttgtaccctcagtttatgttccatttacggcggtcttccttcctgcaggtattcaacaattcacctgacgaatcatcatactaccggcaccactttatgagacaggacttgacacagtccctgattatgatccagcctattctgtacgcatactcattctccggccccccggagcccgttttactcgattcaagttcaattctggccgatcgcattttgcttatggatacgttctttcagatactcatttaccatggcgaaacaattgcccaatggcggaagagcggttaccaagacatgccagaatatgaaaatttccgccacctcctgcaggcgcctgtggatgatgcacaagagatcctccactctagatttcccatgcctcggtacatcgacaccgagcatggtggctctcaggccaggttcctcctcagcaaagtgaaccctagtcagactcacaataatatgtacgcctggggtcaggagagcggcgcccctattcttaccgatgatgtgtcactgcaggtgttcatggatcatctgaagaaacttgccgtgtccagtgccgcctag

SEQ ID NO: 204383 - DNA, 2211 bp, synthetic construct
  misc_feature 1..2211: note = Description of Artificial Sequence: Synthetic coding sequence
  source 1..2211: mol_type = other DNA
atgaccacctacctggagttcatccagcagaacgaggagcgggacggtgtgagattcagctggaacgtctggcctagttcacggctggaagcaacacgcatggtcgtaccggtcgccgccctgttcacgcctcttaaggaacggcctgacttgcctcccatacagtacgaaccagttctatgttcacgaaccacctgtcgggctgtactcaaccccctttgtcaggtggactaccgcgcaaagctctgggcttgcaatttctgctatcagaggaaccagagggggccccagatgcccctgattttcctctatgtggtagatacctgtatggaagatgaggatctccaggcactgaaagagagcatgcagatgtctctgtccctcctcccgccaactgctcttgtcggcttaattacctttggaaggatggtgcaggtccacgagctgggttgcgaaggaatttccaaaagctacgtgttcagggggacgaaggacctgagtgccaaacagcttcaagaaatgctggggctatctaaagtccccctgacccaggctactcgcgggccccaggtgcagcaaccaccaccaagcaaccggttcctgcagcctgtccaaaaaatcgacatgaatctcactgacttgctgggggagcttcagcgagatccctggcctgtcccacaagggaagagaccattgcgctcctccggggtagcattatcaatagccgttggcctgcttgaatgcacgttcccaaacactggcgccagaatcatgatgttcatcggcggccctgccacccagggcccgggtatggtggtgggtgacgagttgaaaacccccatcaggtcctggcacgacatcgacaaggataacgcgaagtacgtcaaaaagggcactaaacatttcgaggcattagcgaatcgtgcagccactacaggccacgtgatcgatatatacgcttgtgccctcgaccagactggactactcgagatgaagtgttgtcctaacctgaccggcggatatatggtgatgggcgactctttcaatactagtctattcaaacagacttttcagcgagtgttcactaaagacatgcatgggcagtttaagatggggttcggcggcacacttgaaataaaaacttcgagagagattaagatcagcggcgctattggcccttgtgtgtccctcaattcgaaggggccttgtgtatctgagaatgagatcggtactggaggtacatgtcaatggaagatctgcggactctccccaacgaccacgctcgctatatacttcgaagttgtcaatcagcacaatgccccaatcccacagggaggccgcggggctattcagttcgtgacacagtaccagcattcttccggccagcgccggatcagggttacaaccattgctcggaattgggccgacgcgcaaacccaaattcagaatatcgctgcctcattcgaccaggaagccgccgccattcttatggcacgtcttgccatttatcgcgccgagactgaggagggaccggacgtcctacggtggctcgacaggcagctgatccggttatgtcagaaatttggggagtatcataaggacgacccttcctcatttcggttctccgaaacattctccctgtaccctcaattcatgttccacctgaggagatccagtttcctgcaggtgtttaataactctccagatgagagctcatactaccggcaccacttcatgaggcaagacctcactcaatccctcattatgattcagcccatcctgtacgcctacagttttagcggtcccccggaacccgtgctgctggactcttcaagcatcctggctgatagaatactcctcatggatacattctttcagattctgatttatcatggcgagacgatcgctcagtggcggaagagcgggtatcaggatatgccggagtacgagaacttcaggcacctgctgcaagctcctgttgatgacgcccaggaaatcctgcactcacggttccccatgccgaggtatatagacacagagcacgggggatcccaggccaggttcttgctgtcgaaggttaaccccagccagacacataacaatatgtacgcgtggggtcaggagagcggcgcccctatccttacggacgacgtgtccctccaagtgtttatggaccatctgaagaagctggcagtgtcttccgccgcctag

SEQ ID NO: 204384 - DNA, 510 bp, synthetic construct
  misc_feature 1..510: note = Description of Artificial Sequence: Synthetic coding sequence
  source 1..510: mol_type = other DNA
atgaccacctacctggagttcatccagcagaacgaggagcgggacggcgtgagattctcttggaatgtatggccctcttcacgcctggaggcaacaaggatggtggtccccgttgccgctctttttacaccacttaaggagaggcctgatttgcctccaattcagtacgagcccgtactctgctctcgcaccacttgccgagctgtgctcaatcctctatgtcaggtcgactaccgggctaaactgtgggcttgtaacttttgttaccagcgcaaccaattcccccctagttacgccggcatttccgaactgaatcaacctgctgaacttctgccacaattttctagcatcgagtacgtcgtcctgcgcggcccccaaatgcctttgatctttctctacgtagtagatacttgtatggaagatgaagaccttcaggcactaaaagagtcaatgcagatgtctttgagcctgctgcctccaacggcattggtgggcttaattaccttctag

SEQ ID NO: 204385 - DNA, 285 bp, synthetic construct
  misc_feature 1..285: note = Description of Artificial Sequence: Synthetic coding sequence
  source 1..285: mol_type = other DNA
atgaccacctacctggagttcatccagcagaacgaggagcgggacggtgtgaggttttcatggaatgtctggccatcttcacgactcgaagccaccaggatggtggtgcccgtcgcagctctgttcacgcctctcaaggaacgtcccgatctccctccaattcaatacgaacctgttctgtgctccaggaccacatgcagagccgttctaaacccactttgccaggtcgactatcgggcgaaattatgggcgtgcaacttttgttaccagcgaaatcaggtgtag

SEQ ID NO: 204386 - DNA, 423 bp, synthetic construct
  misc_feature 1..423: note = Description of Artificial Sequence: Synthetic coding sequence
  source 1..423: mol_type = other DNA
atgaccacctacctggagttcatccagcagaacgaggagcgggacggagtgagattttcctggaatgtctggccatcttcacgcctggaggctacacgtatggttgtaccagtcgcagcactgttcacacccctgaaggagcgccccgatctgccccccattcagtatgagccagtgctctgttctcgcaccacgtgtcgcgccgtactgaatccactgtgtcaagttgactatagagcgaagctgtgggcttgcaatttctgttatcaaagaaatcagtttcctccgagctacgcagggatcagcgagctcaatcagccagcggagcttctaccacaattttcgagcatcgaatacgtggtactgagaggccctcaaatgcccctgatcttcctttatgtagtggacacatgtatggaatag

SEQ ID NO: 204387 - DNA, 123 bp, synthetic construct
  misc_feature 1..123: note = Description of Artificial Sequence: Synthetic coding sequence
  source 1..123: mol_type = other DNA
atgaccacctacctggagttcatccagcagaacgaggagcgggacggagtgcggtttagctggaacgtgtggccttcttcccggcttgaggcgacgcgcatggtggttccggtggctgcctag

SEQ ID NO: 204388 - DNA, 2304 bp, synthetic construct
  misc_feature 1..2304: note = Description of Artificial Sequence: Synthetic coding sequence
  source 1..2304: mol_type = other DNA
atggccacctacctggagttcatccagcagaacgaggagcgggacggcgtccgcttttcatggaatgtgtggccatctagtcggctggaggccacacgcatggtggttcccctggcctgcctgctgacccctctgaaagagcgtcctgatcttcctcccgtccagtatgagcccgtactttgcagccgcccaacctgtaaggcagttctaaacccactgtgccaggtcgattatcgcgctaagctgtgggcatgcaatttctgttttcagagaaatcagttccctcccgcgtacggagggatctccgaggtgaaccagcctgccgagcttatgccacaattctccacgattgaatatgtcattcaaagaggggcgcagtcaccattaatcttcctgtatgtggttgacacatgccttgaggaagatgatctacaggccctgaaggagtccctgcagatgtccttgtcattgcttcctcctgatgccctggttggtctgattacattcggcaggatggtgcaggtgcatgaactgtcttgtgaagggatcagtaaaagctatgtgtttcggggcactaaggacctcacagcaaagcaaatccaagacatgctgggcctaacgaaacccgcgatgccaatgcagcaggcccggcccgcgcagccccaggagcaccccttcgcttcaagtcgattcctccagcccgtgcataaaatcgatatgaacctgactgaccttctcggtgaactgcagcgcgacccctggcctgttacgcaaggtaaacgccccctgcgctcgaccggagtggcactctccatcgccgtgggtctcctggaggggacctttcccaatacaggcgccagaatcatgttgtttacaggtgggccgcccacccaaggacctggaatggtcgtcggagatgaacttaaaatcccaataaggagttggcatgatattgagaaggacaacgcaagatttatgaagaaagcgaccaaacactacgagatgctagccaacagaacagctgcaaatggtcactgcatcgatatctatgcttgtgccctcgaccagactggtctgcttgagatgaaatgttgcgcgaatttaaccgggggttatatggttatgggagattcgtttaacacttcactatttaagcagactttccagcgaatcttcaccaaggactttaacggcgacttccgcatggcttttggtgcaaccttagatgtgaagacgtcccgtgaactgaagattgcgggggccattggcccgtgcgtttccctgaacgtgaagggcccttgtgtgagcgagaacgaactgggcgtcggtggtaccagtcagtggaaaatttgcgggttagatccgacatctaccctcggtatttactttgaggtggttaatcagcacaataccccaattccccagggaggaagaggcgctattcagtttgtcactcattaccagcattcgtcgacgcagagaagaattcgcgtcaccacaatagcccggaactgggccgacgtccagtcccaacttagacacatcgaggcagcatttgatcaggaggctgcggccgtgctgatggctaggctaggcgtcttcagggccgagtccgaggaaggaccagacgttcttagatggctcgatagacagctgatccgactgtgccaaaagttcggccagtacaacaaagaggatcccactagcttcaggctgtctgattctttttccctttacccacagttcatgttccatctgaggcgaagccctttcctccaggtgttcaacaattcgcctgacgagtcgagctattacagacaccatttcgccagacaggatctgacccagtctctgataatgatccagcctattctttactcctactccttccacgggcccccagaacccgtactgctggacagcagtagcattctggccgaccgtatcctactgatggacaccttcttccagatcgtgatttacttgggggaaactatcgctcagtggaggaaagccggctaccaggacatgccggaatatgagaattttaagcatctgctgcaggcccccctcgacgatgcgcaagagattctgcaagccagattccccatgccccggtacattaataccgagcacggtggaagtcaggcgcgcttcctgctgtcaaaagtcaacccatcccagacccataataatctatatgcttggggtcaggaaactggcgcacctatccttaccgacgacgtatcccttcaggtgttcatggatcacctcaaaaaattggctgtgtcttccgcctgctag

SEQ ID NO: 204389 - DNA, 2304 bp, synthetic construct
  misc_feature 1..2304: note = Description of Artificial Sequence: Synthetic coding sequence
  source 1..2304: mol_type = other DNA
atggccacctacctggagttcatccagcagaacgaggagcgggacggcgtcaggttttcttggaatgtgtggccctcttctaggctggaggctaccaggatggtggttcctctggcctgcctcctgaccccccttaaagaaaggccagacctccctcccgtacaatatgaaccagtcctgtgttcaagaccaacctgcaaggccgtgctgaaccccttatgtcaggtggactaccgggctaaactttgggcatgcaatttttgctttcaacgcaatcaattcccacccgcgtatgggggtatttctgaggtgaatcagccagcagagctcatgccccaattctccacaattgaatatgttatccagcggggtgctcagtctcctctaatattcctatacgtggtcgatacgtgcctggaggaggacgacctgcaggcgctcaaagagtccttgcagatgagcctcagcctcctgcctcccgacgcactggtaggactaattacgtttggaaggatggtccaggtgcatgaactctcctgtgagggtatctcaaagtcctatgtttttcgtggtacaaaggacctgactgccaaacagatccaggacatgctcggccttactaaacctgccatgcctatgcagcaagcccgcccagcacagccacaggagcatcccttcgcttcatctcgatttctgcagcctgtgcacaaaatcgacatgaacctcaccgacctgttaggggaacttcaaagagacccctggcctgtcactcaggggaagaggccgctccggtccaccggcgtagctcttagtattgccgtgggactgctggaaggaacctttcctaacactggagctaggatcatgctgttcacaggtgggccaccaactcagggaccaggaatggtcgtgggggatgagctgaagattcccattagatcgtggcacgacattgagaaggataacgctagattcatgaaaaaggctaccaaacattacgaaatgcttgccaatagaacagccgctaatggccactgtatcgatatttacgcctgtgccctggatcaaactgggctgctggaaatgaagtgctgtgctaaccttaccggtggctacatggtgatgggagatagctttaatacatcccttttcaagcaaacctttcagaggatctttacaaaagacttcaatggagactttcgaatggcctttggggctacgctcgatgttaagacaagcagagaattaaagattgcgggcgccattggtccctgcgtctccctgaacgtgaaggggccctgcgttagcgagaacgagctgggcgtcggaggaacaagccagtggaagatctgcgggcttgacccaacgagcaccctgggaatctacttcgaggtggtcaatcaacacaacactccaattccacaaggggggagaggagcaatccagtttgtgactcattaccagcactcctcgacccaacggcggattagggtgacaacgattgcaaggaattgggccgatgtccaatcccaactgcgccatatagaagccgcatttgaccaggaggctgccgccgttttgatggctagactgggcgtttttagagctgaatctgaagaaggtcctgacgtgctgagatggcttgacagacagttgatccgcctgtgtcagaaattcggtcagtataacaaagaggaccctacatccttcaggctgtctgacagcttctcactgtatccacaatttatgtttcacttacggaggagcccctttctgcaagtgtttaacaactcccccgacgagtcatcatattaccgacaccacttcgcaaggcaggatctgactcagagtcttattatgatacagcccatactgtacagctacagtttccacggtcctcctgaacctgtattacttgacagctcgtcaatactggctgatcgcattctgctgatggatactttttttcagattgtaatttatttaggagagactattgcgcagtggaggaaggcggggtaccaggatatgccagaatacgaaaattttaagcacttgctgcaagctccgttggacgatgcccaagagatcctccaagcgagattccccatgcccaggtacatcaatacagagcacggaggttctcaggcacggttcctcctgtccaaagttaatcccagccaaacccataacaatctatacgcgtggggacaagaaactggggcccctatcctgacggacgatgtctcgctccaggtctttatggaccacctgaagaaactggctgtgtcttccgcctgctag

SEQ ID NO: 204390 - DNA, 2304 bp, synthetic construct
  misc_feature 1..2304: note = Description of Artificial Sequence: Synthetic coding sequence
  source 1..2304: mol_type = other DNA
atggccacctacctggagttcatccagcagaacgaggagcgggacggggtcagattcagctggaacgtgtggccaagctcacggctggaggcaacaagaatggttgtccctcttgcttgcctcctgacacccctgaaggaacggcctgacctcccgccggtgcaatacgagcctgttctgtgctctaggcccacgtgcaaggccgtcctgaaccccctgtgccaagtcgactacagggccaaactctgggcttgcaacttctgctttcagcgaaatcagttccctcctgcatatggaggaatttcagaggtaaaccagccggctgaactgatgccccagttttcaactatcgagtacgtcattcagagaggtgctcaatccccgctcattttcctgtatgtggtcgatacttgcctggaggaagacgacctacaggcgctgaaggaatccttgcaaatgtcccttagcctgctgccacctgacgccctggtgggcctaatcaccttcggccgcatggtacaggtccatgaactaagctgcgagggcatatccaagtcatacgtgtttagaggcactaaagacttgaccgctaaacagattcaggacatgctcggtctgacgaaacctgcaatgccaatgcagcaggccagacctgctcagccacaggagcaccccttcgctagctcacggtttctgcaaccagtccacaagattgacatgaacctgactgatctgctgggggaactgcaacgcgacccatggcctgttacccaaggtaagcgccccttacgcagcacgggagtagctctgtccatcgcagtgggtctgctagaaggtacctttccaaacaccggggctcgtatcatgctcttcacaggagggccacctacacagggccccgggatggtggtcggggatgagctgaaaattccgattcgcagctggcatgacatcgaaaaggataatgcaaggtttatgaagaaggcaactaaacactacgaaatgttagccaaccgaaccgccgccaatgggcactgtattgatatctatgcgtgcgcattggatcagactggtctgcttgaaatgaagtgctgcgctaaccttactggcggatacatggtaatgggagattccttcaacacttcacttttcaagcagacttttcagagaatctttactaaggattttaatggagactttcgtatggcattcggcgcaaccctggacgtgaaaacgtccagggagctcaagatcgcgggcgctatcggtccctgtgtctctttaaacgttaagggaccttgtgtgtctgagaacgagctgggtgtggggggtacgtcacaatggaagatctgcggcctggatcccactagtactctgggaatctacttcgaagttgtcaatcagcataacacaccaatccctcagggcggaagaggtgctatccagtttgtgacccattaccaacacagttcaacacaaaggcgtatccgtgtgacaacaatcgccagaaactgggccgacgtgcagtcgcagctgcgccatatcgaggcagcattcgaccaggaagctgctgcggtgttaatggcgcggctgggcgtgttccgagccgagtccgaggagggccccgacgtccttcggtggctggataggcagctcataagactttgccaaaaatttggccagtataacaaggaggaccccactagctttcggttatccgattccttctctctctatccgcagtttatgttccacctgaggcgttctcccttcttgcaggtgtttaacaacagcccagatgaatcaagctactatcgacaccatttcgcccgacaagacctcacccagagcctgataatgatccagcccattctctattcttatagctttcatggcccaccagagccagtcttgctggactctagctctatactggccgatcggatactgctgatggacacattttttcaaattgtgatataccttggagaaactatcgcccaatggcggaaagccggttaccaagatatgccggagtatgagaatttcaaacatcttttgcaggctcctctggacgacgctcaggagattctgcaggccaggtttccgatgcctaggtatatcaataccgagcatggggggtcacaggctaggtttctactgtcgaaagtgaacccatctcaaacacacaacaatctgtatgcctgggggcaggagactggggccccgattttgacggacgacgtgtcactccaagtattcatggaccatctcaagaagctggcggtgagtagcgcttgttag

SEQ ID NO: 204391 - DNA, 2304 bp, synthetic construct
  misc_feature 1..2304: note = Description of Artificial Sequence: Synthetic coding sequence
  source 1..2304: mol_type = other DNA
atggccacctacctggagttcatccagcagaacgaggagcgggacggggtgaggttctcctggaacgtctggccatcctctcgccttgaggctactcgtatggtagttccgctggcttgtctgctgaccccactcaaggaacgacctgatctgccgccagtccagtatgagccagttctgtgttctcggccaacgtgcaaggccgtgctgaacccactgtgtcaggtggactacagagccaagctctgggcctgcaatttttgttttcaaaggaaccaattccctcccgcttatggcggtatttccgaggtgaatcagccagccgaactgatgccccagttctccaccattgagtatgtgatacagcgtggggcacagagtccacttatttttctctatgttgtggatacatgcctcgaagaagacgatttgcaggcgctgaaggagtccttgcagatgagcctgtctctcctgccacctgatgccctagttggccttatcacgttcggacgtatggttcaggttcatgaattgagctgcgagggaatcagcaagagttacgtctttagaggaaccaaggacctgactgccaaacagatccaggatatgcttggactcaccaagccagccatgccaatgcagcaagctagacccgcccagccccaggaacatccttttgcttcgagtagattcttgcagcccgtgcataagatcgacatgaaccttacggacctgctcggagaactgcaacgcgatccttggcctgttacccagggaaaaagaccgctgagatctaccggggtggcactgtcaatagccgttggtctcctggaagggaccttccctaatacaggagcccgcatcatgttgttcactgggggacctcccactcaagggcccggcatggtcgttggtgacgaactgaagatccccatccggtcttggcacgatattgaaaaggacaacgcccgcttcatgaaaaaggccaccaagcactacgaaatgctagcaaataggacagccgccaatggccattgcatagatatctatgcttgtgcgctggaccaaactgggctccttgagatgaaatgctgcgccaacctcaccggtgggtatatggtgatgggagattcctttaatacgtcgctcttcaagcagacttttcagaggatttttacaaaagatttcaacggagacttcagaatggcgttcggggccaccttagatgtcaagacctctagagaattaaaaatcgccggtgctataggcccctgtgtgagtctgaacgtgaagggtccctgcgtgtctgagaacgagttgggagttggtggaacatcgcagtggaagatttgcggcctcgaccccacctctacattaggtatctatttcgaggttgtgaaccagcacaacacaccaattccccagggcggcagaggagctatccagtttgtgactcattaccagcatagcagcacacagcggagaattcgggtgactaccatcgcacggaactgggcagatgtccagagtcagctgcgccacattgaagccgcattcgatcaggaagcagctgctgttcttatggcaagactcggcgtgttccgagccgagtctgaggagggccctgatgtgctgagatggctcgacagacagctgattcgtctttgtcagaagttcggacagtacaataaggaggaccccaccagcttccggttatccgacagcttctcgttgtacccccaatttatgttccacctgcgccgttccccattcctgcaagtatttaacaatagcccagatgaatcctcctattataggcaccatttcgccaggcaggacctgacccaatctctgatcatgattcaaccaatcctgtatagctacagctttcatgggccgcccgaaccggtgttgctcgacagttccagcatccttgcagaccggatcctactgatggatacattttttcagatagtgatttatctgggcgagacaattgctcagtggaggaaagctggatatcaagatatgccagagtacgagaatttcaagcatctgctccaggcaccattagatgatgcacaggaaatccttcaggctcggttcccgatgccacgctatataaacacagaacatggtggaagtcaggctaggttcttgttgtcgaaggtgaacccctctcagacacacaacaacctttacgcctggggacaggaaacaggggccccaatcttgacggatgatgttagtctccaggtatttatggatcacttaaaaaaattagccgttagcagtgcatgctag

SEQ ID NO: 204392 - DNA, 741 bp, synthetic construct
  misc_feature 1..741: note = Description of Artificial Sequence: Synthetic coding sequence
  source 1..741: mol_type = other DNA
cagcggcggatccgggtgaccaccatcgcccggaactgggccgacgtgcagagtcagcttaggcatattgaggctgcctttgatcaagaggcggccgcagtcctcatggcccgcttgggtgtgtttagggcggagagcgaagaggggccggatgtgctgaggtggttagatagacaactcatccgtctttgccagaaatttggccaatacaataaagaagatcccaccagtttcaggttatcggactcattcagtctatacccacagttcatgtttcatctgagaagatcacctttcttacaggtgtttaataacagcccagatgagtcttcgtattataggcaccattttgcccggcaggacttaacgcagagcttaatcatgattcagcccatactgtacagttattccttccacggccctcccgagacaatcgcccaatggaggaaggccggctaccaggacatgcctgaatacgaaaattttaagcatctgctgcaggctcctcttgacgatgcgcaggaaattttgcaggcccgctttcccatgccccggtacatcaatacagagcacggcgggagccaagccaggttcctcttgtccaaggtgaatccttcgcagacccacaacaatctttatgcctggggccaggagacgggagctcccatcctgacagacgacgtgtctctacaggtgtttatggaccacctcaagaaactggcggtttccagtgcctgttag

SEQ ID NO: 204393 - DNA, 996 bp, synthetic construct
  misc_feature 1..996: note = Description of Artificial Sequence: Synthetic coding sequence
  source 1..996: mol_type = other DNA
atggccacctacctggagttcatccagcagaacgaggagcgggacggtgtaaggttctcctggaatgtgtggcccagctctagactcgaggcaaccaggatggtagttcccctcgcatgcctgctgacccccctgaaggaacggcccgacctgccgcccgtgcagtatgaaccagtgctttgcagcaggccaacatgtaaggcagttctgaaccctctttgccaggtcgactaccgggccaagctgtgggcatgcaacttctgctttcagcgcaatcagttcccccccgcatatggaggaatctcagaggtgaatcagccagctgaacttatgccccagttcagcacgatcgagtatgtgatccagcgcggcgcacagagtccactcatctttctgtatgtagttgacacgtgcctggaggaggacgaccttcaggctctgaaagagagcttgcaaatgtctctgagtttgctgccgcccgacgccttggtagggctcattactttcggccgtatggtgcaggttcacgagcttagctgcgaagggatttcaaagtcttatgtctttaggggaactaaggaccttacagccaaacaaatccaggacatgctagggttgactaaacccgccatgccaatgcagcaggcacgtcccgcacagccacaggagcatccgtttgcctctagccggtttctgcaaccggttcacaagatcgatatgaacctcaccgatctgctaggtgagctccagcgagacccctggcctgtcacacaaggcaaacggcctcttcgcagtaccggcgtggccctgtctattgccgtcggtctacttgagggtacctttccaaacaccggagctcgaatcatgctgttcacgggggggccgcccacacagggtcccgggatggtcgtaggggatgaactaaaaatccctatcaggtcctggcatgacattgagaaggacaacgctagattcatgaaaaaggcaactaaatag

SEQ ID NO: 204394 - DNA, 1200 bp, synthetic construct
  misc_feature 1..1200: note = Description of Artificial Sequence: Synthetic coding sequence
  source 1..1200: mol_type = other DNA
atggccgagcggcggcggcacaagaagcggatccaggaggtgggcgagccctctaaggaggagaaggccgtggcaaaatacctgcggttcaattgtccaactaagtccactaatatgatgggacatcgggtggactacttcatagcatcaaaagcggtggattgcctactggatagcaagtgggccaaggctaaaaaaggtgaggaagctctgttcaccactcgggagtctgtggtggattactgtaatagactgcttaaaaagcagttctttcatcgagctctcaaagtcatgaaaatgaaatacgataaggatatcaagaaggagaaggacaagggaaaggccgagtcgggtaaggaggaggacaagaaatctaaaaaggagaatatcaaggacgaaaagacaaaaaaagaaaaggaaaaaaaaaaggatggcgagaaggaagagtccaagaaagaagagaccccaggtactccgaagaagaaggagaccaagaaaaaattcaaacttgagccacatgatgaccaagtgtttctggatggtaatgaggtctacgtctggatttatgatcccgttcactttaagacattcgtgatgggactgatactggtgattgcagtgattgctgctactcttttccctctgtggcctgcagagatgcgggtgggggtgtattacctgtccgttggcgcaggatgtttcgtggcttctatcctgttgcttgctgtcgctcgctgtattctgttcttgattatatggctcatcactggcggccgacaccatttctggttcctaccaaatttaaccgccgatgtcggctttatagattccttcagaccattgtacactcatgagtacaagggtcccaaggctgatctgaaaaaagacgaaaagtccgagacgaaaaaacagcagaaatctgactccgaggagaaaagcgattcagagaaaaaggaagacgaagaaggcaaagtgggacccggaaatcacgggaccgagggtagcggaggggagaggcactccgacactgactctgacagacgggaagacgaccgatctcagcactccagcggaaatggtaatgacttcgagatgataaccaaggaagagctggaacagcaaacagatggggattgcgaggaagatgaagaggaagaaaacgacggcgagactccaaaatcaagccatgagaaaagctag

SEQ ID NO: 204395 - DNA, 1200 bp, synthetic construct
  misc_feature 1..1200: note = Description of Artificial Sequence: Synthetic coding sequence
  source 1..1200: mol_type = other DNA
atggccgagcggcggcggcacaagaagcggatccaggaggtgggcgagccctccaaagaagaaaaagccgtggccaaatacctacgcttcaattgcccgaccaagtctactaatatgatgggccaccgggtggattactttattgcaagcaaagccgtggattgtctactcgatagtaaatgggccaaggccaaaaaaggagaggaggctctgttcaccacgcgggagagtgtggtcgactactgtaaccgcctgcttaagaagcaattttttcaccgcgctcttaaggtgatgaagatgaagtatgataaggacataaagaaggaaaaggacaaaggtaaggccgaaagcggtaaagaggaggataaaaaatccaagaaggagaatatcaaagatgaaaaaaccaaaaaagaaaaagaaaagaagaaagatggtgaaaaagaggagtcaaaaaaggaggagacccccgggaccccaaagaagaaagaaaccaagaagaagttcaagctcgagccccatgacgaccaggtgtttctcgacggcaacgaggtctatgtctggatctacgaccccgttcatttcaaaaccttcgttatgggcctgatcctcgtaattgcagtgatcgccgctaccctgttcccactgtggccggctgagatgcgcgtcggcgtgtactacttgtcggtgggggccggttgttttgttgccagtatactgctgttggccgtcgcccggtgcattttgttcttgataatctggctgattaccggaggtagacatcacttctggtttttgcctaacttgacggccgacgttggcttcattgattcattcaggccactgtatacacacgagtataagggtccgaaggctgaccttaagaaagacgaaaagtcggaaacaaagaagcagcagaaatctgacagtgaggagaaatccgactcagaaaagaaggaagatgaagagggtaaagtcgggccgggaaaccacgggactgagggctcaggcggcgagaggcatagcgacacggactcagacagaagggaagatgacaggagccaacatagtagtggcaatgggaatgacttcgaaatgataacaaaggaggagctcgaacagcagaccgatggagactgcgaagaggacgaggaggaggagaacgacggcgagacccctaaaagctctcatgagaagagttag

SEQ ID NO: 204396 - DNA, 372 bp, synthetic construct
  misc_feature 1..372: note = Description of Artificial Sequence: Synthetic coding sequence
  source 1..372: mol_type = other DNA
atggccgagcggcggcggcacaagaagcggatccaggaggtgggcgaaccgtccaaggacgagaagtcggaaactaagaagcagcaaaaatccgatagtgaggaaaaaagcgactctgaaaaaaaggaagatgaggagggcaaagtgggccccggtaaccacggaaccgagggatccgggggagagcggcacagcgacactgatagtgaccgcagagaagatgacagatcccagcattcttccgggaacgggaatgacttcgagatgatcaccaaggaggaactggagcagcagaccgacggcgattgcgaggaggatgaggaagaagagaatgatggggaaacacctaagagctcccacgagaagtcttag

SEQ ID NO: 204397 - DNA, 2283 bp, synthetic construct
  misc_feature 1..2283: note = Description of Artificial Sequence: Synthetic coding sequence
  source 1..2283: mol_type = other DNA
atggccggccagcagttccagtacgacgacagcggcaacaccttcttttattttctaactagctttgtgggtttgatcgtgattccagctacatattatttgtggccaagggatcagaatgcggagcagattcgactcaaaaatattcgcaaagtgtacggtcggtgcatgtggtacaggctacggcttctaaaaccccagcctaacataattcccaccgttaagaagattgtgctcctggccgggtgggccctctttttgttccttgcttataaggtgagcaaaactgacagagagtaccaagagtacaacccgtacgaagtgctaaatctcgatcccggagctacagttgccgagattaagaagcaatatcgcctcctctcactcaagtaccatcctgataagggaggggatgaagtgatgtttatgaggatcgcgaaggcctacgcagccctgacagacgaggaaagtcgaaagaattgggaggagttcgggaaccccgacgggccacaggccaccagttttggtattgccctaccagcctggatagtcgatcagaaaaacagcatattggtactgttggtgtacggtctcgctttcatggtcattctgccagtggtggtaggctcttggtggtacaggtccatccggtactccggtgaccagattctcattcgtactacccagatctacacctattttgtttacaagactcgcaatatggatatgaaacggctcattatggtactggccggggccagtgaatttgatccacagtacaacaaggatgcaacctctcgaccaacagacaatatcctcatcccacagctgatccgcgagatcggcagtattaatctaaagaaaaatgaaccccccctgacgtgtccttattccctgaaggcccgggtattactgctgagccacctggcccggatgaaaatccccgagacgcttgaggaagaccagcagttcatgctgaagaagtgccctgcgttactccaagagatggttaacgtaatttgccagttgatcgtcatggccagaaaccgtgaggagcgggagttcagggcccccacactcgctagtctggagaattgtatgaaactgtcccagatggctgtgcagggattacaacaattcaagtcccccctcctacaactgccccatattgaggaggataacctacgcagagtatccaatcataagaagtataagattaaaactattcaagatcttgtgagtctcaaggagtccgatagacacactctgttacacttcctggaggatgaaaagtatgaagaagtcatggcagtgctcgggagttttccctacgtgacgatggacataaagagtcaggtgcttgatgatgaagattccaacaatatcacggttggaagcctagtcaccgttctggtcaagctgacccggcagactatggccgaggtgttcgagaaggagcagtctatttgtgcagcagaagaacagcccgccgaggatgggcaaggtgagacaaacaaaaatagaactaagggcggatggcagcagaagagtaaagggcctaaaaaaactgcaaaatccaaaaagaagaaacccctgaagaagaaacccacccctgttctgctcccacaatccaagcagcaaaagcagaaacaggccaatggcgtcgtgggcaacgaggccgctgtgaaagaagacgaggaggaggtcagcgataaaggcagtgacagtgaggaagaagagacaaatagggatagtcaaagtgagaaagacgatggtagcgatcgcgactccgatcgcgagcaggacgaaaaacagaacaaagatgacgaagccgagtggcaggagttacagcagtccatacagagaaaggaaagagcacttttagagaccaaatcaaagatcacccatcccgtgtactccttgtattttccagaggaaaaacaggagtggtggtggctatacatagcagaccgcaaagagcagactttaatctcaatgccataccacgtgtgtacacttaaagacacggaggaggtggagctcaaattcccagctccaggaaaaccggggaattaccagtataccgtgttcctgcggtctgattcctacatggggctggaccagattaagcctttgaagctggaagtgcacgaagctaagccggtccccgaaaaccatccccaatgggatacagccatagagggggacgaagaccaggaggattctgagggctttgaagactccttcgaggaagaggaagaggaagaagaggatgatgactag

SEQ ID NO: 204398 - DNA, 1254 bp, synthetic construct
  misc_feature 1..1254: note = Description of Artificial Sequence: Synthetic coding sequence
  source 1..1254: mol_type = other DNA
atgttcatgcggatcgccaaggcctacgccgccctgaccgacgaggagtcccggaagaattgggaggagttcgggaatccagacgggccacaggccaccagtttcgggattgcgctgcccgcctggattgtggaccagaagaatagcatcctggtgctactggtgtacggcctagcttttatggtcatcctccctgtggtggttggatcatggtggtacaggtctatcaggtactccggagaccaaattttgatcaggaccacccagatctacacatactttgtgtacaagacgcggaacatggacatgaagcggctcatcatggtgttagctggcgcctcggaattcgacccgcagtacaataaagacgccacatcaaggcctacagacaatattctaatcccgcagctgatcagagagatcggctctattaacctcaagaagaacgaaccaccacttacttgtccatattcgctcaaggctcgcgtgctgcttctgtcccacctggcacggatgaagatccccgaaaccctggaggaggatcagcagtttatgctgaagaaatgtcccgccttgctccaggaaatggtaaatgtaatttgccagttgatcgttatggcccgcaacagggaggagcgagagtttcgggctccaactttggccagcctcgagaattgtatgaagctgtcacagatggccgtgcaggggctgcagcaattcaaatccccactcctacaactcccccacattgaagaagacaacctgagacgggtatctaatcataaaaagtataaaatcaaaacaatccaggacctggtttcccttaaggaaagcgacaggcacacactgctacactttttggaagacgagaagtacgaggaggtgatggcggtcctgggatcctttccctacgtgacaatggatatcaagagccaagttttagacgacgaagattcgaacaatatcactgttggatcactagttacagttcttgtgaaactgacgcgccagacgatggcggaggtttttgagaaggagcagtcaatttgtgccgccgaagaacagccagccgaagatggtcagggagaaactaacaagaaccggacaaagggaggttggcaacagaagagcaaggggccaaagaaaacggccaagaaaaagaaggaaacgttcaaaaagaagacttacacttgcgccatcaccactgtgaaggccacagaaaccaaggcaggcaagtggtccaggtgggagtag

SEQ ID NO: 204399 - DNA, 1137 bp, synthetic construct
  misc_feature 1..1137: note = Description of Artificial Sequence: Synthetic coding sequence
  source 1..1137: mol_type = other DNA
gagcacgagcgggagttccgggcccccaccctggccagcctggagaattgtatgaagctgtctcaaatggctgttcagggtctgcagcagttcaaatcgccgttgttgcagctgccacacatcgaagaggacaatctcagaagggttagtaaccacaagaagtataaaatcaagaccattcaggatctggtgagtctcaaggaatcggaccgacacaccttactccattttctggaggatgagaaatatgaagaggtgatggcagtcctgggctcttttccatacgtgactatggacattaagagccaggtactggacgacgaggattccaataacattacggtgggatcgctggttactgtgctcgttaaactcacaaggcagacaatggccgaagtcttcgagaaagagcaatcaatttgtgccgcggaggaacagccggcagaggacggtcaaggggaaaccaataaaaacaggaccaaaggcggttggcagcagaaatcaaaggggcctaaaaagaccgccaaatctaaaaagaagaaaccattgaaaaagaaacccactcctgtactgttgccccagtctaagcagcagaaacagaagcaagcaaacggcgtcgtcgggaacgaagcagccgtgaaggaggacgaagaggaagtgagtgataaagggtcagattcagaagaggagtggcaagagctgcagcagtctatacagcggaaagagagagcattgcttgagacaaaatccaagatcactcaccctgtgtattctctttatttccctgaagagaaacaggagtggtggtggctctatattgccgaccgaaaggagcagactcttatatccatgccatatcacgtctgcacgctgaaggataccgaggaggttgaacttaaattccctgcccccggcaaacctgggaattaccaatacaccgtgtttttgcgttccgactcttacatggggctggatcagatcaaacctcttaaactggaggtacatgaagcaaaacccgtcccagaaaatcaccctcagtgggacaccgcgatagaaggagatgaggatcaggaggattctgaggggtttgaggattcctttgaggaagaagaagaagaggaggaagacgatgattag

SEQ ID NO: 204400 - DNA, 2346 bp, synthetic construct
  misc_feature 1..2346: note = Description of Artificial Sequence: Synthetic coding sequence
  source 1..2346: mol_type = other DNA
atggtgcgggtgctgcggagcatgtgcctgccccagctgtgcagccatatcctcagtgtttgtagtggtactacttccgacagaaatgtatacagcgtacctggcagccaatacctctataaccagccttcatgttatcgcggcttccagacagttaagcataggaatgagaatacatgtccgcttccccaggaaatgaaagccctgtttaagaagaagacctacgacgaaaaaaaaacttacgaccagcaaaaattcgattctgaacgagccgacggaacaattagttccgaaataaagagcgcaagaggcagccatcatctctctatctacgcagagaacagtttgaagtcagacggctatcacaagcgtaccgataggaagagccgaataatcgccaagaatgtctcaacctccaagcctgagtttgagttcacaactctggacttccctgagctgcagggggctgaaaacaatatgtctgaaatccagaagcagcctaagtgggggccagtccatagtgtgtccactgatatctcattattgcgggaagtcgtcaaacccgctgcagtactgtccaagggggaaattgtggttaagaacaaccccaatgaatccgtgacggcgaatgccgcaaccaatagccctagctgcactcgcgagctctcatggactcccatgggatatgtggtgagacagactctgagcactgaactgtccgccgcaccaaagaatgttaccagcatgataaatctcaaaacaatagcctcatctgccgaccccaagaacgttagcattccctcctccgaagcgctttcttcagatcctagttacaataaggaaaagcatatcatccaccccactcaaaagtcaaaagcatctcaaggtagcgatcttgaacagaatgaggcctcacgtaagaacaagaagaagaaggagaagagtactagcaagtacgaagtcttgacagtgcaggagcctcccaggatcgaggacgccgaggaatttcctaacctcgctgtggctagcgagaggcgagacaggattgaaacccccaagttccagtccaaacaacagccacaggataattttaagaataacgtgaaaaaatctcagcttcccgtccaactggacctcgggggcatgctaactgctttagaaaagaaacaacacagtcagcacgctaaacagagctctaagcccgtggtggtgtccgtgggcgctgttccagttctgagtaaagagtgtgcatctggagaacggggtcgtcgcatgtcacagatgaaaactccccataacccccttgatagtagcgcccccctcatgaagaaggggaagcagcgggagatccccaaggctaagaagcccacctcactgaaaaagatcatcctgaaggagaggcaagagcgcaagcagcgcctacaggagaatgcggttagccccgcctttacatccgatgacacccaagacggcgaatccgggggggacgatcagttccccgagcaggcagaactgtcagggcccgaggggatggatgagctcatctccactccatcggtcgaggataaaagtgaggagccgcctgggactgagctgcagcgcgacaccgaagcaagccacctcgctcctaaccatacgacttttccaaagatccacagccggcgatttcgcgattactgcagtcagatgctgtccaaggaggtcgacgcatgcgtcaccgacctgcttaaagaattggtgaggttccaggatagaatgtatcagaaggatcctgtaaaagctaagacaaaacgaaggttagtgctcggcctcagagaggtgttgaagcatctcaaactgaagaaactgaagtgcgtgatcatatcacccaactgtgaaaaaatccagagtaagggggggctagacgacactctgcataccataatcgattatgcttgtgagcagaacatcccattcgtcttcgctctgaacaggaaggccctggggcgcagcctgaacaaggctgtacctgtttctgtagtcggcatcttcagctatgacggcgcccaggatcaatttcataagatggttgaactcacagtggcggcgaggcaggcctacaagaccatgctcgagaacgttcaacaggagctggtgggagagccacgccctcaagcacctcccagcctgcccacgcagggccctagctgccccgccgaggacgggccccccgccttgaaggagaaggaggaacctcactatatcgaaatttggaaaaaacatctggaagcatactcagggtgcaccctggagctcgaggaaagcctcgaggcctcgacatcccagatgatgaacttaaacttgtag

SEQ ID NO: 204401 - DNA, 2565 bp, synthetic construct
  misc_feature 1..2565: note = Description of Artificial Sequence: Synthetic coding sequence
  source 1..2565: mol_type = other DNA
atggccagcgagggcccccgggagcccgagagcgagggcatcaagctctctgcagacgttaagcccttcgttccccgcttcgccggacttaatgtagcctggttggagtccagtgaggcgtgcgtctttccatcttccgcggccacctactacccatttgtccaggaaccccctgtaactgagcagaagatttacaccgaagatatggcattcggcgcaagtacattccccccacagtacctgtcttctgagattacattacacccatatgcttacagcccttacacgctggattctactcagaacgtatatagcgtcccgggttcccagtacctttacaatcaaccctcatgttaccgtggctttcagactgtcaagcatcggaacgagaacacatgcccacttcctcaggaaatgaaggcattgtttaaaaagaagacttatgacgaaaagaagacgtacgatcagcagaagttcgatagcgagcgtgcagatggtaccatttctagcgaaattaagagcgctcgcggttctcaccatctgtccatttacgccgaaaacagtcttaagtccgacggctaccataaacggacagaccggaaaagtcgcatcatcgctaagaatgttagtacatcaaagcctgaatttgagtttactacgttagattttcctgagcttcagggggccgagaacaacatgagtgaaatacagaagcagccgaagtggggccccgtgcatagcgtgtcaactgatattagcttattgagagaagtagttaagcccgcagctgtactgtctaagggagagattgtggtcaagaataatcctaacgaatctgtgaccgccaacgccgcaaccaactctccctcctgtactcgtgaactgtcatggacacctatggggtatgtagtaagacaaacattgtccacagagcttagtgccgcccccaagaacgtgaccagcatgattaacctcaagacgatcgccagcagcgccgaccctaagaatgtgtctatccccagctccgaagcattatcttccgacccaagttataataaggaaaaacacatcatccatccaacacagaagagcaaagcgagtcaaggtagtgacctggagcagaacgaggccagcagaaaaaataaaaaaaagaaggaaaaaagcactagtaagtacgaagtattgacggtgcaggagccccccaggattgaggacgcagaggagttccctaacttggctgttgctagcgaacggcgggatagaattgagacgcccaagtttcagagtaaacagcaaccccaggacaacttcaagaacaatgtcaaaaagagccagttacctgtccagctggacctgggcgggatgctcaccgctttggagaaaaagcaacactcacagcacgctaaacagagctccaaaccagtggtcgttagtgtgggcgccgtccccgtgctgtccaaagaatgtgcttcgggagagcgggggagaaggatgagccagatgaagaccccacacaatccacttgactcctcggcccctcttatgaaaaaaggaaagcagagggagatcccgaaggccaagaagcccacgtcccttaagaagatcatactgaaggaacgccaggagagaaagcaacgattgcaagaaaacgctgtttccccagcctttacgtccgatgacactcaggatggagagagtggaggcgacgatcaatttcctgagcaggccgagctctccggcccagagggcatggatgagctgatctctaccccttccgtcgaggacaaatccgaagaaccaccaggcactgaactgcagagagacaccgaggcgtcgcatctcgcacccaaccataccacctttccgaagatccactcacgaagatttcgcgattactgttcacaaatgctgtctaaggaggtggacgcttgtgtcacagacctattaaaggagctggtgagatttcaggaccggatgtaccagaaagacccagtgaaagccaagaccaagaggaggctcgttctcggtctacgggaggtgctgaagcaccttaagctcaagaaactcaaatgtgttattatatctcccaattgcgagaagattcagagcaaaggcgggctcgatgatactctccataccataatagattatgcttgtgaacaaaacattccattcgtgttcgcgctcaatcgtaaggccctcggcagaagtctcaacaaagccgtgccagtgtcggtagtgggcatcttttcatatgatggcgctcaagaccagtttcataagatggtcgaactcaccgttgccgcaagacaggcatataagaccatgctcgaaaacgtgcagcaggaactggtcggagagcctaggccacaggcccccccatcactccccacccaagggcctagctgccccgcagaagatggtccgccagctctgaaggagaaggaagagcctcattacatcgaaatttggaagaaacacttggaggcttactccggatgtaccctggagctagaagagagcctggaagcttcgacttcccaaatgatgaatttgaacttgtag

SEQ ID NO: 204402 - DNA, 2583 bp, synthetic construct
  misc_feature 1..2583: note = Description of Artificial Sequence: Synthetic coding sequence
  source 1..2583: mol_type = other DNA
cccgccagccggcggcccgccgccggcctgcgggacgccgccagctcggccccaaggggcatggcgtcagaaggtccacgggagcccgaatcagagggtataaaactctctgctgacgtgaagccattcgtgcctaggttcgctgggctgaatgttgcatggttggaatccagtgaggcctgtgtgtttccttcatcagccgcaacgtactaccccttcgtgcaggaaccgccagtgaccgaacagaaaatttacacagaggacatggccttcggcgcgtctacgttcccacctcaataccttagctctgaaataacgctgcatccctacgcctactctccttacacgttggactcaacccagaacgtgtactcagtcccagggtcacagtacttatacaaccagccatcctgctatcgagggtttcagacagtcaaacatcgaaatgagaacacttgtccgcttcctcaggaaatgaaggccttgttcaaaaaaaaaacttacgacgagaaaaagacatacgaccagcaaaaatttgattccgaaagggcagacggcactatcagctccgagattaagagtgcgcggggcagccatcacctctccatttatgctgaaaactcactcaaatctgacggctaccacaagcgtactgataggaagagccgaatcattgctaagaacgtttcaacctcaaagcccgagtttgagtttaccacactcgacttccccgaacttcaaggagctgaaaacaacatgtctgagattcagaaacaacctaagtggggtccagtgcactccgtgtcaactgatattagtctgctgcgggaggtcgttaaaccagctgctgtgctgtctaagggtgagatagtggtgaagaataacccaaacgaaagcgtgttgatgccccttcccattctgctccacgttcaggaaaccttgtccaccgagctcagcgcagctcctaaaaatgtgacatccatgattaacttgaaaacgatcgcgtctagcgcagacccgaaaaacgtcagtattccaagttccgaagctctgtcctcagatccgagctataacaaagagaagcacatcattcatcctactcagaagtccaaggcctcgcaggggtcggacttggaacagaacgaagcatcccgcaagaataaaaaaaaaaaggagaaatccacctccaagtacgaagtcctgactgtgcaggaaccccccagaatcgaagacgctgaggagttcccaaatcttgcagtggcaagtgaacgtagggaccgcatcgaaacccctaaatttcaaagtaagcagcaaccccaggataacttcaagaataacgtcaagaaaagccagcttccagttcaactggacctgggcggcatgcttacagcccttgaaaaaaaacagcattcacagcatgctaagcagtcatctaagcccgtcgtggtgtccgtgggtgccgtgcccgtcctgtccaaggagtgtgcatccggcgaacgagggagaaggatgagccaaatgaagacaccccacaatcccctggactccagcgctcccctgatgaagaaaggtaagcaacgcgagatacccaaagcaaaaaagcctaccagtttgaagaaaattattctcaaagagagacaagagcggaagcagcggctccaggagaacgccgtctctcccgcgttcactagtgatgacacgcaggacggcgagtccgggggcgatgatcagttcccagagcaggcggagctctctggccctgaaggaatggatgagctgattagcactccatcagttgaggataagtctgaggaaccacccgggaccgagctgcaacgtgatactgaagcatcacacctggcacccaaccacaccacatttcccaaaattcactcccgtagattcagagactattgcagccagatgctaagcaaggaggttgacgcctgtgtcactgatctgctcaaggagctcgtgaggttccaggacaggatgtaccaaaaggatcctgtgaaagctaagacgaagcgccggctcgtactaggtctccgcgaagtcctcaaacacctgaaacttaagaagctcaaatgcgttattatctctccaaactgcgaaaaaattcaaagcaagggcgggctggatgacacgctgcacaccatcattgattatgcttgcgaacagaacattccatttgtgttcgcgctgaaccgaaaggctctgggcaggagtttaaataaggctgtacccgtatctgtggtcgggattttcagctacgatggcgcccaggaccaatttcacaaaatggttgagctcaccgtagctgcccgccaagcctacaagacaatgctggagaatgtgcagcaggaactcgtaggggagcctcggccccaagcccccccatctctgcccacacaggggccgtcttgcccagccgaggatggacctccagctctaaaggaaaaggaggaaccccactacattgaaatatggaaaaagcaccttgaggcttattctggttgcaccctggagctggaagagtccttagaagctagcacttcacagatgatgaacttgaacctgtag

SEQ ID NO: 204403 - DNA, 828 bp, synthetic construct
  misc_feature 1..828: note = Description of Artificial Sequence: Synthetic coding sequence
  source 1..828: mol_type = other DNA
ggcaccatcagcagcgagatcaagagcgcccggggcagccaccacttatccatctacgctgagaatagtctcaaaagcgatgggtatcacaaacgcaccgaccggaagtccagaatcatcgctaagaacgtgtccacatccaaacctgagttcgaatttacaacacttgattttccagaactgcagggtgccgaaaataatatgagcgagatccagaagcagccaaagtgggggccagtacacagtgtgtccacagacatttccttactgcgcgaggtagtgaaacccgctgcggtcctttcaaagggagagatcgtggttaagaataaccccaacgaatccgtcaccgcaaacgcggcgaccaactctccttcttgcaccagagcagatcctaagaacgtgagcatcccaagctccgaggcactctcttctgatccgtcttacaacaaagaaaaacacatcatccaccctacacagaaatcaaaggcctcccagggcagcgatctggaacagaacgaagcctcccggaagaacaaaaagaagaaagaaaagtccacatccaagtacgaagttctcactgtccaggaacccccacgaatcgaggacgcagaggagtttccgaacttggcggttgcatcagaaaggcgggacaggatagagacccccaaattccagagtaagcagcagccccaggacaactttaagaacaacgtaaaaaagtctcagctccctgtgcagctggacctggggggcatgctgaccgcgctcgagaaaaaacagcactctcagcacgcgaagcaatcaagtaaaccggtcgttgtcagttag

SEQ ID NO: 204404 - DNA, 183 bp, synthetic construct
  misc_feature 1..183: note = Description of Artificial Sequence: Synthetic coding sequence
  source 1..183: mol_type = other DNA
atgcccctgcccatcctgctgcacgtgcaggagcagatcctgaagatgctcgtatatcacctccttaaactgtatctgcgcatcctgcctacgacaaaaaaaaacaccctctttattctcccaaagtccctcaaacaccataaagttgtgactctgaataagatgaaaccacaagagcgctag

SEQ ID NO: 204405 - DNA, 2361 bp, synthetic construct
  misc_feature 1..2361: note = Description of Artificial Sequence: Synthetic coding sequence
  source 1..2361: mol_type = other DNA
atggccttcggcgccagcaccttccccccccagtacctgagcagcgaaatcaccctgcacccatacgcatattcaccttataccctggatagcacacagaacgtgtacagcgtgcccggcagtcagtacctgtacaaccagccaagttgctaccggggtttccagaccgtgaagcatcggaacgagaatacctgcccactgcctcaggagatgaaagcattatttaaaaagaaaacctacgatgagaaaaagacatacgaccaacagaagttcgacagtgaaagggcagacggtactataagttccgaaatcaaaagtgctcgggggtcacaccatctgagcatttatgcagagaattccctgaaaagtgatggctatcacaagagaactgaccggaaaagtcgcattattgcaaagaatgtgagtacatcaaagcccgaattcgaattcacaacgcttgactttcccgaacttcagggcgcagaaaacaacatgtcagagatccagaagcaaccgaaatgggggccagtgcacagcgtttctacagatattagtttgctgcgagaggttgtgaagccagcagccgtgctgtctaagggcgagatcgtggttaaaaataatcccaacgagagcgtgaccgctaacgcagcgactaattccccaagctgcacgagggagctgagttggactcccatgggctatgtggtgaggcagactttaagcacagagctctcggctgcccccaagaacgttacaagcatgataaacttaaaaactatcgcaagctccgccgatccgaagaatgtcagcatcccctcctccgaagccctcagtagtgaccccagttacaataaggaaaagcacattatccatcccacgcagaaatcaaaggctagccagggatctgacttggagcagaatgaggccagtcgtaagaacaaaaagaaaaaggagaaatctacgtctaagtatgaggtcctgaccgtacaggagcccccaaggatagaagatgcggaggaatttcctaatttggcagtcgcgtctgagagaagggatcggattgaaacacccaagttccaaagcaagcagcagccccaggacaatttcaagaacaacgtcaaaaagtcccagctgccggtgcagctggacttaggcggaatgctcaccgccctggagaagaaacagcattcgcagcatgcaaagcaaagctctaagcccgttgtggtttctgtcggtgccgtgcccgtcctgtccaaagaatgtgctagcggggagagagggagaaggatgtcacagatgaagacgcctcacaaccctctagactcttcagctcccctaatgaagaaggggaaacagagggaaattcctaaagctaagaaaccgacttcactgaaaaagattatactcaaggaacggcaggagcggaaacagagactgcaggaaaacgccgtgagcccggctttcaccagcgacgatactcaagatggggaatctggtggggatgatcagtttccggagcaggcagagcttagcggcccggaaggcatggacgaacttatctcaacgccttccgtcgaggataagagcgaggaaccacccggaaccgaacttcagcgcgatactgaggcgagtcatctcgcgcctaatcacaccactttccccaaaattcattcaaggcgctttagagattattgctcacagatgctgtcaaaagaagtggacgcatgtgtcactgaccttcttaaggagttagtccgcttccaagacaggatgtaccaaaaggaccctgtgaaggccaaaaccaagcgtaggctcgtcctcgggcttagggaggtcctgaagcacctcaagctgaaaaagctgaaatgcgttatcatcagcccaaactgcgaaaagatccaaagcaagggcgggctcgatgacaccttgcatacaataatcgattacgcttgtgaacaaaacatacccttcgtctttgccctcaaccgaaaggctttaggtcgtagtctaaacaaagccgtgcctgtcagtgtggtgggcatcttctcttacgacggggcccaggaccagttccataagatggtcgaactgacagtcgctgcaaggcaggcttacaaaactatgctggagaacgtgcaacaagaattagtgggggagcctcggccacaggcccctccctctctccctactcagggcccctcatgtcctgccgaagatggccctcccgctttgaaggagaaggaggagccccactacatcgaaatctggaaaaaacatctggaggcctacagcgggtgcacactggaattagaggagtccctggaggctagcacatcccagatgatgaatctcaacctgtag

SEQ ID NO: 204406 - DNA, 747 bp, synthetic construct
  misc_feature 1..747: note = Description of Artificial Sequence: Synthetic coding sequence
  source 1..747: mol_type = other DNA
atgcagacctgccccctggccttccccggccacgtgagccaggcccttggcaccttactgtttctggctgcttctctgtcagcccagaacgagggctgggacagcccgatctgcaccgaaggagtcgtttccgtgtcctggggcgagaacacagtgatgtcatgcaacatctccaacgcattctcacatgtgaacatcaagctgcgtgcccatggacaagagtcagccatatttaacgaggtcgcgcccgggtatttctcgcgagacggctggcagttgcaggtgcagggaggtgtggcacagctggtgataaaaggagcgcgggatagtcacgccggattatatatgtggcacctcgtcggccatcagagaaacaaccgccaggtaacactggaggtgtccggagctgagcctcagagcgcacccgataccgggttttggcctgttcctgcggtcgttaccgctgtgttcattctgctggttgccttagtaatgttcgcttggtaccgctgtaggtgctcacagcagcggcgcgagaagaagttctttcttttagagcctcagatgaaagtcgccgcgctgagagctggtgcccagcagggattaagccgggccagcgctgagttatggactcccgatagcgagcctaccccacggcctcttgccttggttttcaaacccagccccctgggcgctctcgaactactgtctccacaacctctttttccctatgctgcagacccatag

SEQ ID NO: 204407 - DNA, 888 bp, synthetic construct
  misc_feature 1..888: note = Description of Artificial Sequence: Synthetic coding sequence
  source 1..888: mol_type = other DNA
atgctgcagggccccggcagcctgctgctgctgttcctggccagccactgctgtctaggcagcgcccggggcctgtttctgttcggtcagccggactttagctacaagcggtccaactgcaagcctatcccagccaacctacaactgtgtcacggcatcgaatatcagaacatgcgcctccctaacttgttgggccacgaaactatgaaagaagtcctcgagcaggctggtgcttggatacctctggtgatgaagcaatgtcatcctgatactaaaaaattcctatgttctctattcgctcctgtttgccttgatgatttggatgagacgattcagccttgccacagcctctgcgtgcaggtgaaggaccggtgcgcccctgtcatgtctgcattcggcttcccctggccagacatgctggaatgcgatcgtttccctcaggacaatgatttgtgtatcccgctcgcctcatctgaccacctcctgcccgcgaccgaggaagccccaaaggtctgcgaggcatgcaagaataaaaacgacgatgacaatgatattatggaaacactttgcaaaaacgactttgctttgaaaatcaaagtaaaggaaatcacttatatcaatagggacacaaaaatcattcttgagaccaagtctaagaccatttataaactcaatggagtaagtgagagagacctaaaaaagtcagtattatggctcaaagattccctgcagtgtacttgcgaggagatgaatgacatcaatgctccatacctcgtgatggggcagaaacagggaggcgaattggttataacatccgtaaagagatggcagaaaggacagcgggagtttaaaaggatatcccggtccattaggaaattgcagtgctag

SEQ ID NO: 204408 - DNA, 312 bp, synthetic construct
  misc_feature 1..312: note = Description of Artificial Sequence: Synthetic coding sequence
  source 1..312: mol_type = other DNA
atggccagccggtgggccgtgcagctgctgctggtggccgcctggtccatgggatgcggcgaagccctgaaatgttatacctgcaaagaaccaatgaccagtgcatcctgccgcacaatcacacgatgcaagcctgaagacacagcttgcatgacaactctcgtaacagtcgaagctgagtaccccttcaaccagtcaccagtggtcactagatcctgctcttcctcatgtgtagctaccgaccccgattccatcggggctgcccacctgatattttgttgctttcgggatctgtgtaattccgaactatag

SEQ ID NO: 204409 - DNA, 636 bp, synthetic construct
  misc_feature 1..636: note = Description of Artificial Sequence: Synthetic coding sequence
  source 1..636: mol_type = other DNA
atgatcagccggatggagaagatgaccatgatgatgaagatcctgattatgttcgctctgggaatgaattactggtcctgttcaggatttccagtctacgactatgacccttcaagcctgagagacgcgctgtcggcgagtgttgtgaaggtcaattcccagagcctatctccttacttatttagggcatttcgctcctccctcaagcgagtggaagtgcttgatgagaataatctggtgatgaacctggaattctcaatcagagaaacaacttgccgtaaggattctggcgaggacccagctacctgtgccttccagcgagattactacgtgtctacagccgtctgtcgtagtactgtcaaagtctcagctcagcaggtccagggcgtgcacgcccgatgttcctggtccagtagcactagtgaatcttactcgtccgaagagatgattttcggggatatgctgggatcccacaagtggcgaaataactatctgttcgggctcatatcggacgagtctatatccgagcagttctatgatcgtagtctgggcattatgagacgcgtgctgcccccgggaaaccgccgctaccctaatcaccgccaccgcgccaggatcaataccgatttcgaatag

SEQ ID NO: 204410 - DNA, 636 bp, synthetic construct
  misc_feature 1..636: note = Description of Artificial Sequence: Synthetic coding sequence
  source 1..636: mol_type = other DNA
atgatcagccggatggagaagatgaccatgatgatgaagatcctgattatgttcgcgctgggcatgaattactggtcatgcagcgggtttccagtgtatgactacgatccttcatccctgcgggatgccctcagcgcgtccgtggtgaaagtaaacagccagtcattgagcccgtatctgtttcgagcctttcggagctccttaaagagagtggaggtactggacgagaacaacctggtgatgaacttggagttttctattcgggagacgacatgccggaaggacagcggggaggaccccgcgacgtgcgccttccagcgggactattatgtgagtacagcggtttgccggagcacagtgaaggtatcagcacaacaggtgcagggcgtccacgcacgttgcagttggagttcgtctacaagcgagagttattctagtgaggagatgatatttggcgacatgttaggctcgcacaagtggcgaaataactatttattcggcctcatctctgacgagagtatatccgagcagttctatgatcggtcccttggcattatgcgccgagtactcccacctggcaaccgacgctaccctaatcatcggcatcgggcgcgtatcaatacagacttcgagtag

SEQ ID NO: 204411 - DNA, 366 bp, synthetic construct
  misc_feature 1..366: note = Description of Artificial Sequence: Synthetic coding sequence
  source 1..366: mol_type = other DNA
atggccccccggcccctgctgctgctgctgctgctgctgggcggctccgcagctcgtcccgcgccccctcgagcccggcgccacagtgacggtacatttacctctgaattgagcagattgcgcgagggagcccgtctgcaaaggttactgcagggactggtggggaagcgctctgaacaggacgctgagaattccatggcctggactaggttgtcggccgggctcctctgtccaagtgggtccaacatgcccatcctgcaggcctggatgccactggacggaacctggtccccttggctgccaccgggccctatggtgtccgagcctgccggggccgctgccgagggcaccctgcgtccccgctag

SEQ ID NO: 204412 - DNA, 1323 bp, synthetic construct
  misc_feature 1..1323: note = Description of Artificial Sequence: Synthetic coding sequence
  source 1..1323: mol_type = other DNA
atgcggccccacctgagcccccccctgcagcagctgctgctgcccgttttattggcttgcgcagctcattctaccggggccttgcctaggttatgtgacgttcttcaggtcctgtgggaagagcaagaccagtgcctgcaggagctgagtagagagcagacgggcgatctgggcaccgaacagcccgtcccagggtgcgaagggatgtgggataacatctcctgttggccatcaagcgtgccgggccgaatggttgaagtggagtgcccacgttttctccggatgctgacatctaggaatggatcacttttccgaaactgtacacaggacggatggtccgagacatttccaaggcctaatctagcctgtggagtcaacgtaaacgactctagtaacgaaaagcgacactcataccttctgaaactgaaggtgatgtacaccgtgggatactcttcatccctagtcatgctgctggtagcgctggggatcctgtgtgcctttagaagattacactgtacacgcaactacatacacatgcatctgttcgtctccttcatcctgcgggcactctccaacttcatcaaagatgctgtgttattctcgagcgacgatgttacttactgcgatgcccaccgggcgggatgtaagctggtgatggtcctttttcagtactgtatcatggccaactactcatggcttttggtggaaggactgtatctgcatacactgttagccatttccttcttctctgaacggaagtacctgcaaggctttgtggccttcggctggggcagccccgccatcttcgttgctctttgggcaatcgccagacactttctggaggacgtgggatgctgggatattaacgctaacgcctcaatttggtggatcatccgcgggccagtgattctcagcattctaattaacttcattctctttattaatattctccgcatcctcatgcggaaactgcgcacacaggagacccggggcaacgaggtgtcccactacaagcgcctggcacgatccacgctgctactgattccactgtttggcatacattacatagtgttcgcattttccccagaagacgcaatggagatccagctgtttttcgaactcgcccttggatcttttcagggtctggtggtggctgtgctttattgtttcctgaatggggaagtgcagctcgaagtgcagaaaaaatggcagcagtggcatctgcgggaatttcccctccaccccgtggcctctttctctaactctacaaaggcaagccatttagaacagtcacagggaacttgcagaacgtcaatcatttag

SEQ ID NO: 204413 - DNA, 288 bp, synthetic construct
  misc_feature 1..288: note = Description of Artificial Sequence: Synthetic coding sequence
  source 1..288: mol_type = other DNA
atgaagctgctgatggtgctgatgctggccgccctgctgctgcactgttatgcagatagcgggtgcaagcttcttgaggatatggttgagaagacgatcaattccgatatttctatcccagaatataaggagctgctccaggagtttatcgactcagacgccgctgcagaagctatggggaaatttaagcagtgtttcctgaaccagtctcacaggaccctgaaaaacttcggcctgatgatgcatactgtttacgattccatatggtgcaatatgaagagcaactag

SEQ ID NO: 204414 - DNA, 1746 bp, synthetic construct
  misc_feature 1..1746: note = Description of Artificial Sequence: Synthetic coding sequence
  source 1..1746: mol_type = other DNA
atgcccgccccccgggcccgggagcagccccgggtgcccggcgagaggcaacccctcctgccaaggggcgcgaggggtcccagaaggtggcgcagagccgctggagccgcggtcctccttgtcgaaatgctggagcgtgccgccttctttggcgtgactgccaacctcgtgttatatctcaacagtaccaactttaactggaccggagagcaggccacacgagcggccttggtattcctcggcgcttcttacctgctggctcccgtcggcgggtggctggccgacgtataccttggtcgataccgggcagtggccctctccctcttgctgtacctcgcggcctccggactgctgccggctactgctttcccagacggccgctcctctttttgtggggagatgcctgcgtccccactgggtcccgcctgcccttcagcaggctgcccaaggagcagcccaagcccctactgtgctcccgttctgtacgcggggctgctcctcctcggacttgccgcatcatccgtgcggtcaaaccttacgtcattcggtgccgatcaggtgatggacctcggcagggacgccactagacgctttttcaactggttctactggtctataaatttaggtgccgttttatcgttgctggtggtggctttcattcagcagaatatctcttttctcttggggtactcgattccagtagggtgtgtcgggttagccttcttcatctttctgttcgccaccccagtgttcatcactaaacctcccatgggcagccaggtaagttcgatgctaaagctggccttgcaaaattgttgccctcagctctggcaaagacactccgctcgggatagacaatgcgctagagtgctcgctgacgaaagaagccctcagcctggagcttcaccccaggaagacattgccaacttccaggtgctggttaagatcctgccagtgatggtgactctcgtgccctactggatggtatatttccagatgcaatcgacatacgtgctccaggggctgcatctgcatatacctaatatattcccggcaaatccagccaacatctcagtagctttgcgcgcccagggctcgagttacacgattccagaggcttggctgctgctggccaatgttgtggtcgtactcatcttggtcccccttaaggataggttgatcgacccactgctcctgaggtgtaagctcttgccttccgctctccagaagatggccctgggaatgttttttggatttacgtccgttatagttgcaggggtgctggagatggagcgactacactatatccaccacaatgagacagtgagtcagcaaattggtgaagtgttgtacaacgctgctcccctcagtatttggtggcagataccccagtatcttctgattggaatcagtgaaatttttgcgagcatccccggactagagtttgcttatagcgaagctccccggagcatgcagggggcaatcatgggcattttcttctgtttgtccggcgtgggaagcctcctgggaagcagccttgttgcactactgtcacttccaggcgggtggctgcattgtcccaaggactttggtaacattaacaactgccggatggatttatactttttcctcctggcagggatccaagccgtgactgctttgctgttcgtatggattgccggacgctatgagagggcgtctcaggggcccgcctcccactctcgtttttcacgggatcgtggctag

SEQ ID NO: 204415 - DNA, 363 bp, synthetic construct
  misc_feature 1..363: note = Description of Artificial Sequence: Synthetic coding sequence
  source 1..363: mol_type = other DNA
atgaagctgctgatggtgctgatgctggccgccctgagccagcactgttacgcgggcagtggatgtcccttactcgaaaacgtgatttcaaagaccatcaacccacaagtctccaagacagaatataaggagctgttacaggaattcatcgatgacaatgccacaaccaatgctatcgacgaactcaaagaatgcttcctgaaccagaccgatgagacgctgagcaacgtcgaggtgtttatggtcatctccttcagtagctataagctctttaaaagtccagatcaagggcaagtgggatcatcctttctcacagacaacgcaaaggcaacctcggaacaagctttcagctacatcggatag

SEQ ID NO: 204416 - DNA, 315 bp, synthetic construct
  misc_feature 1..315: note = Description of Artificial Sequence: Synthetic coding sequence
  source 1..315: mol_type = other DNA
atgaagctggccgccctgctgggcctgtgcgtggccctgagctgctccagtgccgccgccttcttggtgggctccgcaaagcccgtggcccagcccgtggctgccctggaatctgccgccgaagcaggcgcgggaaccttagctaatccgttgggtaccttaaatcccctgaagttactcctttcatcgcttggcattcctgttaatcatctcatcgaaggaagccagaagtgcgtcgccgaattaggcccccaagccgtgggtgcagtgaaggcgctgaaagcattgctgggtgcactgactgtatttggttag

SEQ ID NO: 204417 - DNA, 282 bp, synthetic construct
  misc_feature 1..282: note = Description of Artificial Sequence: Synthetic coding sequence
  source 1..282: mol_type = other DNA
atgaagctggtgaccatcttcctgctggtgaccatcagcctgtgcagctacagtgccacagcttttttgatcaataaagtccccctacctgtggataagctggcacccctccctctggataacatcctcccattcatggaccccctcaaacttctcctgaagacccttggcattagtgttgagcatctggtggaaggcctgagaaaatgcgtgaatgaactcggacccgaggcgtctgaggccgtcaagaaattgctagaggctctcagccatctggtgtag

SEQ ID NO: 204418 - DNA, 1854 bp, synthetic construct
  misc_feature 1..1854: note = Description of Artificial Sequence: Synthetic coding sequence
  source 1..1854: mol_type = other DNA
atggccgaggccaagacccactggctgggcgccgccctgagcctgatccccctgatttttctgatttccggggctgaagctgcgagctttcagcggaaccagcttctgcagaaggaacctgatctgagacttgagaacgtgcagaagtttcccagcccagagatgattcgtgctcttgaatatatcgagaaccttcggcagcaagcccataaagaggaatcctcacctgattacaacccataccaaggcgtgtctgttcccctgcagcagaaggaaaatggagacgaatcccatctgccagaacgcgatagtctttccgaagaggattggatgaggattatactggaggctctgaggcaggcagaaaacgagccccagtccgcccccaaggaaaacaagccttacgcgctcaacagcgaaaagaacttcccaatggatatgtccgacgattatgagactcagcaatggcctgagaggaaattgaagcacatgcaattcccacccatgtatgaagaaaacagccgggacaatccattcaaaaggaccaacgagattgttgaagagcaatacaccccacaatcactggccacattagaaagcgtcttccaggaactcggcaaactcacagggcctaataaccaaaagcgagaaagaatggacgaggagcaaaaactgtacaccgacgacgaggatgacatctacaaagctaacaatatcgcatacgaggacgttgtgggcggagaggactggaaccccgtggaggagaagattgagagtcagacccaggaagaggtccgggacagcaaggaaaacattgagaagaacgagcagattaacgatgaaatgaaacggtcaggacaactggggattcaagaggaagaccttcgtaaagaaagcaaagatcaacttagtgacgatgtgagcaaagtaattgcctatctgaagcggctggtgaatgctgcgggatcaggccgtctgcagaatggtcagaatggcgagcgggccacccgactcttcgagaagcctctggattcacagtcaatttatcagctgatagaaatttcacggaaccttcagattcctcctgaggatctgattgagatgctaaagacaggagagaagcctaacggctccgtggaaccagaaagggagctggatctgccagttgatctggacgacatcagcgaggctgatctcgaccatcctgacctgttccagaataggatgctctcgaaatcaggttacccaaaaaccccgggtcgagccggaaccgaggcgctgccagacggattaagtgtcgaggatatacttaacctgctaggaatggaaagcgcggcgaatcagaaaacttcatactttccaaatccatacaatcaggaaaaggtgctgcccagactcccatatggggcgggccgcagcaggagtaatcagctgcccaaggccgcctggatcccccacgtggagaataggcagatggcgtatgaaaacttgaatgataaagaccaggaactgggcgagtacctcgccagaatgctcgttaagtaccccgaaataatcaacagtaatcaagtcaagcgggtgcctggccaggggagctctgaggatgacctgcaagaagaagagcaaatagagcaagctataaaggagcaccttaatcagggctcctcccaagagacggataagctggcccctgtgtccaagcggttccctgtcggcccaccgaagaacgatgacacacctaataggcagtactgggatgaagatttgctgatgaaagttctggaatacctcaaccaggagaaagcggagaaaggacgcgaacacattgctaagagggcaatggagaatatgtag

SEQ ID NO: 204419 - DNA, 435 bp, synthetic construct
  misc_feature 1..435: note = Description of Artificial Sequence: Synthetic coding sequence
  source 1..435: mol_type = other DNA
atggccgaggccaagacccactggctgggcgccgccctgagcctgatccctttaattttcctgatctctggtgccgaggccgccagttttcagaggaaccagctcctgcagaaggaaccggacctaaggctcgagaacgtgcagaagttcccgagccctgagatgatcagggcattagagtatattgaaaatctgagacaacaggcacacaaggaagagtcatccccggactataatccctatcagggcgttagcgtgcccctgcagcaaaaggagaatggagacgagtcccacctgcccgagcgcgactctctctccgaggaggactggatgaggattatcctggaggccctcaggcaagccgaaaacgagcctcagtcagccccaaaggaaaacaaaccctacgcccttaatagtgaaaagaatttcccatag

SEQ ID NO: 204420 - DNA, 378 bp, synthetic construct
  misc_feature 1..378: note = Description of Artificial Sequence: Synthetic coding sequence
  source 1..378: mol_type = other DNA
atggccgaggccaagacccactggctgggcgccgccctgagcctgatacctctaattttcttgattagcggcgcagaagctgccagtttccagaggaatcagttgctgcagaaggagcctgacctgcgactggaaaatgttcagaagttccccagccctgaaatgattagagcactcgagtacatcgagaatctccgccagcaggcccacaaggaggagagtagtcccgattacaacccataccagggggtttcagtgcccctgcagcagaaggagaacggcgatgagagccatcttcccgagcgggattcactgagcgaagaagactggatgcgaattatcctggaagctctgaggcaggctgagaatgagccgtag

SEQ ID NO: 204421 - DNA, 1434 bp, synthetic construct
  misc_feature 1..1434: note = Description of Artificial Sequence: Synthetic coding sequence
  source 1..1434: mol_type = other DNA
atggccgaggccaagacccactggctgggcgccgccctgagcctgatcccccttatattcctgatttcaggagccgaggccgccagcttccagcgtaaccagctgctccagaaggagcctgatctacgtctggagaacgtgcagaagttccctagcccagagatgattagggccctggaatatatcgagaatcttagacagcaggctcacaaagaggaatcttcccctgactacaacccgtaccagggggttagcgttccccttcagcagaaggaaaatggcgatgagagtcatttacctgaaagggactcactccgtggggaagattggaatccagttgaggaaaagatagagagtcagacccaggaggaggtacgggatagcaaggagaatatcgagaagaacgagcagatcaatgatgaaatgaaaagaagcgggcaactggggattcaggaagaagacctgcggaaagagtccaaggatcaactctccgacgacgtcagcaaagttatcgcatatttgaagagactggttaatgccgccgggtccggtagactgcaaaacggccagaacggggagagggccactaggctttttgagaagccactggattctcagagtatataccaactcatcgagattagtagaaatctgcagattccccccgaggacctgatcgaaatgctgaaaactggagagaagcccaatggcagtgttgagccggagcgcgagctggacctgccagtcgatctggatgacatatccgaagcagatcttgaccaccctgatttattccagaacagaatgctgtcgaagtcaggataccctaagacacccggccgagcaggtacggaagcactcccggacggcttgagtgttgaagatatactgaacctgctcgggatggaatcagccgctaatcaaaagacctcctatttccccaacccatacaatcaagaaaaggtcttaccacggctcccatatggcgccggaagatcaaggtctaatcagctgcccaaagctgcttggataccccacgtggaaaacaggcagatggcatatgaaaatcttaacgacaaagaccaggagctgggagaatacctagctcgaatgcttgtcaaataccccgagatcattaactccaaccaggtaaaaagggtacctgggcaggggagctctgaagacgacctgcaggaggaggaacagatcgagcaagctataaaggaacacctgaatcaaggatccagccaggagactgacaaacttgctcctgttagtaaaagattccctgtcggcccgcccaaaaacgatgacactccgaatcggcagtattgggatgaggatctgttgatgaaagttctggagtatctcaaccaggaaaaagctgagaaaggaagggaacatatcgcaaaaagggctatggagaatatgtag

SEQ ID NO: 204422 - DNA, 390 bp, synthetic construct
  misc_feature 1..390: note = Description of Artificial Sequence: Synthetic coding sequence
  source 1..390: mol_type = other DNA
atggagcccagccagtgcgtggaggagctggaggacgacgtgttccagcctgaagacggcgaaccggttacacagcccgggagtctgttgtccgccgatcttttcgcacaatcccttctagattgccctctctctcggttacaactattccccttaacacattgttgtggccccggactgcggcctacatcacaggaggataaggccacccagactctgtctccggctagtccctcacagggagtgatgttgccctgcggagtgaccgaagagccacagagattattctacgcacccgccgaacccaagagctgcgttgttgccgatccacctctgccggcccagccatgctttgaatggagaagagaacaggagcgcggcaggccatag

SEQ ID NO: 204423 - DNA, 711 bp, synthetic construct
  misc_feature 1..711: note = Description of Artificial Sequence: Synthetic coding sequence
  source 1..711: mol_type = other DNA
atggccgccatccaggacggcctggccaagggcgagaacgacgagactgtgtctaatacccttactctgactaacggtctcgagagaagaacgaaaacttactctgaggataattttgaagagttacagtacttccctaatttttacgctctgcttaagtcaatagactccgagaaggaggctaaagagaaggaaactttgataaccatcatgaagaccctgatagatttcgtaaaaatgatggtcaagtacgggacaatttcgccggaagaaggggtgtcatatcttgaaaatctagatgagatgattgccttgcagacgaaaaacaagctggaaaagaatgccacagacaacatttctaagctgttccccgcgccatccgaaaaatcacatgaagaaaccgatagtactaaggaggaagctgcaaagatggaaaaggaatatggctcattgaaggattctaccaaagacgataacagcaatcccggcggtaagacagacgagcctaagggaaaaactgaggcttatctggaagctatacgcaaaaacatagagtggctgaagaaacacgacaagaaaggaaacaaggaggactatgacttgtctaagatgcgagattttatcaacaaacaagccgacgcttatgtggagaagggaatactcgataaagaagaagctgaagccatcaagcggatctattcatccctttag

SEQ ID NO: 204424 - DNA, 174 bp, synthetic construct
  misc_feature 1..174: note = Description of Artificial Sequence: Synthetic coding sequence
  source 1..174: mol_type = other DNA
atggccgccatccaggacggcctggccaagggcgagaacgacgagacggtgtccaacaccctgaccttaacaaacggcttagagcgccgaaccaagacatactctgaggataactttgaggaattgcagtattttccgaatttttacgcattactaaagtcaattgacagctag

SEQ ID NO: 204425 - DNA, 990 bp, synthetic construct
  misc_feature 1..990: note = Description of Artificial Sequence: Synthetic coding sequence
  source 1..990: mol_type = other DNA
atgagcgccttcgacaccaaccccttcgccgaccccgtggacgtgaaccccttccaggatccttccgtcacccaactaacgaatgccccccagggcgggctcgctgagtttaatccctttagcgaaactaatgccgcaacaacagtacccgtcacccaactgcctggaagctcccagcctgccgtgttgcaaccctctgtggagccgacgcagccgactcctcaggccgtggtaagcgctgcccaggccgggcttcttcgccaacaagaggagttagaccgcaaggccgctgaactcgagcgaaaggagagagaactgcaaaatacagtggcgaatcttcatgtacggcaaaacaactggccccctctgccatcatggtgtccagtaaaaccctgtttttaccaggatttctcaaccgaaatcccagcggattaccagcgaatatgcaaaatgctgtactacctgtggatgttacatagtgtcacactttttctcaacctcttggcatgcctggcgtggtttagcggtaattcctccaagggggtggattttggcctgagcatcctctggtttttgatttttaccccatgtgcatttctttgttggtataggccgatctataaggcctttcgctctgataattctttctccttctttgtattcttcttcgtattcttctgccaaatcggcatttacattattcagctggtgggaattccagggctgggggactctggctggattgctgctttgtctaccctagacaatcacagcctggccatatccgtgattatgatggtggtggcaggcttttttacactttgtgctgtactgtctgtgtttctcctgcaaagagtgcactcactctaccgtagaaccggagcctccttccagcaggcacaagaggaattttcacagggtatttttagtagtcgcacattccacagagctgccagttctgctgcgcagggagccttccaaggcaattag

SEQ ID NO: 204426 - DNA, 864 bp, synthetic construct
  misc_feature 1..864: note = Description of Artificial Sequence: Synthetic coding sequence
  source 1..864: mol_type = other DNA
atgagcgccttcgacaccaaccccttcgccgacaccaacgccgccaccacggtgcccgtaactcagttgccaggctcatcccaaccagcggttctgcagcccagcgtagagcccacacagccgaccccgcaggcggttgtctctgccgctcaggcgggtctgctccgacagcaggaggagctagatcggaaagctgctgaactggagcgcaaggaacgggagctgcagaatacagtggctaacttacatgtgcggcaaaacaattggccccctctcccatcttggtgtcctgttaaaccatgcttctatcaagatttttccacagagattcccgctgactaccagagaatctgcaagatgctgtactatctgtggatgttgcacagcgtcaccttgtttctcaatctgctggcatgtctggcctggtttagcggaaactccagcaagggggtggacttcggacttagtatcttgtggtttttaatatttacaccatgtgcttttttgtgttggtatagacctatttacaaggcctttaggtctgataactcctttagcttctttgtgttcttttttgtctttttttgccaaattggaatatatattatccagctcgtgggaattccgggattaggcgattctgggtggatagcagccctgtccacactggacaaccactccctggcgatcagcgtgatcatgatggtcgtagctgggttcttcaccttgtgtgccgtgctctccgtttttttactgcagcgtgtcagtggagtggggcgtgccgactccaaatgggaggaggccgggaataggttcctgcccttaccacgcgacgtgttccatcattgtagttgggcttcatag

SEQ ID NO: 204427 - DNA, 1044 bp, synthetic construct
  misc_feature 1..1044: note = Description of Artificial Sequence: Synthetic coding sequence
  source 1..1044: mol_type = other DNA
atggcccagagccgggacggcggcaaccccttcgccgagcccagcgagctcgacaacccctttcaagatcccgctgtcatccagcacaggccttcccggcagtacgccaccctggacgtctacaaccccttcgaaactcgtgagccgccgcccgcctatgagcccccagcccccgcacctcttccacccccttctgccccttccctgcagcctagtcgtaagctttccccgacagagcccaaaaattacggatcatattccacccaagcttccgccgcagccgccacagctgaactgctaaaaaagcaagaagaactgaaccgaaaggcagaggaactggatcggcgcgaacgagaactgcagcacgcagctctaggcggcacagcgacccggcagaataactggccaccactgccctccttttgcccagtccagccttgcttcttccaggatattagcatggagatcccacaggaattccagaagactgtcagcaccatgtattatctttggatgtgcagcacccttgcactgctcctcaattttctggcttgccttgcgtccttttgcgtggaaactaacaatggagcaggatttggattgagtatattgtgggtgctgttgtttaccccgtgttccttcgtgtgttggtacaggcctatgtataaggcttttaggtctgacagctccttcaatttcttcgtgttcttttttatcttcttcgtgcaagacgttttgtttgtgctccaggctattggtataccagggtggggattctcaggttggatcagcgctctggtcgtcccgaagggcaacaccgccgtcagcgttcttatgttgcttgtcgcccttctcttcaccgggatcgcagtcttgggcattgttatgctcaagcggatccacagtttgtaccggaggactggggcttcattccaaaaggctcagcaggagtttgcagccggcgtcttcagtaacccagctgtgagaaccgctgctgcaaacgctgccgccggtgccgcagagaatgcttttcgagctccatag

SEQ ID NO: 204428 - DNA, 966 bp, synthetic construct
  misc_feature 1..966: note = Description of Artificial Sequence: Synthetic coding sequence
  source 1..966: mol_type = other DNA
atggcccagagccgggacggcggcaaccccttcgccgagcccagcgaactggacaatccatttcagccgcctcccgcttatgagcctccggcaccggctcccctgccaccgccgagcgccccaagtctccaaccctcacggaaactctcccccacagaaccaaagaactatggcagttatagcacccaggcgtcagcagccgccgccaccgcagaactgttaaagaagcaggaggagctcaaccggaaagccgaggaactagaccgtagagaaagagaattgcaacatgccgcactaggagggacagccaccaggcagaacaattggccacccttgccttccttttgtcccgtccaaccttgcttctttcaggatataagcatggaaattcctcaggagttccaaaaaaccgtcagcacgatgtattacctgtggatgtgtagtaccctggcgttgctgctgaactttctggcttgtctggccagcttctgcgtggaaacgaacaatggcgcggggttcggcttaagtattctgtgggttctgctgttcaccccctgcagctttgtgtgttggtaccggccaatgtataaggcttttcgcagcgacagttcattcaatttttttgtgtttttctttatattctttgtgcaggatgtgctgttcgtacttcaagccataggcatacctggctggggcttttccggttggatttcggccctagttgtccccaaaggcaatactgcagtctctgttctgatgttgctcgtggccttattgttcacaggaatcgccgttctcggcatcgtgatgctgaaacgaattcattccctgtacaggaggaccggggcatcctttcagaaagcccagcaggagttcgcggctggggttttctcaaatccagcagtgcgaacagcggctgcgaacgcagccgcaggggccgcagaaaatgcctttagagcgccttag

SEQ ID NO: 204429 - DNA, 690 bp, synthetic construct
  misc_feature 1..690: note = Description of Artificial Sequence: Synthetic coding sequence
  source 1..690: mol_type = other DNA
atgagcgagaaggagaacaacttcccccccctgcccaagttcatcccagttaagccctgcttctaccagaacttctctgatgagatcccagtagagcaccaggtcctcgttaagcgaatatatcggctgtggatgttctactgcgctacactaggggtgaatctcattgcatgtctcgcctggtggatcggtggcggttccggcacaaactttggcctggctttcgtgtggctccttctgtttactccatgcggctatgtttgctggttcagacctgtgtacaaggctttcagagccgactcttccttcaacttcatggccttctttttcattttcggcgctcagtttgtcttaacagtgatacaggctatcggattctctggatggggcgcttgtggctggctgtcagccataggtttctttcagtacagtcccggggccgcagtggtgatgctgctccctgcaataatgtttagcgtgagcgctgcaatgatggctattgccatcatgaaggtccatcgtatatacagaggcgccgggggctcctttcagaaggctcagacggaatggaacaccggcacatggcggaaccctccatcccgagaggcgcagtacaataacttctctgggaatagccttcctgaatatcctactgttcctagttatccagggagcggccagtggccttag

SEQ ID NO: 204430 - DNA, 588 bp, synthetic construct
  misc_feature 1..588: note = Description of Artificial Sequence: Synthetic coding sequence
  source 1..588: mol_type = other DNA
atgagcgagaaggagaacaacttcccccccctgcccaagttcatcccagtcaagccttgcttctaccaaaatttcagtgatgaaatcccagtggagcaccaagtactggtgaaacggatttatcggctgtggatgttttactgtgcaactctgggcgtaaacctgattgcctgtttggcttggtggattggcggcggatcaggcaccaacttcggattggcctttgtgtggcttctgttattcacaccttgtggatacgtgtgttggttccgaccggtctacaaggcttttcgcggatggctttctgctatcggcttttttcaatactccccaggagcagcagttgtaatgcttttaccagccattatgttcagcgtttctgcagctatgatggccattgccattatgaaagtgcaccgtatctatcgcggtgcaggcgggagtttccagaaggcccagacggagtggaacacaggtacctggagaaatccaccttctagggaagctcagtacaataacttctccggcaattccctgccggaatacccaaccgtccccagctatccaggaagcggacaatggccttag

SEQ ID NO: 204431 - DNA, 588 bp, synthetic construct
  misc_feature 1..588: note = Description of Artificial Sequence: Synthetic coding sequence
  source 1..588: mol_type = other DNA
atgatccagcggcacatccccgtgtgcggccggagccggccctaccagcgtgggtgcgttgtgcaggctgggagctcaggcagccccgggtggtcccactttaagatcatatgcggtcttgctccggctccatccgaggctgtactgtccgccaggaacaactgcgaacataccggcggatgcagactgcagcccgcattagttggggagacagagatgtccgagaaggaaaataattttccaccactgcccaaattcatccctgttaagccttgcttttaccaaaattttagtgatgaaatcccagttgaacatcaggtcttggtaaaaaggatctaccgtctgtggatgttttattgtgcaactttaggagttaatctgatcgcctgtttggcctggtggattggtgggggcagcggaaccaatttcggtctcgcatttgtgtggctccttctgttcaccccatgtgggtacgtatgctggttccgacctgtctataaagctttcagagccgattcctccttcaacttcatggcgttcttttttatcttcggggcccagttcgttctcaccgtaatccaggcctag

SEQ ID NO: 204432 - DNA, 708 bp, synthetic construct
  misc_feature 1..708: note = Description of Artificial Sequence: Synthetic coding sequence
  source 1..708: mol_type = other DNA
atggccgagaaggtgaacaacttcccccccctgcccaagttcatccctctcaagccttgtttttatcaggacttcgaagcagatatcccccctcagcacgtgagcatgaccaaacgcctgtactacctgtggatgttgaacagtgtcactctcgccgtgaacttggtgggctgcttagcctggcttataggtgggggaggggcaactaatttcggcctggcatttctctggctgatcttgttcactccctgctcctatgtgtgttggttcaggcccatttataaagctttcaagacggatagcagttttagcttcatggccttcttctttaccttcatggcccagctggttatttctatcattcaggctgtgggcattccaggatggggagtttgtgggtggatcgcaaccatcagctttttcggcacaaacatcggttccgctgtggtgatgcttatccccaccgttatgtttactgtgatggcggtgttcagcttcatcgcactttccatggtgcataagttctataggggaagcggcgggtccttctccaaggctcaggaggaatggactacgggtgcttggaaaaaccctcacgttcagcaggccgctcagaatgccgcaatgggggccgcccagggcgccatgaaccaaccccaaacgcagtactccgctacacctaattacacttactccaatgagatgtag

SEQ ID NO: 204433 - DNA, 708 bp, synthetic construct
  misc_feature 1..708: note = Description of Artificial Sequence: Synthetic coding sequence
  source 1..708: mol_type = other DNA
atggccgagaaggtgaacaacttcccccccctgcccaagttcatccctttgaagccatgcttctatcaggacttcgaggctgatatccccccgcagcatgtgagcatgacaaagcgtttgtattatctgtggatgttgaacagcgtgacactggctgttaacctagtcggatgcctggcttggctcatcgggggcgggggagctacaaactttggcctagcattcctatggctgatcctctttaccccctgctcttatgtttgctggttccggcccatttacaaggcgttcaagacagacagctccttcagcttcatggcgtttttcttcacatttatggctcagctagtgatctctatcatccaggccgtgggcatccccggttggggcgtctgcggctggattgcgactatctcgttttttgggacgaacatcgggtccgctgtggtgatgctgatacccacagtgatgttcacagttatggcagttttctctttcatcgccctctcaatggttcataagttctatagaggctctggcggctccttctcaaaagcgcaggaagagtggacaaccggcgcctggaagaacccgcatgtccaacaggcggcgcagaatgccgctatgggtgccgcccagggtgctatgaatcagccacagacacaatactcagcgactccaaattatacctattccaacgaaatgtag

SEQ ID NO: 204434 - DNA, 495 bp, synthetic construct
  misc_feature 1..495: note = Description of Artificial Sequence: Synthetic coding sequence
  source 1..495: mol_type = other DNA
atgttcctgccccggctgcggggccggtacagcagccccgcctgccagcatgatcaggcacctctccttcctctggacgtcaccgatagcagcttctcctttatggcctttttctttacttttatggctcagctcgtgatatccataatccaagccgttggaattccaggctggggtgtgtgcgggtggatagcaaccattagcttcttcgggaccaatattggctccgccgttgtcatgctaatcccaacagtgatgttcaccgttatggccgtattcagtttcatcgccttgtcgatggtacacaaattttatcgaggcagtggaggttccttcagtaaggcccaggaggagtggacgacaggggcttggaagaacccgcatgtgcagcaggccgcccaaaacgccgccatgggagctgcccagggagcgatgaaccagcctcagactcaatattccgcaacacctaactacacgtacagtaatgagatgtag

SEQ ID NO: 204435 - DNA, 1083 bp, synthetic construct
  misc_feature 1..1083: note = Description of Artificial Sequence: Synthetic coding sequence
  source 1..1083: mol_type = other DNA
atgttcgtggcccggagcatcgccgccgaccacaaggacctgatccacgatgttagctttgatttccatggccgtaggatggccacttgcagtagtgatcagagtgtaaaggtgtgggataaatccgagagcggcgactggcactgtaccgcctcctggaagacccatagtggatccgtgtggagagtgacatgggcccaccccgaattcgggcaggtgctcgctagctgctccttcgataggacagcagccgtttgggaggagatagtgggagagagtaatgataagctgagagggcagagtcactgggtgaaacgaactaccctagtggatagcaggaccagtgtgaccgatgtgaagttcgccccaaagcacatgggtctgatgttggcaacttgttcagccgatggcattgttaggatttatgaggctccagacgtgatgaacttgtcacaatggagtttgcagcatgaaatatcatgcaagcttagctgcagttgtattagctggaaccctagctcttctcgcgcacattctcctatgatagcagttgggagcgacgattcctcaccaaacgccatggctaaggtgcagattttcgagtacaacgaaaacactaggaaatatgctaaggctgagacactgatgacagttaccgaccctgtgcatgatattgcatttgcccccaatctcggcaggagcttccacattctggctatagccaccaaagatgtcagaatattcaccttgaagccggtgcggaaagagctgacctcatccggcgggccaaccaaattcgagattcatatagtagcccaatttgataaccataactcccaggtctggcgggtctcttggaatatcactggcactgtactcgccagctcaggcgacgatggctgtgtcagattgtggaaagccaactacatggataactggaaatgcacaggtattctgaaagggaatggctcccctgtaaacggttctagccaacaaggcacgagcaacccgtcactcggcagtacaatcccttcgctgcaaaattctcttaacggctcttcagcaggacggaaacattcctag

SEQ ID NO: 204436 - DNA, 1266 bp, synthetic construct
  misc_feature 1..1266: note = Description of Artificial Sequence: Synthetic coding sequence
  source 1..1266: mol_type = other DNA
atgttcgtggcccggagcatcgccgccgaccacaaggacctgatccatgatgtcagtttcgattttcacggccggcgtatggctacatgctctagcgaccaatccgttaaggtctgggataagagtgaaagcggagactggcattgtacagcatcatggaaaacccactccggctctgtttggagggtcacatgggctcaccccgaattcggacaagtattggcctcctgtagctttgataggacagccgccgtatgggaagagatcgttggcgagtcaaacgacaagttaagaggacaaagccattgggtgaagcggaccactctcgttgactctcgtacttccgtgaccgacgtaaagtttgcccctaagcatatggggttgatgttggcaacctgctccgctgacggcattgtacgtatctacgaggcccctgacgttatgaacctgagccaatggtcattgcaacacgagatctcctgtaagttgtcatgctcttgtatttcatggaacccaagtagtagccgcgcccacagtcctatgattgctgtcgggtccgacgattcaagtccaaatgccatggcaaaggtccagatcttcgagtacaacgaaaatactcggaagtatgcaaaggccgagaccctcatgacggtcacagatcctgtacacgacattgcttttgctccgaacctcggcagatccttccatatcttagccatcgctactaaggatgtaagaatcttcaccctgaagccagtgcgcaaggaactgacatccagcggcggcccgacaaagttcgagatacatatcgtcgcccagtttgataaccataattcccaggtatggcgcgtctcatggaatatcacaggaactgtcctcgcttccagtggggacgacggctgcgtacgcctttggaaagctaactacatggataactggaagtgcactggaattctgaaggggaatggctctcccgtcaatggatccagccaacagggcaccagcaaccctagcttgggctccacgatacctagtctccagaactcgctgaacggtagtagtgccggaaggtacttctttacccctcttgactcccctcgggctggatctagatggtcgagttatgcgcagttgcttccccctccccccccccctctagtcgaacattcttgcgatgccgataccgctaacttgcaatatccccatccacggcggaggtacctttcaaggcccctgaacccactcccagaaaacgaagggatctag

SEQ ID NO: 204437 - DNA, 3075 bp, synthetic construct
  misc_feature 1..3075: note = Description of Artificial Sequence: Synthetic coding sequence
  source 1..3075: mol_type = other DNA
atgcccgccgcccggccccccgccgccggcctgcggggcatcagcctgtttctcgcactcctgctgggctcacccgctgcagctttggagagagatgccctgcccgaaggcgatgccagcccattgggtccttaccttttaccttcgggtgctccagagaggggcagtccagggaaggaacaccccgaagagcgggtcgtgactgcaccgccatcctcgtcgcagtctgccgaggtgctcggcgagctggttctggatggcacagcacccagtgcacatcatgacatccctgccttgtctcccctgctgccggaggaggctaggcccaagcacgccttacctcccaagaagaaactaccatcattgaagcaggtgaactccgcccggaagcagctccgtcctaaagccacctccgccgccaccgtgcagagagccggttctcaaccagcttcccagggcctggatctgttatccagttctacagaaaagccaggccctcctggagacccagatcccatagttgccagtgaagaggctagtgaggtgcctctctggctggacagaaaggaaagcgcagtgcccaccactcctgctccgctgcagatcagccctttcacaagccagccatacgtcgctcacaccctccctcagcgtcctgaaccgggcgagccaggcccagacatggcgcaggaagctccacaggaagacaccagccccatggccctgatggataaaggagagaacgaacttaccggatctgccagtgaggaaagccaggagactacaacgtccactatcatcacaacaaccgtcattactacagagcaggctccagcactgtgtagtgtctcgtttagcaatcctgaaggctatattgatagtagcgactacccactgctcccgctcaacaacttcctcgagtgcacttacaatgtgactgtgtataccggatacggggtggagctgcaagtgaagtcagttaacctctccgatggtgaactgctttctatacgcggagtggacggtcccaccctgacagtcctcgctaaccagacactgttggttgagggccaggtgatcaggagcccgacgaatactatttccgtatactttcggacctttcaggatgatgggcttggcacgtttcagttgcactaccaggcgttcatgctaagttgcaacttccctcgccggccagattcgggagatgtgacggtgatggacctgcacagcggtggagttgcccactttcattgccatttgggatacgagcttcaaggcgccaagatgcttacatgcattaacgcttcgaaaccccattggtcctctcaggagcccatctgcagtgccccctgcggtggcgccgtccacaacgcaacaatcggccgcgtgctgtccccatcataccccgagaatactaacggatcccaattttgcatttggaccattgaagctccggaaggtcagaagctgcacctgcacttcgagcgactgttgctgcacgataaagaccgaatgacagtgcactcggggcaaaccaacaaatcagctctactgtacgacagtctgcagacggaatcggtgcctttcgagggattactgtccgaaggaaacaccatcagaatcgaatttaccagcgatcaggcgagagccgccagcacattcaatatccggtttgaagcattcgaaaagggtcactgctatgagccttatattcagaatggaaactttaccaccagcgacccaacatataacatcggaacaatcgtggaatttacctgtgacccaggacattctctcgagcagggtcctgctatcattgaatgtattaatgtccgcgatccatattggaacgacactgaaccattatgtagagccatgtgcggaggggagctgtctgcagttgctggcgtggtcttgtctcccaactggcctgaaccgtatgtggaaggcgaagactgtatatggaagattcatgtgggggaagagaagagaatattcctcgacatccaatttctcaacttgtccaacagcgacatcttgaccatttacgacggcgatgaagtcatgccgcacatcctgggccagtatctggggaactccggcccacaaaagttgtatagctccactccagacttaactatccagtttcattccgatcccgccggcctgatctttggaaagggacagggcttcataatgaattatatagaggtgagccgaaatgacagctgttccgacctccccgagatccagaacggctggaaaaccacgagtcacaccgaactagttagaggggcgaggataacgtaccaatgcgatccgggctatgacattgtcggctcagacacactgacttgtcagtgggacttgtcgtggtccagtgacccacctttctgtgagaagataatgtattgcacagatccaggtgaggttgatcatagtacccgacttatttctgaccctgtgctcctcgtgggcactaccatacagtacacatgcaacccgggatttgtcctggagggatcttccttgctgacctgttactcccgcgagactggtacacccatctggacgtcacggcttcctcactgtgttagcgaggaatctctggcctgcgataaccctggtctgcctgaaaacggataccagatcctctataagcgcctgtatctacctggcgaaagtttgacattcatgtgctatgagggctttgagcttatgggtgaagtgaccataagatgcatactgggtcagccgagccactggaacgggccactccctgtgtgtaaggtgaaccaggatagcttcgagcacgcccttgaggtggccgaggcagccgctgaaacctccctcgagggtggaaatatggcattagccatattcatccccgtgctcatcattagtctgctacttggaggcgcttacatttatatcacgcgatgcaggtattatagcaatcttagactcccactgatgtattctcatccctacagccagataactgttgaaaccgagtttgacaatcccatttatgaaaccggcgaaacccgcgaatatgaggtgtcgatatag

SEQ ID NO: 204438 - DNA, 2847 bp, synthetic construct
  misc_feature 1..2847: note = Description of Artificial Sequence: Synthetic coding sequence
  source 1..2847: mol_type = other DNA
atgcccgccgcccggccccccgccgccggcctgcggggcatcagcctgtttcttgctctcctgctcggttctcccgctgcagccctggaacgggatgccctgcccgaaggcgacgcctcccccctgggaccctatttgctgccctccggcgcgccagagcggggaagcccgggtaaagaacaccctgaggagagagtggtgaccgcaccaccctcgagctcccagtctgcagaggtgttaggagaactggtgttggacggtactgctccatccgcccaccacgacattccggctctgagccctctcctcccagaggaggcaaggcctaagcacgctctcccacctaaaaagaagctgccatccctgaaacaggtcaattccgcccgcaagcagctcaggccaaaagctacttctgctgctaccgtgcagcgagcggggagccaaccagcctcccagggcctcgatctcctgagttcaagtaccgagaaaccaggacccccaggcgaccccgatccaatagtggcctccgaagaagcgtccgaagtcccactgtggcttgatcgtaaagagtcagcggtacccaccactccggccccacttcagatcagtccctttacaagtcaaccatatgtggcccacacacttccccaacggccagagccgggggagccaggaccagacatggcccaagaggcaccccaggaggacacctcacctatggctctaatggacaagggcgaaaacgaattgaccgggtctgcttctgaagaaagccaggagactaccaccagtacaatcatcactacaactgtgataacaactgagcaggctcccgctctgtgttccgtgtccttttccaatcctgaaggatacattgattcaagcgactacccgttgctgcctcttaataacttcttggagtgtacatacaacgttacagtctacactggttacggcgtagagcttcaggttaagagcgttaatctgagtgatggggagcttctgtccatccggggagtggacggacctaccctgaccgtgttagcaaaccagaccctgctcgtggaagggcaggtaatcagatctcccaccaacaccatctccgtttattttcgcacctttcaggatgacggactcggtaccttccagctgcactaccaggcctttatgttgtcttgcaactttccccggaggccagacagtggtgacgtgaccgtgatggatttgcactccggcggggttgcccactttcactgccaccttggctacgagctgcagggggccaaaatgcttacatgcattaacgcctctaaacctcattggtcctcccaggaaccgatctgctctgccccttgcgggggcgctgttcataatgctacgattggccgggtgctgtccccctcttatccagaaaacaccaatgggtctcagttctgtatttggactatcgaggcccctgaagggcaaaagctgcacctccattttgagcgtctgctgctgcacgacaaggatcgcatgaccgtccacagcgggcagactaacaagtctgctctgttgtacgactctctacagaccgagagtgtgccttttgaaggcctgctcagcgaggggaacactatccgaatcgagtttaccagtgaccaggcaagggccgcgagtacctttaatatcaggtttgaagcctttgagaaagggcactgttatgaaccgtacattcagaatggtaactttacgacatctgatcccacttataacattgggactattgtcgagtttacctgcgaccctgggcacagcttagagcaaggccccgccatcatcgagtgcatcaatgttcgggacccatactggaacgacactgagccattgtgcagagctatgtgcggaggggagctctcagccgtcgctggggtagtgctgagccccaactggccagagccatatgttgagggcgaagattgcatctggaagattcacgtaggggaggaaaaaagaatctttctggatatacagttcctgaatctatccaattctgatattttgaccatttatgatggagatgaagtgatgccgcatatccttggtcagtatcttggcaattctgggccacagaagctgtacagctctacacccgacctgaccatacagtttcacagcgatcccgccgggctcatcttcggtaagggccagggatttattatgaactatatcgaagtgagccgtaacgactcttgctctgatttgccagaaatccagaatggatggaaaacaacatcccacaccgaacttgtgcgtggagcacggattacctatcaatgtgacccaggatacgatatagtcggaagtgacactctaacttgccagtgggacctaagttggtcctcagatccaccattctgtgagaagatcatgtactgcaccgaccctggcgaggtagaccacagtactcgactcatcagtgaccctgttctactggtgggtacgaccattcagtacacttgtaatcctgggtttgtattggaaggatcaagcctcttgacttgttactcccgcgagaccggaactcccatctggacttcacgcctgccacactgtgtgttagctgaggccgcagcagaaacctccctggaggggggcaatatggccctcgccatttttattccagtgctgattattagcttactcttagggggcgcctatatctatataactaggtgtcgatattactcgaacctgcggctgccattaatgtacagccacccatattcccagatcaccgtcgagaccgaattcgacaaccccatctatgagacgggagagacaagagaatatgaggtatcaatatag

SEQ ID NO: 204439 - DNA, 2850 bp, synthetic construct
  misc_feature 1..2850: note = Description of Artificial Sequence: Synthetic coding sequence
  source 1..2850: mol_type = other DNA
atgcccgccgcccggccccccgccgccggcctgcggggcatcagcctgtttcttgcgctacttttaggctctccagccgccgccttggagcgcgacgctctgcccgagggtgatgcgtcacctctggggccttatctgctgccttccggggcgcctgaacgcgggtctcctggaaaagagcacccagaagaaagagtcgtaaccgctcctccctcctcctctcagagtgccgaggtactgggtgagcttgttctggatggtactgcgcctagtgcccaccacgacattccggcattgagtccgctgctgcctgaagaggctcgacccaagcatgctctaccccccaagaagaagctgccttctcttaagcaggtcaatagcgctcgtaagcagcttcgccctaaggcgacatccgccgcaactgtacagcgggccggaagccagcctgcgtcacagggcttggatctcctaagctctagtactgaaaaaccaggcccccccggagatccagatcctattgttgcaagcgaggaagcaagcgaagtgccactgtggttggacaggaaagaaagcgccgtccccaccacacccgccccactgcaaatttcaccttttacctcacagccgtacgtggcccataccctgccacaaagacctgaacccggggaacccggaccagatatggctcaggaggcccctcaggaggatacatctccaatggctctgatggacaaaggggagaacgagcttaccggttcggcgagtgaggagtctcaagaaacaacgacctcaacaatcatcacaaccacagtcatcacaaccgaacaggcccctgccctgtgctcagtaagttttagcaatccagaaggctatattgactcttcagattatccactgctaccgctgaacaatttcctcgagtgtacgtacaacgtaacagtgtacacggggtacggcgtagagttgcaggtgaagtctgtgaacttatccgacggagagctcttaagcataaggggcgtggatggccccaccttgaccgtccttgcgaaccagaccctgctagtggaaggccaagttatacggagtcccacaaacactataagtgtgtatttcagaacattccaagacgatggattaggcaccttccaactgcattatcaagcctttatgctttcctgtaatttcccacggcggcccgattcgggcgatgtcaccgtcatggatctccacagtggcggagtcgcacattttcattgtcacctgggctacgaactccagggagccaaaatgcttacctgtattaacgcaagcaaaccccactggtccagtcaagagcctatttgttccgctccatgtggaggtgccgtccacaatgcaacaatcggcagggttctcagtccctcatacccagagaatacaaatggctcacagttctgtatctggacgatcgaggccccagaggggcagaaacttcacctacacttcgagcggcttctgctccatgataaggacaggatgaccgttcattccggacagactaacaagtccgccctgttgtacgacagcctccagacggagagcgtacccttcgagggcctgctgagtgaaggcaacaccataaggatcgaattcacaagtgatcaagctagggcagcttcaacgtttaatatacggttcgaagctttcgagaaggggcactgctatgaaccgtacattcagaacggaaatttcacaacgagtgaccccacctataatattggaacaattgtggagtttacttgtgaccctgggcattctttagagcaggggccagcgattatagaatgtatcaacgtgagggatccttactggaatgacacagagccactctgtagagctatgtgtggaggggagctgtccgcagtcgctggggtggtgctgagccctaactggcccgagccttatgtggagggcgaagattgtatatggaagattcatgttggcgaggagaagcgcatttttctggatatacagtttttgaatctgtccaattcggatatactgaccatctacgatggcgatgaggtaatgccccacattctcgggcagtacttaggcaactcagggccccagaaactctacagctcaactccggatctgacaattcagtttcactcagatcccgccggactgatttttgggaagggccaaggctttatcatgaactatattgaagtttctcggaatgactcctgttctgatctgcccgaaatccagaacggatggaaaaccacaagccacacagagctggtgagaggcgccaggatcacctaccagtgcgatccaggctatgatatcgtgggctctgacacattaacatgccagtgggatctgagttggtcaagtgaccctccattttgcgagaagaccgaggagtcgctggcatgcgacaaccccggcttgcccgaaaacggttaccaaatcttgtataaacgactttacctccccggagaaagcttgaccttcatgtgttacgagggatttgaactgatgggagaggtgactattcgttgcattctcggacagccttcgcattggaatggtcccctgcctgtctgcaaagtagctgaagcagccgcagagactagtttggagggggggaacatggcgttggcaattttcatcccagtgctgataatttccctactgctgggcggagcatacatctatatcacacgatgccgatattactctaacctcaggctcccactcatgtactcgcacccatacagtcagatcaccgtcgaaacggagtttgataatccaatatatgagacgggcgaaacacgggagtatgaggtgtccatctag

SEQ ID NO: 204440 - DNA, 420 bp, synthetic construct
  misc_feature 1..420: note = Description of Artificial Sequence: Synthetic coding sequence
  source 1..420: mol_type = other DNA
atgtactgcaccgaccccggcgaggtggaccacagcacccggctgatctcagacccagtgctcctggtagggacaacgatccaatatacctgtaatcccggatttgtgcttgaaggttccagcctgcttacatgttacagccgggaaacgggcaccccgatttggacttcacgcctaccccactgtgtgtcagaggagtctctggcctgtgataaccctggcctcccagagaatggctatcagatcctttacaagcgactatacttacctggagaatccctcaccttcatgtgttatgaggggtttgaactgatgggcgaggtcacaatccgatgcatactcggccagccgtcccactggaacggaccattacctgtctgtaaagacgtcgccactatcccgacaagtgcctgcctctag

SEQ ID NO: 204441 - DNA, 3042 bp, synthetic construct
  misc_feature 1..3042: note = Description of Artificial Sequence: Synthetic coding sequence
  source 1..3042: mol_type = other DNA
atgcccgccgcccggccccccgccgccggcctgcggggcatcagccttttcttggccttgctgctgggatcccctgctgcagctctcgaacgcgacgctctgcctgagggagatgcgagcccattaggcccttacctgttgcctagcggggctccagagagggggtcacccggcaaggagcacccagaggagcgtgtcgtgaccgcacctccatcaagcagtcagagcgcagaagtgctgggcgaactggtcttagatggtacagctccatctgcccatcatgacattcccgctctgagcccactgttaccagaggaggcccggcctaaacacgcacttccccccaagaagaagcttccatccttgaagcaggtcaacagcgcacgaaagcagctgcgacctaaggctacttccgccgccacagtacagcgcgccggctcacagccagcaagccaggggctggacctgctcagttctagcaccgagaagccaggacctcccggcgatcctgatcccatcgtggcgagcgaggaggcgtcagaggttccactgtggctggaccgcaaagaaagtgccgtccctacaacaccagccccactgcagataagcccattcaccagtcaaccatatgtggcgcacacactgcctcagaggccagaaccgggagagccaggacctgacatggcacaagaagccccccaggaggatacctcaccaatggcgctcatggataagggggaaaatgaactgacaggcagtgcatccgaggaatcccaggaaactaccaccagcacaatcataacaactacagtgataacgaccgagcaggcgccggcgctatgctccgtgtccttctctaaccccgagggttacattgattcttctgactacccccttctgcccctgaacaactttctggagtgtacctataacgttactgtatataccggttatggcgtggaactacaagtcaaaagcgttaacctctccgacggcgaactcctgagcattcggggagtggacggacctacacttaccgtcctcgcaaaccagacattattggtcgagggacaggtcattcgatctcctacaaacactatctccgtgtattttcgaacctttcaggacgatggtttaggcactttccagctgcactaccaggcatttatgctttcgtgcaatttcccaaggagacctgattcaggagatgttactgtaatggatctacactcaggcggcgtggcccattttcattgtcatctgggatacgaattacaaggagccaagatgctcacctgcattaacgcctctaagccccattggtctagccaagagccaatctgctcagccccttgtggcggcgctgttcacaatgctacaatcggtagagttctctccccctcttaccccgaaaacacaaacgggtcccagttttgtatctggaccattgaagcaccagagggacagaaactgcacctgcacttcgaacggttgttgctacacgacaaggatcgcatgaccgtgcactccggccagacaaataagagtgccctgttgtatgattcactgcagactgagtccgttccattcgaagggctgctgagcgagggtaacacaattagaatcgaattcacctcagatcaagcgagggccgcatctacttttaacattcgatttgaggccttcgagaagggtcactgttacgaaccgtacatccaaaacggcaactttaccaccagtgaccctacctacaatattggcactatcgtggagttcacatgtgatccgggccattccttggaacagggtcccgcaatcatcgaatgtatcaacgtgcgggatccttattggaacgacacggaacccctgtgtagagccatgtgcggaggggagctatcagccgtcgctggtgtggtactatcaccaaactggcccgaaccttacgtggaaggggaagactgcatctggaaaatacatgttggcgaggagaagcggattttcctggatatccagtttctgaatctctctaactccgatatattgacaatctacgatggagatgaggtgatgccacacatcctggggcagtacctgggcaactccggccctcagaaactgtacagtagtactccggatttgactatccagttccactcggatccggccggcctcatatttgggaagggccagggcttcataatgaattatatcgaagttagtaggaatgattcctgcagtgacttgcccgagattcagaacgggtggaagacgacctcccatacagaactggtcagaggggcccgaatcacctaccagtgcgaccctgggtacgatattgtcggctctgacactttgacgtgccaatgggatctgtcctggagttcggacccaccgttttgcgaaaaaataatgtattgtacagaccccggagaggtggaccattcgacccgattgatttctgatccagtgctcctggtcgggacgaccatccagtatacatgtaaccctggcttcgtgctggagggctcttcattgctcacatgttactcaagggaaactggaacccccatctggacatctagactgccccattgtgtgtctgaggagtcacttgcctgtgacaatcctgggctgccggagaatggctaccagatattgtataaacggttgtaccttcctggagagagcctgacattcatgtgttatgagggctttgagttgatgggcgaagtgaccatcagatgtattcttgggcagccatcccactggaacggcccattgcccgtgtgcaaagtcgcagaggctgccgccgaaactagcttagaaggcggcaacatggccttggccatttttatccccgttttgatcatctccctgctcttggggggggcctatatatatatcactaggtgccgctactacagcaatttaagacttcctctgatgtatagccacccttactcacagattaccgtggagaccgaatttgacaatccaatctacgagactggtgagacaagagagtatgaggtgagtatatag

SEQ ID NO: 204442 - DNA, 3072 bp, synthetic construct
  misc_feature 1..3072: note = Description of Artificial Sequence: Synthetic coding sequence
  source 1..3072: mol_type = other DNA
atgcccgccgcccggccccccgccgccggcctgcggggcatcagcttgttccttgccctgctgctggggtctcctgccgcagcactcgaaagggatgcacttccggagggagacgcttctcctctgggaccttacttgctgccgtcgggtgccccggagaggggcagccccggaaaagaacatccggaagagagggtagttaccgctccaccgagtagtagtcaatctgcagaagtactgggtgagttggtactggacggtacagctccttctgcgcatcacgacataccggccctcagtcctttactgccggaggaggcccggccaaagcacgcactgccaccaaaaaagaagcttcccagcctgaaacaggtcaatagcgcgaggaagcagctacgtcctaaagctactagtgcagcaacagtccagagggccggaagccagcccgccagccaaggtctggaccttctctcaagtagcaccgaaaagcccggaccccctggcgatccagaccccattgttgcatctgaggaggcttccgaggttcctctgtggttagacagaaaggagagtgccgtgcccactactcctgccccccttcaaatctcccctttcaccagccagccctatgtggcccacactttacctcagcgacccgaaccgggcgagcctgggcctgatatggcccaagaggctccccaggaagacacctcccctatggcgctaatggacaaaggtgaaaacgaactgacgggctctgcatcggaagagagccaggaaacaacaacttccacaatcatcaccacgaccgtgattacaactgaacaggctcctgctctctgttctgtgtcattctcaaatcccgaaggctacattgactccagcgactatcccctgttgccacttaacaatttcctggaatgtacctacaacgtgactgtttatactggctacggcgtcgagctgcaggtgaaatccgtgaacctctcagacggggagctcttaagcatcagaggcgtcgatggccctacactgacagtgctcgccaatcagactcttctcgtcgaaggccaagtgattcggagtcccacaaataccatcagtgtctatttcaggacatttcaggacgacgggctcggaacatttcaattacactaccaggcgttcatgttgtcttgtaactttccaagaagacccgactccggcgacgtgaccgtgatggatcttcactcaggaggagtggcgcactttcattgtcacctgggatatgaactgcagggcgcaaagatgctcacgtgtatcaatgctagcaagccgcactggagctctcaggagccaatctgctctgccccttgtggaggagctgtccacaatgccactataggtcgagtgctctcaccatcttatcctgaaaataccaacggcagccaattctgtatctggacaatagaagccccagagggccagaaactccacttgcactttgagaggctattactccacgataaagacaggatgaccgtgcacagtggtcagacaaataaaagcgcgctgctgtacgattctcttcagacagagagcgtcccttttgaagggttgttgtcagaaggcaacactatcagaatagaattcacttctgaccaggcccgcgcagcaagcacttttaacataagatttgaggcgttcgagaagggacattgctacgagccatatattcaaaatgggaactttaccacatcggatcctacatataacattggtaccatcgttgaatttacctgtgaccccggccactccttagagcagggtccagctataatcgagtgtattaatgtgagggacccatattggaatgatactgaacctctgtgtcgggcgatgtgcgggggcgaactgagcgccgtcgccggagtcgtgctatctccgaactggcccgagccatatgtggaaggcgaagattgcatctggaaaattcatgttggcgaagagaaacgcatatttctggacatccagttcttgaatctgtccaactctgacattctgactatctacgacggagatgaagttatgcctcatatcttaggccagtaccttgggaactcaggtccacagaaactatattccagtactcccgatcttactattcaattccactccgatccagccggtctcatttttggcaagggacagggatttatcatgaattatatcgaggtctccagaaacgacagctgttccgatttacccgaaatacagaatggctggaaaacgacctcacacaccgagcttgtgcgtggggcacgaataacatatcagtgcgaccctgggtacgacatagtaggctccgatacattaacatgtcagtgggatctgtcctggagcagcgacccccccttctgtgaaaaaattatgtactgtacggatccgggtgaagttgaccactccactcgtttaatctccgatcccgtccttctggtaggaactaccattcagtatacatgcaatccaggttttgtgcttgaagggtccagcctcctaacttgctactcacgcgagactggcaccccaatctggacctcccgtctcccccactgtgtctccgaggagtctttggcctgcgacaaccctggcctaccagaaaatgggtatcagattctctacaagcgcctttacctccccggagagtccctcaccttcatgtgttatgagggtttcgaacttatgggcgaggttaccatccgctgtatcctaggtcagccctcccattggaacggcccgttaccagtttgtaaggttaaccaggatagcttcgagcacgcccttgaagcggaggcagcggccgaaacatcactggaaggaggaaacatggcattagctatttttattccggttcttatcatctccttgctgttggggggtgcgtacatctatatcaccaggtgtcggtactacagcaatctgaggttgcctctgatgtactctcatccatactctcagattactgtggaaaccgagtttgacaatcccatctatgaaactggcgagaccagagagtacgaggtctccatttag

SEQ ID NO: 204443 - DNA, 258 bp, synthetic construct
  misc_feature 1..258: note = Description of Artificial Sequence: Synthetic coding sequence
  source 1..258: mol_type = other DNA
ggcttcggcaccgacgtggactacgagaccgccttcatccactaccggctggcatccgaacagcagcattccgcccaagctatgttcaacctgggttacatgcacgaaaagggactgggtatcaaacaagatattcacctggccaagcgcttttatgacatggccgcttcacaaccaagatgcacaagcagctccctcccttcccctcttcagataggcaggcgattgttcctcgccgtgcatactggaaataagtag

SEQ ID NO: 204444 - DNA, 2385 bp, synthetic construct
  misc_feature 1..2385: note = Description of Artificial Sequence: Synthetic coding sequence
  source 1..2385: mol_type = other DNA
atgcgggtgcggatcggcctgaccctgctgctgtgcgccgtgctgcttagcctagcctccgcctcgtcagacgaggagggcagtcaggacgagtccctggatagcaaaaccaccctgaccagtgatgagtcagtcaaagatcatactacagccggcagagtggtggccggccagatcttcctcgattcggaggaatccgaacttgaatcctccattcaggaggaagaagatagtctgaagagtcaggaaggagagtccgtgacagaagatatttcattcctggagagccccaatccggaaaacaaagactacgaggaacccaagaaggtccggaaacccgcccttaccgctatcgaaggcacagcgcacggggagccgtgtcacttcccctttttattcctggataaagagtatgatgaatgcacatccgatggccgcgaggacgggaggctgtggtgtgcgacaacctacgactataaggccgacgagaagtggggcttttgtgagaccgaggaggaggcagccaaacgccggcagatgcaagaggctgaaatgatgtaccaaactggtatgaagatccttaacggcagcaacaagaaaagtcagaaaagggaagcttacaggtacttgcagaaggctgccagtatgaatcataccaaagcattagagcgcgtgtcttatgccctgcttttcggggactacttgcctcagaacatccaggccgcacgggaaatgtttgaaaagctcacagaggaggggtcaccaaaggggcagactgcactggggttcttatacgcttctgggctaggcgttaactcatctcaagccaaagccctggtgtactatacctttggcgcactggggggtaatctgatcgcccacatggtgctggggtaccgatattgggccgggatcggggttttgcaatcctgtgaatccgcattgacacactaccgtttggtggccaatcacgtggcctccgatatcagtttgacaggtgggagcgtcgtccagcgcatcagactgcctgatgaagtggagaatccaggaatgaactcaggcatgctggaggaggatctgattcagtactatcagtttctggcggaaaagggtgacgtccaggcacaagtaggcctcgggcagttgcaccttcatggaggccgcggagttgagcagaatcaccagcgggcgttcgactactttaatctggctgctaacgctggaaatagccatgcaatggcctttctcgggaaaatgtacagtgaaggctctgacatcgtgccccaatccaatgagaccgcgctgcattatttcaagaaggcggctgatatgggtaaccccgtcggacagtccggactcggaatggcttatctctacggccgcggagtgcaggttaattacgatctggccctgaagtactttcaaaaggctgccgaacagggttgggtggacggccaattacagcttggaagcatgtactataatggcattggcgtgaaacgcgactataagcaggcattgaagtactttaatttggcctcccaaggtgggcatatcctagcattctataacttggctcagatgcacgcctctggcaccggagtgatgcgtagttgtcacacagccgttgagctcttcaagaacgtgtgcgagaggggaagatggtctgaacggctgatgacagcttacaactcatataaagatggtgattacaatgccgcggtgattcagtatcttctgcttgccgagcaagggtatgaggttgctcagagcaacgcggcatttatacttgatcaacgagaagcaagtattgtgggcgagaacgaaacttatccaagagccttgctgcactggaacagggcggcatcccagggctatacggtggccaggattaaattgggggactatcatttttatggcttcggaacagatgtggactacgagaccgccttcatccactataggctggcctcggagcaacaacactctgcccaagccatgtttaacctggggtacatgcacgagaaagggttgggcataaagcaggacatacatctggccaagcggttctacgatatggctgccgaggcctctcccgatgcacaagtgccggtgtttctcgccctgtgtaagttaggcgtggtatacttccttcagtatatccgcgagaccaacatccgcgatatgtttacccagctagacatggaccagctgcttgggccggagtgggatctttatcttatgacaatcatcgcgctactgttaggtactgtgatcgcttatcgacagcgccaacaccaggatatgcccgccccaaggccccccggcccgcgaccagccccacctcaacaggaagggccacctgaacagcagccaccacagtag

SEQ ID NO: 204445 - DNA, 906 bp, synthetic construct
  misc_feature 1..906: note = Description of Artificial Sequence: Synthetic coding sequence
  source 1..906: mol_type = other DNA
atgcgggtgcggatcggcctgaccctgctgctgtgcgccgtgctgctgtcactggcgtccgccagtagcgatgaggaaggaagtcaggacgaatcccttgacagcaagaccacactcactagcgacgaatctgttaaggatcacaccacagcgggaagggtggtggcaggacaaatttttctggattccgaagaaagtgaattggagagcagtatccaagaagaggaggacagtttgaaatctcaagaaggcgagtcagttactgaagatattagcttccttgaaagtccaaacccggagaacaaggattacgaggagcccaagaaggtccggaagcctgccctcactgctatcgagggcactgcccacggtgaaccgtgtcattttccatttctgtttctggacaaagagtatgacgagtgtaccagcgacggcagagaggatggccgtctgtggtgcgcaaccacctatgattataaagccgatgagaagtggggcttctgcgagactgaggaggaagccgcaaaacggcgacagatgcaggaagcagagatgatgtaccagacgggtatgaaaatcctcaacgggtccaataagaagagccagaaaagggaagcttacaggtatctccaaaaagctgcttcaatgaatcacaccaaagctctggagcgagtatcttacgctctgctcttcggggactatttgccacagaatattcaagccgctcgcgagatgtttgagaagctaaccgaggaggggtcacctaagggtcagacagcactcggtttcttgtacgcgtctgggttgggcgttaactcttcacaagccaaggctctggtctattacacattcggtgctctgggtggtaacctgattgcccacatggttctggtgtcccgcctttag

SEQ ID NO: 204446 - DNA, 2067 bp, synthetic construct
  misc_feature 1..2067: note = Description of Artificial Sequence: Synthetic coding sequence
  source 1..2067: mol_type = other DNA
atgaagcccctgagcctgctgatcgagatcctgatcatcctgggcgtgactataaagaccataaaagccgaagagcacaataagcgccaaaaagaaagaaacgtgaccacgcaagtttctgtgaacgagataaagcagtacctgtcgcatatcctggaacagaggacctcatcaaacgtgattaataagcgggaaaacctgctggagaagaaaaaaaatcagcggaaaattcggataaagggcattcagaataaagacatcctgaagcgcaacaaaaaccatctgcaaaaacaggccgagaagaactttaccgacgaaggggaccagttatttaagatggggattaaagtgctgcaacagagtaagtctcagaagcagaaggaggaagcttacctcctcttcgccaaagcagcggacatgggaaacctgaaggccatggagaagatggctgacgccctgctctttggcaatttcggcgtgcagaacatcacggctgccatacagctgtatgagagcctcgccaaagagggctcttgcaaggcccagaatgctctcggattccttagctcgtacgggattggcatggagtacgatcaggctaaggccctaatatactacacatttggcagcgcggggggcaatatgatgagccagatgattctgggctaccggtacctttccggaataaatgtgctccaaaattgtgaggtggcactctcctactataaaaaggtggcggactatattgcagatacctttgagaagtccgagggagtcccagtcgagaaggttagactcactgagagacccgaaaatctgtcaagtaatagcgaaattctagactgggatatctatcagtattacaagtttcttgccgagcgaggagatgtgcaaatacaggtcagccttggccaattacatctgatagggcggaagggccttgaccaagactattataaagccttgcattatttcctgaaagccgcaaaggccgggagtgcaaacgccatggctttcatcgggaaaatgtacctcgagggcaatgccgctgttccacagaacaatgctaccgcattcaaatacttctctatggcagcatccaagggtaatgcgattggtctgcatggattgggattgttgtacttccacgggaagggtgttcctctgaattacgccgaagcactgaagtattttcaaaaagcggctgaaaaaggctggccagatgcccagttccagcttggatttatgtattattccggctcaggcatctggaaagactataagctcgccttcaagtacttctacctggccagccaatccggacagcccctggcaatctactatttggccaaaatgtacgccaccggaactggagtcgtcaggagttgccgcactgctgtggaattgtacaagggcgtttgcgaacttggccactgggcagagaagtttctgacagcttatttcgcatacaaggatggtgatatcgactcaagcttagtgcagtacgcactactggcggagatggggtacgaggtggcccagagcaatagcgcattcatcctggaaagcaaaaaggctaacatcctggagaaagaaaagatgtacccaatggccctactgctgtggaatcgtgccgccatacaaggcaacgcctttgctcgagtcaagatcggggactaccattactacgggtatggcaccaagaaggattatcagaccgctgccacgcactattccatagccgccaacaaataccacaacgcacaggccatgttcaatttagcgtacatgtacgagcacggccttggaatcacaaaagacatccacctggctaggcggctctatgacatggctgcccagacgtctcctgacgcgcatataccagtgctcttcgcagtaatgaagcttgagaccacccatctgctgagggatatactctttttcaactttactacacgctggaactggctgaagctggacaatactattgggccccactgggaccttttcgttattgggctgattgtccccggcctgattttactgctccggaaccaccacggctag

SEQ ID NO: 204447 - DNA, 1728 bp, synthetic construct
  misc_feature 1..1728: note = Description of Artificial Sequence: Synthetic coding sequence
  source 1..1728: mol_type = other DNA
atgaagcccctgagcctgctgatcgagatcctgatcatcctgggcgtaacgattaagaccatcaaagctgaggagcataacaaacggcagaaagaaaggaacgtcacgacacaagtttctgtaaatgaaattaaacaatacctctctcacattctcgaacagagaacctcgtcgaacgtaatcaataaacgagaaaacctgctggaaaagaagaaaaaccaaagaaagattcggatcaagggaattcagaacaaagacatcttaaaacgaaacaagaaccacctgcagaaacaagcggagaagaatttcacagatgaaggggatcaactgtttaaaatgggcataaaggtccttcaacagagcaaaagccagaaacaaaaagaggaggcttacctgctgttcgcaaaagcagcggacatggggaaccttaaagccatggagaagatggctgacgcacttctgtttggcaacttcggagtccaaaatatcaccgcagccatccagctttacgaaagcttagcaaaagaaggaagctgcaaggcccagaatgctctggggtttctgagttcatacggcattggcatggaatacgaccaggctaaagccctgatctactacactttcggcagcgccggcggcaacatgatgtcccagatgattctggggtatcggtatttatcaggaatcaacgttcttcaaaactgtgaagtggccttgtcttactataaaaaggtagctgattatatcgccgataccttcgagaagtcagagggagtccctgtcgagaaagtgcgcctgacagagagacccgaaaatttaagcagcaactccgagattttagactgggacatctaccagtattacaaattcctggccgaacgcggtgacgtccagatccaggtctcgcttggtcagctgcacctcattggccggaaggggctcgatcaggattactacaaagccctacattattttctgaaggcagccaaagccggttcggccaatgccatggctttcatcggtaagatgtacctggagggtaacgccgctgtgccccaaaataacgccaccgccttcaagtattttagtatggcagctagcaaggggaacgcaattggcctccacgggcttggcctgctctacttccacggcaaaggcgtcccccttaactatgctgaggctctgaagtactttcagaaggctgccgagaaaggatggccagacgcacagttccagcttggtttcatgtattattccgggtctggtatctggaaggattataagctcgcctttaagtacttctatctggcaagccagtccggccagcccctcgcaatctattatttggctaagatgtatgcaacagggacaggagtcgtcaggagctgtcgcaccgctgtggaaaaaaggctgaccttcctgaagaaaagacgatgtattcagtggcgtttttcctacggcatcgaactgccattcaaggacatccacctggctagacgtctctacgacatggctgctcagacctctccagatgcacatataccagtcctgttcgccgtaatgaagctagaaacaacccacctccttcgagacattctcttttttaatttcaccacgagatggaactggttgaagctcgataacaccattggacctcactgggacctgttcgtgattgggttaatcgtacctggcctgatcctgctacttcgtaatcaccacggatag

SEQ ID NO: 204448 - DNA, 1833 bp, synthetic construct
  misc_feature 1..1833: note = Description of Artificial Sequence: Synthetic coding sequence
  source 1..1833: mol_type = other DNA
atgatcgccagccagttcctgagcgccctgaccctggtgctgctgatcaaggaatcgggtgcatggagttacaatacctcgactgaagccatgacgtatgatgaggcatcagcatattgccaacagcgatacacacacctcgttgcaatccagaacaaggaagagattgagtatctgaattctattctgagttactcccccagctattactggatcggcattcggaaagtcaacaacgtgtgggtgtgggtaggcacccagaaacccctgactgaggaagcaaaaaattgggccccaggagaaccaaacaaccggcaaaaagacgaagattgcgttgaaatctacatcaaacgggagaaggacgtgggcatgtggaacgacgaaaggtgctccaagaaaaagctggctctgtgctacactgccgcgtgtaccaatactagttgttctggccatggggagtgcgtggagactataaacaattacacttgtaagtgtgatcccggcttttccgggcttaaatgtgagcagattgtgaattgcaccgccctggagtcgcccgagcatggctcccttgtttgctctcacccattaggcaatttctcttacaactctagttgcagcattagctgcgaccgtggctacttgccaagctccatggaaactatgcagtgtatgagctctggagagtggtcggcccctattccagcgtgtaacgtggtggagtgtgacgccgtgaccaaccctgcaaatgggtttgtcgagtgctttcagaatccaggtagcttcccttggaacactacctgcacatttgattgtgaggaaggtttcgaactcatgggggcccaaagtctccagtgcacaagctcagggaactgggacaatgagaaaccaacctgcaaggctgtcacttgcagggcagtgagacagccacaaaacggcagcgtgaggtgtagccatagtcctgcgggcgaatttactttcaaaagttcatgcaactttacctgtgaggaggggtttatgttacaggggcccgcccaggtcgagtgtaccactcaaggacagtggacccagcaaatccccgtttgtgaagcttttcaatgcactgcgttatcgaaccccgagcgggggtacatgaattgtctcccttctgctagcggcagcttcagatacgggtccagctgcgagttctcctgcgagcaggggttcgtcctcaaggggtccaagcgactccaatgtggacctacaggcgaatgggataacgaaaaaccaacttgtgaggcggtgaggtgcgacgccgtacaccagccccccaaggggctagtgaggtgcgcccattctcctattggggagtttacatacaagtccagttgtgctttctcttgtgaggaggggtttgaactgcacgggagtactcagctggagtgcaccagccagggccagtggactgaggaagtgccatcatgtcaagtcgtgaagtgctcctcattggcagttccaggaaagatcaacatgagctgcagtggagagccagtgtttggaacagtgtgtaaatttgcttgtcccgaaggttggacattgaatgggtccgccgctcgaacatgtggagctacagggcactggtcaggccttctgcccacttgcgaggcgcccacagagtctaatattccacttgtagccggcctgtcagcggccggactctctctgctgactctcgcaccttttcttctgtggctacggaaatgcctcagaaaagcgaagaaattcgtgccagccagctcctgccaatctttggagagcgacgggagctaccagaagccctcttacattctttag

SEQ ID NO: 204449 - DNA, 1455 bp, synthetic construct
  misc_feature 1..1455: note = Description of Artificial Sequence: Synthetic coding sequence
  source 1..1455: mol_type = other DNA
atgatcgccagccagttcctgagcgccctgaccctggtgctgctgataaaagagtccggggcctggtcatataatacatcaaccgaggctatgacatatgacgaggcctcagcctattgccagcagaggtacactcacttagtcgccatccagaacaaggaggaaattgaatatctcaattctatcttgagctacagcccgtcttactattggattggcatcaggaaagtaaataatgtgtgggtgtgggtcggtacccagaagcccctgaccgaagaagctaaaaactgggccccaggggagcctaacaaccgccagaaagatgaggattgtgttgagatctacatcaaaagggaaaaggatgttggtatgtggaatgacgaaaggtgctcaaagaaaaagctggctctttgctacaccgctgcttgcactaatacaagctgttctggccacggagaatgcgtggagaccatcaataattacacttgtaagtgcgaccccgggtttagtggtctgaaatgcgaacaaatcgtcaactgtaccgccctcgaatccccagaacatggctcactcgtgtgcagccatcctcttggaaacttcagctacaattcttcctgctctatatcttgtgacaggggatacctgcccagcagtatggagactatgcagtgcatgtcatccggggagtggtcggcgcccatccccgcttgcaacgtggtggagtgcgatgctgttactaatccggccaatggctttgtggaatgcttccagaaccccggttcattcccatggaatactacatgtacctttgactgcgaggagggtttcgaactcatgggtgctcagagcttgcagtgcacatcgtccgggaactgggacaacgaaaaaccaacatgcaaggctgtaacctgccgggccgttaggcagccccagaatggatcagtgcggtgctcccacagccctgcaggcgaatttacgtttaaatccagctgcaattttacctgcgaagaggggttcatgttgcaagggcccgcacaggttgagtgtacaacgcaggggcagtggacccagcagataccagtttgcgaagtagtcaagtgttccagcttagcagttccgggcaaaattaacatgtcttgctcaggggaacccgtgttcggcacagtttgtaagtttgcttgcccagagggctggaccctcaatgggagtgcggcccgcacctgtggcgctacgggccactggtcgggcctgctgcccacctgtgaagcccctaccgaaagtaacatccccctggtggccgggctgtctgcagccggactgagtttgcttacgctggcaccctttctgctctggctccgcaagtgcctgaggaaagccaagaaatttgtacctgcctcatcctgccagagcttagagagtgatgggtcctaccagaaaccttcctatattctgtag

SEQ ID NO: 204450 - DNA, 1458 bp, synthetic construct
  misc_feature 1..1458: note = Description of Artificial Sequence: Synthetic coding sequence
  source 1..1458: mol_type = other DNA
atgatcgccagccagttcctgagcgccctgaccctggtgctgctgataaaggaaagtggagcgtggagttacaacacttctactgaggccatgacctacgacgaagcttctgcgtattgccagcaacgctacacacacctcgtcgcgatccagaacaaggaggaaattgagtatctgaatagcattctctcgtacagtccatcttattactggattgggatcaggaaggtgaataacgtctgggtttgggtaggaacccagaagcccctgacagaggaggctaagaactgggcccccggtgaacctaataaccgccagaaggacgaagactgtgtggagatatatatcaaaagagaaaaagacgtggggatgtggaacgatgagcgctgttcgaaaaagaagctggctttatgttacactgctgcttgcaccaacacctcgtgttccggccacggggaatgtgtggagaccattaataactacacgtgtaaatgcgaccctggtttctccggcctcaaatgtgagcaaatggtggagtgcgacgccgtgactaacccagccaacggcttcgtggagtgttttcaaaaccccgggtctttcccttggaatacaacttgcacttttgattgcgaggaagggtttgagctgatgggcgcacaaagcctgcagtgcacctcatctggtaactgggacaacgaaaaacccacctgcaaggcagttacctgtcgggccgtgcgacaaccccaaaatggcagtgtacggtgttcacattctcccgccggcgagttcactttcaagtcctcgtgtaactttacttgcgaggagggctttatgctgcaaggacccgcccaagtggagtgtaccacgcagggacagtggacccaacagatacctgtatgcgaggccgtacgttgcgatgctgtacaccagccacctaaaggtctagtgcggtgcgcccattccccaatcggcgagttcacttacaaatcatcttgtgcctttagctgcgaggaagggttcgagcttcacggctccactcagttggagtgtacgtcacagggacagtggaccgaggaggtcccatcctgccaagttgtgaaatgttcttccctggccgtgcctggaaagatcaacatgtcctgctctggggagccagtgtttggcactgtctgcaaattcgcttgccccgaggggtggacattaaacggcagcgcggccagaacatgcggggccacgggccactggtctggattgttgcctacatgtgaggcccccaccgagtcaaacatccccctagtggctggactctccgcagccgggctgtctctgcttacactggccccttttctactctggcttcgaaagtgtctgcggaaggctaagaagtttgtgccagcctccagttgccaaagtctggagtccgatgggtcctatcagaagccttcttatatcctatag

SEQ ID NO: 204451 - DNA, 1644 bp, synthetic construct
  misc_feature 1..1644: note = Description of Artificial Sequence: Synthetic coding sequence
  source 1..1644: mol_type = other DNA
atgatcgccagccagttcctgagcgccctgaccctggtgctgctgatcaaggaatccggtgcgtggtcctacaacaccagcactgaggccatgacgtacgacgaagccagcgcgtattgccagcagcgatacacccacctggtagccattcaaaacaaggaggaaatcgaatatttaaacagtatcctatcttattcaccaagttactattggattggtattcgcaaagttaataacgtgtgggtatgggtagggacacaaaagccactgaccgaagaggctaagaactgggcacctggggagccgaataaccggcagaaagacgaggattgtgtggagatctatattaagagagagaaagacgttggcatgtggaatgacgagaggtgttcgaaaaagaaactggcattgtgttacactgccgcatgcactaacacaagctgcagtggtcacggcgaatgcgtagaaacgattaataactacacctgtaaatgcgatcccggcttctcaggattgaaatgcgaacagatcgtaaattgcacagccttggaaagtcctgaacatggctctctagtttgctcccatccgctgggcaacttctcatacaactcaagctgttcaatcagttgtgacagaggctacttgcctagtagtatggaaactatgcagtgcatgagctcaggggagtggtctgcacccatcccggcgtgcaacgtggtcgagtgcgacgcggtgaccaaccccgctaacggattcgtcgagtgtttccagaatcccggtagctttccttggaacacgacttgcacctttgattgcgaggaaggctttgaattaatgggtgctcaatccttgcaatgtacaagctctggcaactgggataatgagaagcctacctgtaaagcggtaacatgccgggccgttaggcagccacagaatggctccgtgcggtgctctcacagcccagccggtgagtttaccttcaagtcgagttgcaacttcacttgtgaggagggcttcatgctccaaggacctgcacaggtagaatgcaccacccaaggacagtggacgcagcagattccagtgtgtgaggccgtcagatgcgacgcagtgcatcagccaccgaaggggctcgttcggtgtgctcatagcccaatcggtgagtttacttataagtcttcctgtgcgttctcctgtgaggaaggcttcgaactgcatgggtcgacccagctcgaatgtacgtcccagggccagtggactgaagaagtgccatcatgccaagttgtcaaatgttcctcactggcagttccaggaaaaatcaacatgtcatgctcaggagagcccgtgtttggtactgtttgcaagttcgcttgtccagagggctggacacttaatggtagcgctgccaggacctgtggagctacagggcactggtccgggttactgcctacttgcgaagcacccaccgagagcaacatacccctggtggcaggtctcagcgctgctgggctgagccttttaaccctcgcgcccttcctcctgtggctacggaaatgcctgcggaaggcaaagaagtttgttcccgcaagctcctgccaaagccttgagagcgatgggagttatcaaaagccttcttacattctgtag

SEQ ID NO: 204452 - DNA, 1644 bp, synthetic construct
  misc_feature 1..1644: note = Description of Artificial Sequence: Synthetic coding sequence
  source 1..1644: mol_type = other DNA
atgatcgccagccagttcctgagcgccctgaccctggtgctgctgatcaaggaatccggagcctggtcctataatacaagtacagaagccatgacttatgacgaggcctccgcctattgccaacagcggtacacacatctggtggccatccaaaacaaggaggagatcgaatatttgaacagcatcctgagctactccccatcttattattggataggtatcagaaaggtgaataacgtgtgggtgtgggtcggcacccagaaaccattgacagaagaggccaaaaattgggctcctggagagccgaataatcgacagaaggatgaggattgcgtggaaatttacatcaaaagagagaaggacgtaggcatgtggaacgacgagcggtgttcgaagaaaaaactggctctctgctacaccgccgcctgcaccaacacgagttgctcaggacatggggaatgcgtggagacaattaacaactatacctgcaagtgtgacccaggcttctctggtctcaaatgtgagcaaatagtcaactgtacagcgcttgagagtcccgagcatggctcactggtctgttcccacccactgggtaacttcagttacaactcaagttgctccatctcctgtgaccgcggctacctgccgtcaagcatggagaccatgcaatgcatgagcagcggggaatggtctgctccaatccctgcctgtaacgtggtagagtgtgatgccgtgacgaatccggctaatggatttgttgagtgcttccagaaccctggtagcttcccttggaacactacctgtaccttcgactgtgaagaggggtttgaactcatgggcgcccaaagcttgcagtgcaccagtagcggcaactgggacaacgaaaagccgacctgtaaagccgtcacatgtcgagccgtaaggcagcctcaaaacggtagtgtcagatgtagccactcacccgccggagaattcacctttaagtccagctgcaattttacctgcgaagagggatttatgctgcaggggcctgcacaggtggaatgtactacccagggtcagtggacgcaacagatccccgtgtgcgaggcttttcaatgtacagcactctctaaccctgagcgggggtatatgaattgcctgccatctgcgtccgggagttttcggtacggcagcagttgcgaattttcttgcgaacaagggttcgtgttgaaggggtctaagagattacagtgtggacccacaggcgaatgggataatgagaaaccaacatgcgaagtcgttaagtgttcctctttggctgtaccaggcaagatcaacatgtcatgctcaggtgagccagtttttggaaccgtgtgtaaattcgcgtgtcctgaggggtggacccttaacggcagtgcagcccggacctgcggagcgaccggccactggagtgggctccttcctacctgtgaggcccccaccgaaagcaatatacctcttgttgcagggctcagcgcagccggcctgagcctacttaccctggcccctttcctgctgtggctacgcaagtgcctgagaaaggccaagaaattcgttcccgcgtcatcttgtcaatcactggagtcggatggttcatatcagaagccatcgtacatactctag

SEQ ID NO: 204453 - DNA, 1455 bp, synthetic construct
  misc_feature 1..1455: note = Description of Artificial Sequence: Synthetic coding sequence
  source 1..1455: mol_type = other DNA
atgatcgccagccagttcctgagcgccctgaccctggtgctgctgattaaggagtccggcgcctggtcctacaacactagcacagaagctatgacctatgacgaagcctccgcttactgtcagcagagatatacacacctggttgccattcaaaacaaagaagagatagagtacctgaacagcattctcagctactctccaagctattactggattggtatccggaaggtgaacaacgtctgggtctgggtcgggacacagaagcccctgacggaggaggccaagaactgggcccccggagagcctaataacaggcagaaggatgaagattgcgtcgagatctacatcaaacgcgagaaagacgtgggaatgtggaacgatgagcggtgctcaaaaaagaagcttgcattgtgctacacagcggcatgtacaaatacatcatgcagtggacacggggagtgcgtcgagaccatcaataactacacatgtaagtgtgaccccggcttttccggactcaaatgcgaacagatagttaattgtactgcccttgaatcacctgagcatgggagcttagtgtgcagccatccactcggaaatttcagttataattcatcttgcagcatctcatgtgatcgtggttaccttccatcgagcatggagactatgcagtgcatgagcagcggcgaatggagcgccccgatccctgcatgtaatgtggttgagtgcgacgcagtgacaaaccccgcgaacgggttcgtcgagtgttttcagaacccaggttcatttccatggaacacaacctgtacttttgattgcgaggagggtttcgaacttatgggcgcgcagtcgctgcagtgtacttcctccggtaactgggacaatgaaaagccgacatgtaaagctgtgacctgccgcgctgtcagacagccccagaatggcagcgtgagatgtagccattcacccgccggggaatttaccttcaagagttcatgtaacttcacttgtgaagagggctttatgctgcaggggcccgcacaggtggaatgtactacccaagggcagtggactcagcagataccagtctgcgaagtagttaaatgctcgtccctggctgtcccaggcaagatcaacatgagttgttcgggagagccagtgttcgggaccgtatgtaaattcgcttgtcctgaaggctggactctgaatggctcagctgcccgcacgtgcggggctactggccattggagtggactgcttcccacttgcgaggctcccaccgagtctaatattcccctggtcgctggactaagtgccgctggtctcagtttgctgacgctggccccctttctgctgtggcttcgtaagtgtctccggaaggctaaaaaattcgttcccgcttcaagctgtcagtcccttgagtctgacggaagctaccaaaagccctcttacatcctgtag

SEQ ID NO: 204454 - DNA, 1458 bp, synthetic construct
  misc_feature 1..1458: note = Description of Artificial Sequence: Synthetic coding sequence
  source 1..1458: mol_type = other DNA
atgatcgccagccagttcctgagcgccctgaccctggtgctgctgatcaaggaaagtggagcatggtcatataacacttccaccgaagccatgacttacgatgaggccagcgcatactgccagcagcgctatacccatctggttgctattcaaaataaggaggagatcgagtacctcaacagtatcctcagctacagcccctcttattactggatcgggattcgtaaggtgaataacgtttgggtgtgggtgggcacacagaagcccctgacagaagaggccaaaaattgggcccctggagaaccaaacaacagacagaaggacgaagattgtgtggagatctacatcaagagggagaaggatgtagggatgtggaacgacgagaggtgtagcaagaaaaagctggccttgtgctacacggccgcttgtactaacacctcttgcagcggtcatggggaatgtgtcgagaccattaacaattacacctgcaaatgtgacccagggttctccggtcttaaatgcgaacagatggtcgaatgcgacgccgtgacaaaccccgccaatggtttcgtggagtgtttccagaaccccggttcattcccatggaacactacgtgtacttttgattgcgaggaggggttcgaacttatgggggctcagtccctccagtgtacttcgagtggaaattgggacaacgaaaaacctacatgcaaagccgtgacctgtcgagcggtacgccagcctcaaaacggatccgtcagatgctcacattctcccgccggagaatttacatttaaatcctcctgcaatttcacctgtgaagagggcttcatgcttcaggggcctgcccaggtggaatgtactacccaaggacaatggactcaacagatcccagtttgcgaagccgttcgctgcgacgcagtgcaccaacctcccaagggtttagtgcgctgtgcgcacagcccaataggagaatttacctacaaaagcagctgcgcattttcttgtgaagaggggttcgaactgcacggatctacccagctggaatgcacttcccagggccagtggactgaagaagtgccatcctgccaggtagtcaagtgctcctccctggccgttcccggcaaaattaatatgtcctgttctggtgagcctgtgttcgggaccgtgtgtaagttcgcctgtcccgaaggctggactctgaatgggtcagctgccaggacttgcggggcgaccggtcattggtccgggctcctgcccacctgtgaggcgcccaccgaatccaatatccccttggtggccgggttaagtgccgcaggcctctccctcctgacgctcgctccgtttctcctatggctgagaaaatgtctgagaaaggcaaagaaatttgtgcctgcctcttcttgccagagtttagagtctgatggctcctaccagaagcccagttatatcttgtag

SEQ ID NO: 204455 - DNA, 1644 bp, synthetic construct
  misc_feature 1..1644: note = Description of Artificial Sequence: Synthetic coding sequence
  source 1..1644: mol_type = other DNA
atgatcgccagccagttcctgagcgccctgaccctggtgctgctgattaaggagagtggcgcatggtcctacaacacttctactgaagccatgacatacgatgaggcatcggcctactgccaacagaggtacacacacctggttgctattcagaataaggaggagattgagtacctgaactctattttgtcttactccccctcctactattggataggcataagaaaggtgaataatgtctgggtgtgggtgggaacacagaagcccctgacggaagaagcgaaaaactgggcccccggggagccaaataacagacagaaagacgaggattgcgttgagatttatatcaagagggagaaagatgtggggatgtggaatgatgagcggtgcagcaagaagaagcttgctctctgctacactgcagcatgtactaacacaagctgttctggtcacggagaatgcgttgagacaattaacaattatacttgcaaatgcgatccaggattcagtgggctcaagtgcgaacaaatagtgaactgtactgccctcgaatcccccgaacacggaagtttagtttgcagtcaccccttgggtaacttcagctacaattcttcttgctctataagctgcgaccgaggttatctcccgagctctatggagaccatgcagtgtatgagctccggggagtggagcgccccaataccagcatgcaacgtcgtcgaatgcgacgcggtgacaaacccggcgaacggatttgtggagtgcttccaaaatcctggcagcttcccctggaatactacctgcacatttgattgcgaggaagggtttgaacttatgggcgcacaatcactgcagtgcacgtcttctgggaactgggacaatgagaagccaacatgtaaagccgttacctgtagggctgttcggcaacctcagaatggatcagttagatgctctcatagtcccgccggcgagttcacgtttaagtcaagctgtaacttcacatgcgaagaggggtttatgttgcagggccccgcccaggttgaatgcacaacccaaggtcagtggacgcagcaaatccctgtgtgtgaggccgttcgttgcgatgccgttcatcaacctccaaaagggctcgtaaggtgcgctcatagcccaatcggggagttcacatacaagagctcctgtgccttctcatgtgaggagggatttgagctgcatggctcaacgcagcttgaatgtacgtcccaaggccagtggacagaggaggttccatcttgccaggtggtgaaatgttcatccttggctgtccctggaaagatcaacatgagttgcagcggcgagccagtgttcggcaccgtctgcaagttcgcttgcccagagggatggacattaaacggaagcgctgctaggacatgcggagcaactggtcattggagtgggcttttacctacttgcgaggctcccacggaaagtaacatccccctggtggcaggtttgtcagccgcggggctgtccctgttaaccctagcgccctttctcttgtggctgagaaagtgtctgaggaaagctaaaaagttcgtacccgctagctcttgtcaatcactcgagtctgatgggagctaccagaaacccagctacatcctgtag

SEQ ID NO: 204456 - DNA, 1644 bp, synthetic construct
  misc_feature 1..1644: note = Description of Artificial Sequence: Synthetic coding sequence
  source 1..1644: mol_type = other DNA
atgatcgccagccagttcctgagcgccctgaccctggtgctgctgattaaagagtctggcgcttggagctacaatacgtctacagaagcaatgacatacgacgaggcgtctgcctactgtcagcagcggtacacacaccttgtggccatccaaaataaggaagagattgagtatctcaactctatcctaagttactcccctagctactattggatcgggatccgcaaggtgaataatgtctgggtgtgggtggggacccagaagcccctcactgaagaggctaagaattgggcgccgggggagcccaataatcggcagaaagatgaggactgcgtggaaatctacatcaaacgagagaaggatgtgggcatgtggaatgacgaaaggtgttctaagaaaaaactggctttgtgctataccgcggcctgcaccaacacttcttgctcaggacatggcgagtgtgtggagactatcaataactacacatgcaaatgcgatccaggattctctggcctgaaatgtgagcaaatcgtcaactgcaccgccctggagagcccagagcacggctctctcgtgtgctctcatccactcgggaatttcagttacaactcaagttgttcaatttcttgcgatcgagggtatctcccatcttctatggagacaatgcagtgcatgtctagtggagagtggtcagctcctattccagcttgtaacgtggtggaatgcgatgccgtcacaaatccagcgaatggttttgttgagtgcttccagaatcccggttccttcccatggaacaccacttgtacattcgactgcgaagaaggttttgaactcatgggagcacagtcactgcagtgcacctccagtggaaactgggacaacgagaagccaacttgcaaagctgttacatgccgcgcagtgcgacagccccagaacggcagcgtccgttgttcacactccccagctggggaatttacctttaaatcgtcctgcaactttacttgtgaggaaggcttcatgcttcagggtcccgctcaagtggagtgcactacccaagggcagtggacccaacagatcccagtttgcgaggcatttcagtgtacagcactgagcaaccccgagaggggctacatgaactgtttaccatccgcttccggatctttcaggtacgggtcctcctgtgaattttcctgtgagcaagggtttgtcctgaaaggctccaagcgactgcaatgcgggccaaccggcgagtgggacaacgaaaagcctacttgtgaagttgttaagtgctcatccctcgccgttcccggaaaaatcaacatgtcatgttcgggggagcccgtgtttggcactgtttgtaagttcgcgtgtccagaaggatggaccttaaacggctcggccgccaggacgtgtggcgcgacaggacattggagtggacttctgcctacatgtgaagctccgaccgaaagcaatatccctctggtggcggggcttagcgcagcaggcctgtcgctcctaacgctggcgccatttttgttgtggttacgaaagtgccttagaaaggctaaaaaattcgtcccagcatcaagctgtcagtccctggaatccgatggctcctatcaaaaaccttcatacatcctgtag

SEQ ID NO: 204457 - DNA, 1158 bp, synthetic construct
  misc_feature 1..1158: note = Description of Artificial Sequence: Synthetic coding sequence
  source 1..1158: mol_type = other DNA
atgggctgccggcggacccgggagggccccagcaaggccatgatctttccttggaagtgccagtccacacagcgggacctgtggaatattttcaaattgtgggggtggaccatgctctgctgtgactttctggcccaccacggcacagactgctggacgtatcactacagtgagaagcccatgaactggcagagggcgcgaaggttctgtagagataactatacagacctggtggcaatccaaaataaggccgaaatagagtacctcgaaaagactctgccattctcacgctcctattactggatcgggatacgcaaaatcgggggtatatggacctgggtaggcacgaataagtccttaacagaggaggctgaaaactggggagatggcgagccaaacaataaaaagaacaaggaagattgcgtcgagatctacatcaaaaggaataaggacgccggcaagtggaatgatgacgcctgtcataaactcaaggcagcactgtgttacaccgcgtcgtgtcagccatggtcttgttccggacacggggagtgcgtggaaatcattaacaactatacgtgtaattgtgatgtgggttactacgggccccagtgtcagtttgtgatacagtgcgagccactagaggcaccggagttggggacaatggattgcactcacccgctggggaacttttcgttttccagccagtgtgcctttagttgttccgaaggtacgaacttgaccggaattgaagaaactacctgtggcccctttgggaattggtccagtcccgagccaacatgtcaggtgattcagtgcgagcccctgtctgctccggatctaggaataatgaactgcagtcaccctctggcttccttcagtttcacctccgcctgtaccttcatctgcagtgaaggaactgaactgataggaaagaaaaaaacaatttgcgaatcttccggaatctggtccaatccaagcccaatctgccagaaacttgacaaatctttctcaatgattaaagagggagattataatcccctctttattccagtcgccgttatggtgactgcattctctggtctggcgttcatcatttggctggcccgacgactgaagaaaggaaagaagagtaaaaggagcatgaacgatccatattag

SEQ ID NO: 204458 - DNA, 2493 bp, synthetic construct
  misc_feature 1..2493: note = Description of Artificial Sequence: Synthetic coding sequence
  source 1..2493: mol_type = other DNA
atggccaactgccagatcgccatcctgtaccagcggttccagcgggtcgtgttcggaatcagccagctgctgtgcttttccgcactgatttcagagctgaccaaccagaaggaggttgcggcatggacctatcattactccacgaaggcatactcatggaatattagcagaaaatactgtcagaaccgatatacagacctggttgcaatccagaacaaaaatgagattgattatctcaataaggtgcttccctactattctagctattactggatcggaatcaggaagaacaacaaaacatggacgtgggtcgggaccaaaaaagcgctaacaaacgaggcggaaaattgggccgacaacgaacccaataataagagaaataacgaggactgtgtcgaaatttatataaagtctcctagtgctccaggtaaatggaacgatgagcattgcttgaagaagaagcatgcgctgtgctacacagcctcgtgtcaggacatgtcttgctccaagcagggagaatgcctcgaaacgatcggaaactacacatgctcttgttatccgggtttttacggtccggaatgcgagtacgtacgggagtgcggtgagcttgagcttccgcagcatgtgctgatgaattgttcccatccactcggtaacttcagcttcaattctcagtgctctttccattgtacagacggttatcaagtcaacgggccgtctaaactagaatgccttgcatccggtatctggaccaacaaaccacctcagtgtctcgcagcacaatgtccgccactcaagattccagaaagaggcaatatgacctgtctgcattccgccaaagcttttcagcatcaatcctcttgtagtttctcctgcgaggaggggttcgcactcgtaggacccgaggtagtgcagtgtacagcctccggtgtttggactgcaccagcaccagtgtgtaaggccgttcagtgtcagcacttagaagccccatccgagggtacaatggattgcgttcacccattaacagccttcgcttacggcagtagctgtaaatttgaatgccagccaggatacagggttagaggactcgatatgctccgctgcattgattctggccattggagtgctcccttgccgacgtgtgaggctatctcctgtgaaccattggagtcgcccgtccatgggagcatggattgcagcccttctctgcgggcattccaatatgacacaaactgctccttccgctgtgccgaagggtttatgctccgtggagctgacatcgtgcgatgtgacaatcttgggcagtggactgctccagcacccgtgtgtcaagccctgcagtgccaggacctgccggtgccaaacgaggctcgggtgaactgttcccatccgttcggtgcgtttcgatatcagtcagtgtgcagtttcacatgtaacgagggactgctgctcgtgggtgcgagcgtgctgcagtgtctggccaccggaaactggaactcagtcccaccagagtgtcaggctatcccgtgcacgcccctgctctccccgcagaatgggactatgacttgcgtgcagcctctcggaagctctagttacaaatcaacctgtcagtttatttgtgacgaggggtatagcctgagcggccccgagcgcctggactgtacaaggtcgggccgttggaccgactccccgcctatgtgcgaggccatcaagtgtccagaactgtttgcccctgaacagggaagtttggattgttccgacaccagaggagagtttaacgtgggctctacttgtcacttcagttgcgacaatgggtttaagctggaaggccctaataatgtcgagtgcacaaccagcggaagatggtcagcaaccccgcccacgtgtaaaggcatcgcttccctgccaactcctggagtgcagtgcccggccctgaccacgcctggacagggtactatgtattgtcgccatcaccccggtactttcggatttaacactacctgctattttggatgcaatgctggcttcaccctgataggggactccacgctatcttgccgaccaagcggccagtggacagcggtcactccagcttgccgggctgtgaaatgtagtgagctgcacgttaacaagcctatagcaatgaactgctccaatctctggggtaatttctcatatgggtctatctgcagttttcactgcctggaagggcagctgctcaacggttctgcccagacggcatgccaggaaaatggccactggagcaccacagtacctacctgtcaggctggccctctgaccatccaagaagcgctgacttacttcggcggcgccgtggcgtctactattgggttaatcatgggaggcacactcctggccttactgcgtaagagatttcggcaaaaggatgacggaaaatgcccccttaatccacatagtcacctcggcacatatggggtcttcacaaacgctgcatttgatcctagcccatag

SEQ ID NO: 204459 - DNA, 2307 bp, synthetic construct
  misc_feature 1..2307: note = Description of Artificial Sequence: Synthetic coding sequence
  source 1..2307: mol_type = other DNA
atggccaactgccagatcgccatcctgtaccagcggttccagcgggtggtgttcggaatcagtcagctgctgtgtttcagtgcactgatctctgagctgaccaaccagaaggaggtagccgcatggacctaccactacagcactaaggcgtattcctggaacatctcccggaagtactgtcaaaaccgttatacagacctcgtggctatccagaataagaatgagatcgactatttgaataaagttctgccatactatagctcttactattggattgggattaggaaaaacaataagacatggacatgggtcggcacaaaaaaagcgttgactaatgaggccgagaactgggctgacaacgaacctaataacaaacggaataacgaggactgtgtggagatctacatcaagtcccctagcgctcccggaaaatggaacgacgaacattgccttaagaagaagcacgccctgtgttacaccgctagctgccaagatatgtcatgctccaagcagggagaatgtctggaaaccatcggaaattatacctgctcttgttaccccggattttacggtccagagtgcgaatacgtcagggaatgtggagagctggagcttcctcagcatgtcctcatgaattgcagccaccctctcgggaatttctcgtttaatagccagtgctcatttcattgcactgatggctaccaggtcaatggaccctcaaagttggaatgtctggcatctgggatttggacaaataaacctccgcagtgcctggccgcccaatgcccgccactcaagattcctgagcgaggcaacatgacatgccttcattcagctaaggcattccagcaccagtcatcgtgcagtttctcatgtgaggaaggattcgccctggtgggccccgaggtcgtgcagtgcacagctagcggggtttggacggcacctgctccggtgtgcaaagccatctcttgtgagccactcgagagcccagtccatggttcaatggattgttccccgagcctgagagcgtttcaatacgatacaaattgtagctttcgctgcgccgaggggtttatgctaaggggggccgacatagtgaggtgcgataatctcggtcagtggaccgcccctgcgcctgtttgtcaggcattgcagtgtcaggacctgccagtgcctaacgaggccagggtgaattgctcccatccatttggagccttcagataccagtccgtgtgcagctttacttgtaatgaagggcttctgttggtcggcgcttcagtactacaatgcttagccaccggaaactggaactccgtgccccccgagtgccaggccatcccatgcacaccactgctaagcccgcagaacggaacaatgacatgcgtgcaaccgttgggaagtagctcatacaaatctacttgccagttcatttgtgatgaggggtacagcctcagtgggcctgagaggcttgactgcactaggtccggacgttggacagattctcctcctatgtgtgaggccatcaaatgtcctgagctgtttgcgcctgagcaagggtccctggactgttcagacactagaggggaattcaatgtgggctctacctgtcacttcagctgcgacaatggttttaaactggaaggccccaataatgtcgagtgcacgaccagcggccgctggagcgctactcctcccacttgcaagggtatcgcatctctgccaacaccaggtgttcagtgcccagccctcacaactcctggccagggaaccatgtattgcaggcatcatcccggcacattcggcttcaatactacttgttacttcggctgcaatgccggttttacacttatcggagatagtaccctgagctgtcgtccttccggccagtggacagcagtcactcctgcatgtcgagcagtaaaatgtagcgagctgcacgttaataagcccatagcgatgaattgtagcaacctgtggggaaacttttcctatggcagcatctgcagctttcactgtctcgaggggcagttgttgaatggcagcgcgcagactgcatgccaggagaacggacactggtctactacagtcccaacctgtcaggctggccctctcacgattcaggaggccctgacttacttcggcggtgccgtggcctccacaattggactgatcatggggggaactctgttggccttactccgcaagaggttcagacaaaaagacgacggaaagtgccctctgaacccccacagccacctggggacatatggtgtgttcaccaatgctgccttcgatcccagtccatag

SEQ ID NO: 204460 - DNA, 2307 bp, synthetic construct
  misc_feature 1..2307: note = Description of Artificial Sequence: Synthetic coding sequence
  source 1..2307: mol_type = other DNA
atggccaactgccagatcgccatcctgtaccagcggttccagcgggtcgtcttcggtataagccaacttctctgcttcagtgccttgatttcagagcttactaaccagaaggaagtcgccgcttggacttatcactactcaaccaaggcatacagctggaatatcagccgaaaatattgccagaaccggtataccgatctcgtggcgattcaaaataagaacgaaatcgactatttgaacaaagtgcttccgtactatagttcgtattattggattggcatcaggaagaataataaaacttggacgtgggttggaactaaaaaagccttgacgaatgaggcagaaaactgggctgataatgagcccaataacaaacggaataacgaagattgcgtggagatttatatcaaatccccttcagcacccggaaagtggaacgatgagcattgcctcaaaaaaaagcatgccctttgctatactgcttcctgtcaggatatgtcctgtagcaaacagggcgagtgcttagagactatcggtaactacacttgcagctgttaccccggcttctacgggcctgaatgcgagtacgtgcgtgaatgcggggagctggaactgccccagcatgttctgatgaactgctcacaccctctgggaaacttctctttcaactcgcagtgtagctttcactgcactgacggttaccaggttaacggcccgagtaagctagaatgtctagcctctggaatctggacgaacaagcctccacagtgcctcgcagtacagtgccaacaccttgaagctccatccgagggcacaatggactgtgtgcacccattgaccgcgttcgcctatgggtccagctgcaaatttgaatgtcagcccgggtatagggtaaggggcctggacatgcttcggtgcattgattctgggcattggtcggccccactgcctacctgcgaggcaatatcttgcgagcccttggagagcccagtccatggttcaatggactgctctccttctctgagagctttccagtacgataccaactgtagttttaggtgtgccgaagggtttatgttgcggggagccgacatagtcaggtgcgataatctggggcaatggacagctccagccccagtgtgccaggccctgcagtgccaggacctcccggtccctaacgaagctcgggttaactgttctcatcctttcggcgcgtttcggtaccagtctgtttgttcatttacctgcaatgagggactactgttggtcggagcgtccgtacttcagtgcctggcaacggggaattggaacagtgtgccccctgaatgtcaagcaattccctgcactcctctgctatctcctcaaaatggaacaatgacttgcgtgcaacccctgggaagttcaagttacaagtccacctgtcagtttatctgtgacgaaggatactctctctctggccccgaaaggctggactgcactcgttccgggaggtggaccgatagcccaccaatgtgcgaagccattaaatgcccagagctctttgccccagagcaagggtctttagattgctccgatacacggggggaattcaatgtgggatccacctgccatttttcatgtgacaacggattcaagttagaaggccctaataacgtggagtgcaccacaagtggacgctggagtgctacacccccgacatgcaagggtattgcgtctttgccaacccctggcgtgcagtgccccgctttaactacacctggacagggcacaatgtattgtaggcatcaccccggaacattcgggtttaacaccacctgttactttggatgtaacgccggctttacccttatcggtgattccacattgagctgtcggccatccggacagtggaccgcagttacacccgcgtgcagagccgtcaagtgctctgagttacatgtgaataagcctatcgcaatgaattgcagtaatttatggggcaacttctcttatggcagcatttgttccttccactgccttgaaggccagcttctgaacggttcagcccagactgcttgccaggagaacggtcactggtccacaaccgtgccgacctgccaggccgggcccctgaccattcaagaagcactgacgtactttgggggcgcagtcgctagcacaataggactgataatggggggaaccttgctagccctgctcagaaagcgatttagacagaaagatgacggaaaatgccctctgaatccccacagccacctgggcacatacggcgtttttacaaacgcggcatttgacccatccccttag

SEQ ID NO: 204461 - DNA, 1941 bp, synthetic construct
  misc_feature 1..1941: note = Description of Artificial Sequence: Synthetic coding sequence
  source 1..1941: mol_type = other DNA
atggccaactgccagatcgccatcctgtaccagcggttccagcgggttgtatttggcatttcccaactcctgtgcttctccgccctcatttctgagctgactaaccagaaagaagttgctgcatggacataccactattccaccaaggcctacagctggaacatctctcgtaaatattgtcagaacagatatacagatctggtcgccattcagaacaagaatgaaatcgactacctcaacaaggtcttaccgtattactctagctactactggattgggatcagaaagaacaataaaacttggacatgggtcgggactaaaaaagctctgactaatgaagcagaaaattgggcagataatgaacccaataacaaacgcaacaatgaagattgtgtggaaatctatatcaagagtccatccgctcccggcaagtggaacgacgagcattgcctgaagaaaaagcatgccctgtgttacacggcatcatgccaggatatgtcttgtagcaaacagggggagtgcttagaaaccattggcaactacacatgctcctgttaccctggcttttacgggcctgagtgtgaatacgtgcgtgaatgtggcgagctggagctgcctcagcacgttctgatgaattgcagccaccctttgggcaatttttcttttaacagccagtgcagttttcactgcacagatggctatcaggttaatggacccagcaagcttgagtgtttagcctcagggatttggacaaacaagcctccccagtgcctagcagcccagtgtccccctctgaaaatccctgaaagggggaacatgacatgtctgcactcagcgaaagccttccaacaccagtcaagttgctcattcagctgcgaagaaggattcgccctggtggggcccgaggtggttcagtgtacagcaagcggtgtgtggaccgcgcccgcccccgtatgcaaagcgatcagctgtgagccactggaatcccctgtccatggaagtatggattgttcaccaagcctacgcgccttccagtacgacactaattgctcttttagatgcgcagaagggttcatgttgcggggcgccgatatcgtccggtgtgataatctcggacagtggacagcgcctgcaccagtgtgtcaggccctgcagtgccaggacttgcctgttcccaacgaagctcgggtaaactgttcccatccattcggcgcgtttcggtaccaatcagtttgcagcttcacctgcaatgagggactcctgctcgtcggtgcttccgtcctgcaatgtctcgcaactggaaattggaactccgtgcctcctgaatgccagggtaagagcattgctagtctgccaacgcctggtgtgcagtgcccagccctcacaacccccggccaaggaactatgtattgtcggcaccacccgggtacattcggcttcaataccacctgctactttggctgcaacgccggtttcacccttatcggagacagcactctgtcctgccggcctagtgggcagtggaccgccgtgactccagcttgcagggccgtcaagtgctcagagctgcacgtaaataagcccattgccatgaattgctccaatctgtggggcaacttttcctatggtagcatttgctcatttcactgcctagagggccagctgcttaatggttctgctcagacagcttgtcaagaaaacggccactggtctacgacggtcccaacgtgtcaggccggacccttgactatccaggaagcattaacctatttcggaggggccgttgctagcactataggtctgattatggggggaactctactggcactcctcaggaagaggtttcggcagaaggatgacggaaagtgccccctcaacccgcacagtcacctcggcacatatggcgtgtttactaatgctgcatttgatcccagcccctag

SEQ ID NO: 204462 - DNA, 2493 bp, synthetic construct
  misc_feature 1..2493: note = Description of Artificial Sequence: Synthetic coding sequence
  source 1..2493: mol_type = other DNA
atggccaactgccagatcgccatcctgtaccagcggttccagcgggtggtctttggaattagccagctgttatgcttttccgcattaatatcagagctcactaatcagaaagaagttgccgcgtggacgtatcactattctacgaaagcctattcttggaatatttcacgcaagtattgtcagaataggtatacagacttagtagctatccagaataagaacgagatcgactatctgaataaggttctgccctattactcatcatactattggatcgggattagaaaaaacaacaagacctggacatgggttggcactaagaaagccctgactaatgaggccgagaattgggctgataacgaaccaaacaacaagcggaacaacgaggattgtgtcgaaatttatatcaaatccccctctgcacccggcaagtggaacgatgagcattgtctgaaaaaaaagcacgcactctgctacaccgctagctgccaggatatgtcttgctctaagcagggtgaatgcctggaaacaattggtaattacacctgcagctgctacccggggttttatggcccagagtgcgagtatgtgagggagtgtggcgagcttgagctgccgcagcatgtgctgatgaactgcagtcatcctctggggaacttcagttttaactcacaatgtagctttcactgcaccgacgggtatcaggtgaacggacctagcaagctggagtgcctggcaagcggaatttggacaaacaagccacctcaatgcctggccgcgcagtgtcctcctctcaaaatccctgagcgtgggaatatgacttgcctgcatagtgccaaagcattccaacaccaatcttcctgctcttttagctgcgaggagggtttcgctctcgtcggcccagaggtggtgcaatgtactgcaagtggcgtttggacagcccccgcacccgtgtgcaaagcagtccagtgtcagcatctggaggccccatctgagggcaccatggactgcgttcatcctttaaccgcatttgcttatgggtccagctgcaaatttgagtgccagcccggctatcgagtgcgggggctggacatgcttcggtgcatcgattccggccactggagcgcccccctgccaacgtgcgaggctatctcatgcgaacctctggagtcacccgtccacggcagtatggactgttcccctagcctgcgggcgtttcagtacgacactaactgctccttcaggtgcgctgaagggttcatgctcagaggggccgacattgttaggtgtgataacctgggccagtggacagctccggcccctgtatgtcaagcacttcagtgccaggacttgccagttcctaatgaggcacgagtaaactgtagtcacccatttggggcctttaggtaccagtcagtttgctcctttacctgcaatgaaggccttctgcttgtgggagcgtccgtcctccagtgcctcgcaacagggaattggaatagcgtgccacccgaatgccaagctatcccttgtacccctctattgagccctcagaatggcactatgacctgcgtccagcccctgggaagctcatcgtataaatcaacatgtcaatttatttgtgatgagggatactccttgtcaggccctgagcgactggattgtacacggtccggaaggtggactgacagcccaccgatgtgcgaagcaattaaatgccctgagttgttcgcccccgagcaaggcagtctggactgtagcgacactcgcggcgagttcaacgtgggatcaacttgccacttttcttgtgacaacggtttcaagctcgaaggccccaacaacgtggagtgcactacatccggccgatggagtgctacacccccaacatgtaaaggtatcgcttctttgcctacccctggagttcagtgcccagccctgacgactcctggccaaggcactatgtactgcaggcaccaccccggtacatttgggtttaacacaacatgttattttggctgcaacgccggattcactctcattggtgactctactctgtcatgtcggccttccggacaatggaccgctgtgacgcctgcctgcagagctgtgaaatgttctgagctgcacgtgaataaacctatcgccatgaactgctcgaatctttggggcaatttcagttatggatccatctgcagcttccactgcctggagggtcagctgctcaacggatcggcccagactgcttgtcaagaaaatggccattggagcactaccgtgcccacatgtcaggcaggtcctttaactatccaagaagccctcacatattttggtggtgccgtggccagcacaatcggtcttataatgggaggtacccttctggcacttttgagaaaacgatttcgccagaaagatgacggtaaatgtccactgaacccacactcacatttaggcacatacggtgttttcaccaatgctgccttcgatccctccccttag

SEQ ID NO: 204463 - DNA, 1935 bp, synthetic construct
  misc_feature 1..1935: note = Description of Artificial Sequence: Synthetic coding sequence
  source 1..1935: mol_type = other DNA
atggccaactgccagatcgccatcctgtaccagcggttccagcgggtggtgtttggcatttcacagttgctgtgcttttcagccctgatttcagaactaactaatcagaaggaggttgccgcatggacttatcactatagcaccaaagcttactcctggaatatctcgaggaagtattgtcaaaatcgatacacggacctggttgcgatacagaataaaaatgaaattgattatctaaacaaagtgctgccttactactcctcatattactggattggcatccgcaagaacaataaaacatggacgtgggtgggcacaaagaaagccctcacaaacgaggctgaaaactgggcggataatgagcccaacaataaaaggaacaacgaggactgtgtagaaatttatattaagagtccctcggccccaggaaaatggaacgatgagcattgcttaaaaaagaagcatgcactgtgctacactgcaagctgtcaagacatgagctgcagcaaacagggggagtgtcttgagaccatcggcaattatacttgttcatgctacccaggtttctacgggccagaatgtgagtacgtgcgggagtgcggagagttggagctgccccaacacgtactgatgaactgcagccacccgttgggcaacttctcctttaattcccagtgttcattccattgcaccgacgggtatcaggtgaacggaccctcaaagttggaatgtcttgcttcaggcatctggactaacaagccaccacagtgtcttgctgcccagtgcccccccttgaagattcctgaacgagggaacatgacatgtctgcacagcgccaaagcattccagcaccaaagcagttgcagcttctcatgcgaggagggattcgccctggtaggaccagaagtggtgcagtgtactgcttccggcgtttggacggctccggcccccgtctgtaaggcccttcaatgccaagacctccccgtgcctaacgaagcgcgtgtgaattgttctcaccccttcggggcctttaggtaccaaagcgtgtgtagctttacctgcaacgaagggctcctgctggtcggcgccagcgtcctgcaatgtctcgccacagggaactggaattccgtcccacccgagtgtcaggccatcccctgcactccactactgtctccccaaaatgggaccatgacatgtgtgcaaccgcttggctcctcgtcatataaaagcacttgccagtttatatgtgacgagggctactccctgtccgggcccgagcggctggactgcacaagatcaggccgatggacggactctcccccaatgtgcgagggtatcgctagccttcccacccctggtgtgcaatgtcctgcactgaccactcccggacaggggactatgtattgtcgccaccacccaggaacctttggttttaacactacttgctatttcgggtgtaatgctggttttaccctgattggtgactcaaccctttcttgtcgaccaagtggccagtggactgccgtcacaccagcctgccgcgccgtcaaatgtagcgaactacatgtcaataagcctattgctatgaactgctcaaacctttggggaaatttttcttatgggtccatttgcagtttccattgccttgaaggacagcttctgaacggatcggcccagacggcctgccaggaaaatgggcactggagtacgactgtgcctacttgtcaggcgggaccactcaccatccaagaggctctgacctattttggaggcgccgtggccagtactattggactcataatgggagggacactgctggccctgttacggaagcgattcagacagaaagacgatggcaaatgcccacttaatccccacagccacttggggacctatggggtcttcaccaatgctgcattcgatccctcgccgtag

SEQ ID NO: 204464 - DNA, 1941 bp, synthetic construct
  misc_feature 1..1941: note = Description of Artificial Sequence: Synthetic coding sequence
  source 1..1941: mol_type = other DNA
atggccaactgccagatcgccatcctgtaccagcggttccagcgggtggtgttcggcatatctcaactcttatgcttttctgcactcatctctgaattgactaatcaaaaagaagtggctgcttggacataccattattccaccaaggcctacagctggaatatatctcggaaatactgccagaatcgctacactgacctggtggctattcagaacaaaaacgagatcgattaccttaataaggtattaccctactactcttcatactattggataggtatccggaaaaataacaagacatggacatgggttgggaccaagaaggccttaaccaatgaggccgagaactgggctgacaacgaaccgaacaacaaacgcaacaacgaagactgcgtggagatctatatcaagtctcctagtgctcccggaaagtggaacgacgaacattgtctcaagaagaaacacgccctatgctatacagcatcatgtcaggacatgtcctgcagtaagcagggcgaatgtcttgagacaattggcaattacacctgctcatgctaccccggattttacggccccgaatgtgaatacgtgagagaatgcggcgagctcgagctgcctcagcacgtgctgatgaactgcagccaccccctcggtaacttctccttcaattctcagtgcagcttccactgtaccgacgggtaccaggttaatggaccctctaaactggagtgtctagcttccggcatctggaccaataaacctccacagtgcctagcagcccagtgtcctcctttaaagatcccagaacggggtaacatgacatgcctgcacagtgccaaagctttccagcaccagtcgagttgctccttctcctgtgaggagggctttgctctggtcggccccgaggtcgtgcaatgcaccgccagcggggtgtggacggcgcccgccccagtttgcaaagccatatcctgtgagccgctggagtccccagttcacggctcgatggattgtagcccaagcctgagagctttccagtacgacacaaactgctctttccgatgtgcagaaggatttatgctcagaggggccgatattgtgagatgcgacaacctgggacagtggacagcgccagcacccgtttgtcaagccttgcagtgccaggacctgccagtgcctaatgaagcaagggttaactgctcacacccttttggcgccttccgctatcaatctgtgtgctcatttacctgcaatgaaggcttgctgcttgtcggggctagcgttctccagtgcctcgctaccggtaattggaacagcgtccctccagaatgccaagggaagtccattgcctctctgcccactcccggcgtgcagtgcccagccctaaccacaccaggacaaggcactatgtattgccgccatcatccgggtacattcggtttcaatactacctgctatttcgggtgtaacgctggattcacgctgataggcgattccactctgtcttgccgcccttctggtcaatggacggcagtgaccccagcttgtcgtgcggtcaaatgtagtgagctacatgtcaacaagcccattgcgatgaactgtagcaacttgtggggaaacttctcatacggttcaatctgttcctttcattgtttggaaggtcagctcttaaatgggtctgctcagaccgcctgtcaggagaatggtcactggtcaactactgttcccacctgccaggccgggccactgacgattcaggaagccttgacatacttcgggggtgcagttgcttccaccatcgggcttattatggggggtacactgctggcacttttgcgcaaaagattccgtcaaaaggacgatggaaagtgccccctgaacccacattcccacctgggcacttacggcgtgtttactaacgcagcatttgacccaagtccatag

SEQ ID NO: 204465 - DNA, 2307 bp, synthetic construct
  misc_feature 1..2307: note = Description of Artificial Sequence: Synthetic coding sequence
  source 1..2307: mol_type = other DNA
atggccaactgccagatcgccatcctgtaccagcggttccagcgggttgtgttcggaatctctcaactgctttgcttcagcgccttaataagcgaattgaccaaccaaaaagaggtcgctgcctggacataccattattccaccaaagcctacagctggaacatttccaggaaatactgccagaataggtatacagacctcgtggctatccaaaataaaaacgaaattgactacctgaataaggtgctgccatactactcttcttactattggatcgggattaggaagaataataaaacttggacttgggtgggaaccaagaaagccctcactaacgaggcagagaattgggcggataacgagcccaacaataaacgcaacaacgaggattgcgtagaaatttatataaagtccccctccgcaccaggcaaatggaatgatgagcactgtctgaagaaaaaacacgctctctgttacacggcctcgtgtcaggacatgagctgttcgaagcagggcgagtgccttgagactataggtaactacacctgtagttgctatccaggattttacgggcccgagtgcgagtacgtgagggaatgcggcgaactggagctgccccagcacgttcttatgaattgtagtcatccccttggtaacttcagcttcaattcacagtgttctttccattgcacggacgggtatcaggtcaacgggcccagtaagctggagtgtctggctagcggcatttggaccaacaagcctccacaatgtttggccgttcagtgtcaacatctcgaggccccaagcgaggggacaatggattgtgtgcacccacttacagcttttgcatatggaagttcgtgtaaatttgaatgccagcccggctatcgcgtccggggcctggatatgctgcgttgcatagactctggccactggtctgcgccactgcccacatgcgaggcgataagttgtgagccgctggaaagccccgtgcacggaagtatggactgtagtccaagcctacgcgcttttcagtatgacacaaactgttcctttaggtgtgcggagggttttatgttgaggggcgctgacattgttagatgtgacaacctcgggcaatggacagcccccgcgccggtttgccaagcactccagtgtcaggatctcccagtcccgaatgaagcgagggtcaactgttcccatccatttggggcttttcgttaccaatccgtgtgcagtttcacatgtaacgaaggtttgctcctggtgggcgcctcagtgctccagtgcttggccacaggcaactggaacagcgttccacccgaatgccaggccatcccctgtacaccgcttctgagccctcagaatggcaccatgacatgtgtccagccactgggctcatcgagctacaagtccacgtgtcaattcatctgcgatgaagggtattctttgagcggacctgagaggctggactgtacaaggagcggtcgctggaccgattccccaccgatgtgcgaagcaatcaaatgtcccgaactatttgcacccgagcaggggagcctagattgtagcgataccagaggggaattcaacgtggggtcaacttgccacttcagttgcgataacggtttcaagcttgagggaccgaacaatgtagagtgcacaactagcggaaggtggtctgcgactcctcctacttgcaaaggaattgcttcactccctactcctggcgtacagtgcccggctctcacgacccccgggcagggcacgatgtattgtaggcatcacccagggacttttgggtttaatacgacatgctactttggctgcaacgcgggctttaccctaatcggcgatagtaccctgtcctgccgacccagcgggcagtggacagctgtgacaccagcctgtcgtgccgtaaaatgcagcgaactgcatgtaaataagccaatcgctatgaattgcagcaatctctggggcaatttcagttacggtagtatatgttccttccattgcctggaggggcagttgcttaacggctccgcccaaacagcttgccaggaaaatggtcactggagcaccactgtgcccacgtgccaggctggccccctgaccattcaggaggccttaacatacttcggtggggccgtggcctcaacaattggactcattatgggaggaacactgttagccctcctgaggaaacgctttaggcagaaggacgatggcaagtgccccctgaacccacactcacacctgggtacctacggggtcttcactaatgctgccttcgatccctccccttag

SEQ ID NO: 204466 - DNA, 2307 bp, synthetic construct
  misc_feature 1..2307: note = Description of Artificial Sequence: Synthetic coding sequence
  source 1..2307: mol_type = other DNA
atggccaactgccagatcgccatcctgtaccagcggttccagcgggtggtgttcggaatttcccagctcctgtgcttttctgcactaatcagtgaattgacaaatcagaaagaggttgcagcttggacctaccactacagcaccaaagcatattcctggaacatcagtagaaaatattgccagaatcgctacaccgacctggttgccatacagaataagaatgaaattgactacctgaacaaagttctgccttactattctagctactactggatcgggatacgcaaaaacaacaagacctggacatgggtgggcacaaaaaaggcactaaccaatgaagccgagaattgggccgacaacgagcctaacaataaaagaaacaacgaagattgtgtagaaatctatataaagtcccctagtgcacccggcaagtggaatgacgaacattgtctgaagaaaaaacatgctctttgttacactgcgtcgtgtcaggatatgagctgttccaaacagggagaatgtctagagactatcgggaactacacctgttcatgttacccaggcttctatggaccagagtgcgaatatgtaagagaatgtggagagttggaactgccacagcatgttttgatgaattgctcacatccacttggtaatttctcatttaatagtcagtgcagctttcactgcactgacggataccaagtaaatgggccatcaaagctggagtgcctcgcatccgggatatggactaacaagcctccccaatgtctggctgcgcagtgcccaccgctgaagatacccgaaagggggaatatgacctgtctccacagcgccaaggcctttcaacaccagtcaagctgttccttcagttgtgaagaaggattcgcgctagtgggacccgaggtggttcagtgtacagcctctggagtttggaccgcacccgcgccagtgtgcaaagcgatctcttgtgaaccactggaaagcccggtgcacggaagcatggactgcagcccaagcttgcgcgcctttcaatacgacacgaactgtagctttcgatgcgcggagggctttatgttgcgtggagccgatatcgtacggtgcgataacctcggccagtggaccgctcctgcccccgtttgccaagccctccagtgtcaggacctcccagtccccaatgaggcgcgggtgaattgctctcacccctttggcgcattccggtaccaatcagtgtgcagtttcacgtgtaacgagggcttactgctagtcggcgctagtgttctgcagtgtctcgctaccggtaactggaacagcgtccctcctgagtgccaggccataccgtgcactccgcttttaagcccccagaatgggactatgacctgcgtacaacctttaggctccagttcatataagtcaacctgtcagtttatctgcgatgagggatactccctttcaggaccagaaaggctggattgcacaaggtctggaaggtggactgactcgcctccaatgtgtgaggctataaaatgccctgaactgttcgctccagagcagggctctttggactgcagcgatacacgaggagaattcaacgttgggagcacttgtcatttcagttgcgacaacgggtttaaattagaaggaccaaataatgtggagtgtaccacgtccggacggtggagtgccacacctcctacttgcaaaggcatcgccagcttacctactccaggggtccagtgtccagctctcaccacaccggggcagggcactatgtactgccgtcatcacccaggcacattcggtttcaatacaacttgttacttcggttgcaacgcggggtttaccctcatcggcgactccacgctgtcttgccggccttcaggccagtggaccgcagtgaccccagcatgccgcgctgtaaagtgttccgaacttcacgtcaacaagccaatcgccatgaactgcagtaatctgtgggggaacttttcttatggctccatctgctctttccattgcctcgaggggcagcttctgaatggatccgcccaaacggcctgccaggagaacggacattggagcacaaccgtgcccacatgccaagcgggccctctgactattcaggaggctctgacctatttcggcggcgctgtagcttcgaccatcggcttgattatgggaggaaccttactggcactgctcaggaaaagatttaggcagaaggacgatggtaagtgccctctgaatccccattctcacttgggcacatacggcgtgtttaccaatgctgccttcgatccctctccgtag

SEQ ID NO: 204467 - DNA, 1935 bp, synthetic construct
  misc_feature 1..1935: note = Description of Artificial Sequence: Synthetic coding sequence
  source 1..1935: mol_type = other DNA
atggccaactgccagatcgccatcctgtaccagcggttccagcgggtcgtgtttggcatctcacagctgctttgcttttcagctctaatctctgaactgacgaaccagaaagaggttgcagcttggacttaccactatagcactaaggcctactcttggaatatatctaggaaatactgccagaaccgctatactgatttagtcgcaatacaaaacaagaacgaaatcgactacttaaataaggtactgccatattatagcagctactactggatcggaatacgaaagaataataaaacctggacttgggtgggtactaaaaaggctcttaccaacgaagctgagaattgggccgataacgagcctaataacaagaggaacaacgaggactgcgtggagatttatattaagtctccaagcgcacccgggaagtggaacgatgaacactgtcttaaaaaaaagcatgcactttgctacacagcctcctgtcaggatatgtcatgtagcaaacagggggaatgtttggaaactattggcaattatacatgtagttgctatccaggcttctatggcccagagtgtgaatacgttagagaatgcggggaactagaactaccccaacacgtgctgatgaattgcagtcatcccctcggaaatttttccttcaacagtcagtgctcatttcactgtaccgatggttatcaggtgaacggacccagcaagctggagtgcttagcttcaggaatttggacgaacaaaccaccccagtgcttagccgctcagtgcccccccttgaagatccccgaaaggggcaacatgacttgcctgcactccgccaaagcttttcagcaccaaagctcatgttctttttcatgtgaggaaggcttcgctctggtggggcctgaagtcgttcaatgcaccgctagcggtgtttggactgcccccgctccggtgtgtaaggccctccagtgtcaggatctgcccgtcccaaacgaagctagagtgaattgttcacatccctttggagcgtttcgatatcagtctgtctgcagcttcacctgcaacgaaggccttctgttggtcggagctagcgtgctccagtgccttgcaacagggaactggaacagcgttcctccagaatgtcaagctattccatgcacaccacttttatcccctcagaacggcacaatgacatgtgtccagcctctgggttcaagctcatacaaatcgacctgccagttcatctgtgacgaagggtattcattgtccgggcctgaacgcctggactgcactaggtccgggcggtggacagactctcctccgatgtgcgaagggatcgccagcttgccaaccccaggagttcaatgcccagcgctgactacccccggacaaggcactatgtactgcagacaccaccctggcacgttcgggttcaatactacgtgctactttggttgtaatgcaggcttcactcttatcggcgatagcaccttgagctgccgaccttcagggcaatggacagctgtgacaccagcctgtagagccgtcaagtgcagcgaactccatgtgaacaagcccatcgccatgaactgttccaacctgtgggggaatttctcttatgggtccatttgctccttccactgtcttgaaggtcagttgttaaacgggtccgcccagactgcctgccaggaaaacggacattggtccaccaccgtgccaacctgccaggccggacctcttactattcaggaagcactgacctatttcggcggagccgtggcatccaccatcgggctcattatgggggggaccttactcgctctgctcagaaaaagatttagacagaaagacgatgggaagtgccccttaaacccgcattcccaccttggcacatatggtgtgttcaccaacgccgctttcgatccgtccccttag

SEQ ID NO: 204468 - DNA, 2490 bp, synthetic construct
  misc_feature 1..2490: note = Description of Artificial Sequence: Synthetic coding sequence
  source 1..2490: mol_type = other DNA
gccaactgccagatcgccatcctgtaccagcggttccagcgggtggtgttcgggataagccagcttctgtgtttcagcgcactgattagtgagctcaccaatcagaaggaggtggccgcctggacctatcattattctaccaaagcctattcatggaatatctcccgaaaatactgccaaaacaggtacaccgatttggtggccatccagaacaagaatgagatcgattatcttaacaaggtcttgccatactacagtagttactattggatagggattagaaaaaacaacaagacttggacgtgggttgggacgaaaaaagccttaacaaacgaagctgaaaattgggcagacaatgaaccaaataacaaaaggaacaatgaggactgcgtggagatctatattaagagcccatcagccccgggcaagtggaatgatgagcattgcctaaagaagaaacacgcactctgttatactgcgtcttgtcaggatatgagttgcagcaagcaaggggagtgtttggagacaatcggaaactacacctgctcctgttacccaggattctacggtcccgagtgcgaatatgtgagagagtgtggcgagcttgagcttccacagcacgtcctgatgaactgctctcaccccttaggcaatttctctttcaatagtcaatgtagctttcattgcactgatggctatcaggtgaacggaccttctaagctggaatgcctggcgtccggtatctggacaaacaaaccaccacagtgtctggcagcccagtgcccccccttaaagatcccagagaggggcaatatgacctgccttcactcagctaaagctttccagcatcagagtagctgtagtttctcctgtgaagaagggttcgccctcgtggggccagaggtggtacagtgcacagcgagcggggtgtggacggccccagcgccagtgtgtaaagcagtgcagtgccaacacctcgaggctccaagtgaaggcacaatggactgcgtccaccccctgacagcgtttgcttacgggagctcctgcaagtttgagtgtcagccaggataccgtgtccgcggcctcgatatgctccgatgcatagactccggccactggtcagcacctctcccaacatgcgaagccatcagctgtgaaccattggagtccccggtgcatggctcaatggattgcagtcctagtctgcgagcgttccaatatgacacgaactgttccttcagatgtgcagagggattcatgctcaggggagccgatatagtccgttgcgacaatctcggacaatggacggcaccggctcctgtttgccaggccttgcagtgccaagatttaccggttcctaatgaagccagagtgaactgttcacaccccttcggggcctttcgctaccagtccgtctgttctttcacttgtaacgagggtctgctcttggtaggcgcttctgtgctgcaatgcttggctactggtaactggaacagtgtgccccccgagtgccaggctataccatgtacacctctgctgtctccccagaatggaacgatgacttgtgtccagccattgggttcctcctcatacaagtctacttgtcaatttatctgtgatgagggctatagcctgagtggcccagagcgccttgattgtaccagatcgggtcgctggaccgacagtcctcctatgtgcgaggccataaagtgccccgagctgttcgcaccggagcaaggatcactcgattgcagtgacactcgcggtgaatttaatgtggggtccacctgccacttctcctgtgataatggctttaaacttgaagggccaaacaatgtggagtgtacgacttctggtcgctggagtgcaacccccccgacatgcaagggtattgcctctctgcccaccccaggcgtgcagtgccctgctctaaccacgcctgggcagggcactatgtactgcagacaccaccctgggactttcgggtttaatacaacatgctacttcggatgcaacgccggcttcacactcattggagatagcacactttcctgtaggccatcgggccaatggactgcagtgactccagcctgccgcgccgtgaaatgttcagagttacatgtgaacaagccaatcgcgatgaattgctcaaacctctggggaaatttttcctatggtagcatttgcagtttccactgcctggagggccaactgctaaatggtagcgctcagacagcatgtcaggaaaatggccactggagcactaccgtgcctacttgtcaagcaggaccattgaccatccaggaggccctcacttactttgggggtgctgtggcaagtaccatcggactcatcatgggtgggactctcctggcactcttgcgcaagcggtttagacagaaggatgacgggaagtgccctctgaatcctcatagtcatcttggcacttacggcgtctttaccaatgcagcgttcgacccgtccccttag

SEQ ID NO: 204469 - DNA, 1941 bp, synthetic construct
  misc_feature 1..1941: note = Description of Artificial Sequence: Synthetic coding sequence
  source 1..1941: mol_type = other DNA
tgagccaactgccagatcgccatcctgtaccagcggttccagcgggttgtatttggcatttctcaacttctctgcttcagtgcactcatctctgagctgacaaatcaaaaagaggtggcagcctggacctatcactacagcacaaaggcttattcgtggaacattagccgcaagtactgtcagaatagatacaccgacctggtggctatccaaaacaagaatgagatagactacctcaacaaagttctgccttattactcttcatactactggatcggtattcgtaagaacaacaagacatggacctgggtggggacaaagaaagctcttactaatgaagccgaaaattgggccgataacgaacccaataacaaaaggaataacgaggactgcgtggagatatacatcaagtccccatccgcacccggaaaatggaatgacgagcattgcttgaaaaagaagcatgcactctgttatacagcctcttgccaggatatgtcatgctctaagcagggagaatgtctggaaaccattggcaattacacgtgctcttgctacccagggttttatggtcccgaatgtgagtacgttcgagagtgcggcgagctggaattgccacagcacgtgctgatgaattgtagtcacccgctcgggaatttctccttcaacagccagtgttcgttccactgcactgatggatatcaggttaatggtccttccaaactggagtgccttgcctccggcatttggaccaacaagccacctcagtgcctggcagctcagtgcccaccacttaagatacctgagcggggaaatatgacgtgtctgcattctgctaaggcgtttcagcaccagagttcctgttcgtttagttgcgaagaggggttcgctttggtggggccggaagttgtacagtgcaccgcgagcggcgtctggaccgcacccgctcccgtttgtaaagccatctcctgcgaacctctggagagcccagtccatggatccatggactgttcaccatcactgagagcctttcagtacgacactaactgcagctttagatgtgctgagggatttatgctgagaggggctgacattgtgcgatgtgacaacctggggcaatggactgcccccgcgcccgtgtgtcaggccctccagtgtcaggacttgccagttccaaatgaggctcgtgtgaactgcagccacccatttggagcgtttcgctatcagtcagtctgttctttcacgtgcaatgaaggccttcttctggtgggggcttctgtgttacagtgcttagcaacaggcaattggaactctgtgcctcccgagtgccagggtaagagcatcgcctcactgccaacccccggggtgcagtgtcctgccctgaccacccccggccagggaaccatgtattgccggcatcatcctggaacctttggtttcaacaccacgtgttacttcggatgcaacgccggattcacacttataggagactccacattgagctgtcgaccctccggccaatggactgccgtgacccccgcatgtagggccgtcaagtgctccgaactccatgtcaataagccaattgcgatgaactgcagcaacttatgggggaacttttcttatgggtccatctgtagtttccattgcctcgagggccagttgctgaacggctctgctcagaccgcgtgtcaggaaaatggccactggtccactaccgtccccacttgtcaggccggccccctgaccattcaagaggctctgacatactttggcggcgccgtggcatcaacaatcggattgatcatgggcggtaccctcctggcgcttctgcgaaagcgctttcgccagaaagatgacggaaaatgtcctcttaacccccattcccaccttggaacgtatggcgtgttcacaaacgcggcctttgatccttccccttag

SEQ ID NO: 204470 - DNA, 2262 bp, synthetic construct
  misc_feature 1..2262: note = Description of Artificial Sequence: Synthetic coding sequence
  source 1..2262: mol_type = other DNA
gtggtgttcggcatcagccagctgctgtgcttcagcgccctgatctctgagctgaccaatcaaaaagaagtggcagcgtggacctaccactacagtaccaaagcctacagttggaatatctcacggaagtactgtcagaataggtatacggatctggtggctatacagaataaaaatgagatagattaccttaataaagtactgccatattactcctcttactattggattgggattagaaagaacaacaagacttggacttgggtgggcaccaaaaaagccctcacaaacgaagccgagaactgggccgacaatgaacccaataataagagaaataatgaagattgtgttgagatctatattaaaagcccctctgccccaggaaagtggaacgatgagcactgcttgaaaaaaaaacacgccttgtgttacaccgcgagttgtcaggatatgtcctgctctaagcagggcgaatgtctggagacgattggaaattacacgtgcagttgctatccaggcttctatggtcctgaatgcgaatacgtgcgagaatgtggcgaactggagcttcctcaacatgtcctgatgaactgttcgcaccctctcggcaacttttcctttaatagtcaatgctcctttcattgtactgatggatatcaagtcaatgggcccagcaagttggagtgcctggcttctggaatctggaccaacaaacccccccagtgtcttgccgcacagtgtccccctttaaaaatccctgaacggggcaacatgacatgtcttcatagtgctaaagcttttcagcaccagagcagctgttctttttcctgcgaagaagggttcgcccttgtcggtcctgaagttgtacagtgtactgctagcggagtctggacagctccagctccagtgtgtaaggccatctcatgtgagcctctggaaagccccgtgcatgggtccatggattgttcccctagcctccgagcattccaatatgacaccaactgctctttccggtgcgcagagggtttcatgctgcgtggggcagatatcgtacgatgtgataatctggggcagtggacggcccccgctccagtctgtcaggcacttcagtgtcaggatctccccgtcccaaatgaggcacgcgtcaattgcagtcatccatttggagcatttcggtatcagtccgtgtgttctttcacatgtaacgaaggcctcttacttgtcggtgcatccgtgctccagtgcctggcaacagggaattggaattctgtgcctccagagtgccaggccattccctgtaccccacttctaagcccccagaacggcacaatgacatgcgtgcagcccctgggctcaagtagttacaaatctacctgtcagtttatttgcgatgaaggatactctctctcaggcccggagagactggattgcacgcggtcaggtcgatggacggatagcccgcctatgtgcgaggctataaagtgcccagaactgtttgcacccgaacaagggagcttagactgctccgatacaaggggcgaatttaacgtcggctcgacttgccatttctcatgcgataacggctttaaactggagggcccgaataatgtggaatgcacaacctctggaagatggagcgctacaccccccacctgtaagggcattgctagtttgcccactccaggcgtgcagtgccccgcactgactactcctggacaggggactatgtattgccgccaccaccccgggaccttcggttttaatactacatgctacttcggatgcaacgctgggttcacactcatcggagacagcacgcttagctgccgcccttcaggacagtggaccgcagtgacaccagcttgccgtgctgtcaagtgcagcgaattgcacgtgaacaagcccatcgcaatgaattgctccaatctttggggcaatttctcttacggttcgatctgctctttccattgtctcgagggccaactcctcaacggcagcgcacaaaccgcttgtcaggaaaacggccactggagtactaccgtgcccacttgccaggcgggacccctcactatccaggaggcgctaacttattttggaggggccgttgcctccaccattgggctgattatggggggcacacttctcgccttactgcgcaaacgttttcgccagaaggacgatggcaagtgccccctgaaccctcacagccatttggggacttatggggtcttcacaaacgcagcgttcgacccaagcccctag

SEQ ID NO: 204471 - DNA, 2373 bp, synthetic construct
  misc_feature 1..2373: note = Description of Artificial Sequence: Synthetic coding sequence
  source 1..2373: mol_type = other DNA
atggccaactgccagatcgccatcctgtaccagcggttccagcgggtggtcttcgggatcagccagttgctctgtttttcagctctgattagcgaactgaccaaccaaaaagaggtagccgcctggacctaccattacagcacaaaagcatactcttggaatataagccgtaagtattgtcagaatcggtacactgacctcgtcgcgattcagaacaagaacgaaatcgactacttgaacaaggtgctcccctactactcgtcatactactggatcggcattaggaagaataacaagacttggacttgggtcggcaccaagaaggccctcacgaacgaagcagagaactgggccgataacgagcccaacaacaagaggaataacgaggactgtgtggagatatacattaagtcccctagcgcccccggcaagtggaatgatgagcactgtcttaaaaagaagcatgccctgtgttataccgctagctgtcaagacatgagctgctctaaacagggagagtgcctcgagaccattggtaattatacatgctcctgctatcctgggttctatgggccagaatgtgaatacgtgagggaatgtggcgaactcgaactgcctcagcacgttctgatgaactgctcgcatcctctggggaacttttcctttaatagccaatgttcatttcactgcacagatgggtatcaggtaaatgggcctagtaaattggaatgcctggcgtcaggtatttggacgaacaaaccacctcagtgtctggccgctcagtgtccacctcttaaaatccccgagaggggaaatatgacctgcctgcattctgccaaggcctttcagcaccagtcctcctgttccttctcttgcgaggaagggtttgcccttgttgggcccgaagtggtccagtgcaccgcgagtggggtgtggacagccccggccccagtctgtaaagctgtgcagtgtcagcatctggaagccccttcagaaggaacaatggactgtgtccatcctctgaccgctttcgcctacggctcctcctgcaagttcgagtgccagcccggataccgcgttcgggggctcgacatgctgcgatgcatcgattccggtcattggtccgcacccctgcccacttgtgaagccatctcatgcgagccacttgagtctcccgtccacggttcgatggattgctcaccctccctgcgggctttccagtatgacactaattgcagctttagatgcgcagaaggatttatgctacgcggagccgatattgtacggtgtgataatttaggacagtggactgcccctgcccccgtgtgccaagccctgcagtgtcaggatctaccagtgccaaatgaggcacgcgtaaattgttcccacccttttggggcctttcgttaccagtcagtgtgcagttttacttgtaacgaaggcctgcttctcgttggagcatccgtgctgcaatgcctggccaccggaaactggaattctgttcccccggagtgccaggccatcccatgcacccccctcctatccccgcagaacggaaccatgacttgcgtgcagcctctgggatctagttcgtataaaagtacatgtcagtttatttgtgatgagggatactctctcagtggccctgaacgactcgattgtaccagaagcgggagatggaccgactctccacccatgtgtgaggccatcaaatgtccagaactttttgcccccgaacaaggaagcctggattgtagtgacacacgcggcgagttcaatgtgggatccacgtgccacttctcctgtgacaacggtttcaaacttgagggtcccaacaacgtggagtgcactacttccgggcgctggtctgctaccccgcctacctgcaaagggatagctagtcttcctacaccgggggttcagtgcccagctttaactactccaggacaggggactatgtactgtcgtcatcaccccgggacattcgggttcaacactacctgttatttcggatgcaacgcaggctttacactcattggagacagcacactcagttgccggccgagcggccagtggaccgccgtgacgcccgcgtgcagagctgtcaagtgttctgagcttcacgtgaacaaaccaattgcaatgaactgctccaacctgtggggaaatttcagttatggatccatctgtagttttcattgcctggagggacaactgctgaacggaagtgcacagacagcctgtcaggagaacggccactggtcgactaccgtgcccacctgtcaagatgatggcaaatgcccactgaacccccactcacatttggggacttacggggttttcacaaacgccgcctttgaccctagcccctag

SEQ ID NO: 204472 - DNA, 450 bp, synthetic construct
  misc_feature 1..450: note = Description of Artificial Sequence: Synthetic coding sequence
  source 1..450: mol_type = other DNA
atgatgaccaagcacaagaagtgcttcatcatcgtgggcgtgctgatcactaccaatataataacgctaatcgtcaagctgacaagagattcccaatctctgtgcccctatgactggattggattccagaacaagtgttactacttttcgaaggaagaaggcgattggaactctagcaagtataattgctcaactcagcacgccgatctgacgatcattgacaatatcgaggagatgaacttcctccgtcgctacaagtgttcctcagaccattggattggactgaagatggcgaagaaccggactgggcagtgggtggacggtgctacattcaccaagagtttcgggatgcgcgggtctgaaggctgtgcctacctatccgacgacggggccgctactgccaggtgctacaccgagaggaagtggatctgccgtaaacggatacattag

SEQ ID NO: 204473 - DNA, 1209 bp, synthetic construct
  misc_feature 1..1209: note = Description of Artificial Sequence: Synthetic coding sequence
  source 1..1209: mol_type = other DNA
atgcccctgcagctgctgctgctgctgatcctgctgggccccggcaacagtttgcaattgtgggatacatgggctgacgaggctgaaaaggccctcgggcctctgctcgccagagatcgtcggcaggccacggagtacgaatatctggattatgactttctcccggaaactgagccaccggagatgctaaggaatagcaccgatacgacgcccttgaccggaccggggacccccgaatcgacgactgtggagcctgcagcccgccgctctacaggactggatgctggcggggcagtgaccgaactgacaactgaactcgcaaatatggggaaccttagtacagattctgctgccatggagatccagaccacacagcctgccgctaccgaggcgcagacgaccccgcttgcggccaccgaagcccaaaccacgagactgaccgccacggaagcccagactacaccactggctgccacagaggcgcagaccacacctcccgctgctactgaagcccagaccacacagccaacagggctcgaggcccagactacagctcctgccgctatggaagcccaaacgactgctcccgctgccatggaagcccaaacaacacctcctgccgctatggaagcacagaccacccaaacaacagcgatggaggcacaaaccaccgctcccgaggctaccgaagcccagacaacccagccaacagctactgaggctcagaccactccactggccgccatggaagcactgtccacagagccttccgcaaccgaggccctctccatggaacccaccacaaaaagggggctgtttattcctttttcagtgtcctccgtcacacataagggaatacccatggccgcgtccaacttgagcgtcaactaccccgtgggggccccggatcacatatccgttaagcagtgtctgctcgcaatcctcattttggctttagtcgcaacaatcttctttgtctgcacggtggtcctcgccgtgcgtctgagtcgcaagggacatatgtaccccgtgagaaattactctcccacagaaatggtgtgcatcagtagcctgttaccggatgggggggaaggtcccagcgccactgctaacggcggtctatcaaaggctaaatcccccggattgacacccgagccaagggaagatcgggaaggcgacgacctaacgctgcattcgtttttaccctag

SEQ ID NO: 204474 - DNA, 1239 bp, synthetic construct
  misc_feature 1..1239: note = Description of Artificial Sequence: Synthetic coding sequence
  source 1..1239: mol_type = other DNA
atgcccctgcagctgctgctgctgctgatcctgctgggccccggcaatagcctccagctctgggacacatgggcggatgaggccgaaaaagctcttggccccctcctagccagggatcggagacaggcaacagagtatgagtacttggattacgactttctgccagaaactgaacctccagaaatgctgaggaactccacagataccactcctctgacaggaccaggaactccggaatcaaccacagtagaacccgccgcacgaagatctaccgggcttgatgcagggggcgctgtgaccgagttgaccacagagctggcaaacatggggaatctctctacagacagtgcagccatggaaatccagactacccagccggctgccacagaggctcagactacgcagcctgtgccgacagaggcacagacaaccccgctggctgctactgaggcgcagaccacaagactgactgcgaccgaggcccagacaaccccactggcagcaaccgaagctcagaccaccccacctgctgccacagaagcacagactacacagcctaccggactcgaggcacagacaacggccccagccgcaatggaagcccagaccacagctccagcagcaatggaagcacagacaactccccctgctgcaatggaggcccagaccacacaaaccaccgccatggaagcgcagactacagcccccgaggccacggaagctcagacaacacagcccactgctaccgaagcacaaacaacccctcttgccgccatggaggccctgagcactgaaccctctgcaacagaagctctatccatggagcccaccaccaaaaggggcctctttatcccattcagcgtttcttcagtaacacataagggaataccaatggccgcctctaatctgtctgtgaactaccctgttggagcccctgaccacatttccgtcaagcaatgtctgttagcaatcctcatccttgctctcgttgccactatcttcttcgtgtgtacagtggtcctcgctgtgcggctgagtcggaaggggcacatgtaccctgtccggaactacagtcccactgagatggtgtgcatcagcagtctacttccagacggaggggaagggcccagtgccacagccaatggaggcctgtctaaggcaaaatcacccgggctgacacccgaaccaagggaggatcgggagggcgacgatttgactctgcattcatttttgccttag

SEQ ID NO: 204475 - DNA, 1419 bp, synthetic construct
  misc_feature 1..1419: note = Description of Artificial Sequence: Synthetic coding sequence
  source 1..1419: mol_type = other DNA
atggccaccaagtgcggcaactgcggccccggctacagcacccccctggaggccatgaaaggcccacgggaggaaattgtatatctgccctgcatctacagaaataccgggactgaagcccctgattacttggctactgtggacgtcgacccgaaatcccctcagtattgtcaggtcatacaccgcttgccaatgcctaatctgaaagatgagctgcaccacagcggttggaacacttgctcaagttgctttggcgatagcaccaagtcaaggaccaagctagtgctgccatctcttatctcctcccgtatatatgtcgtcgacgtggggtctgagcctcgggcccctaaattgcacaaggttattgagccaaaagacatccacgccaagtgtgagctggcatttctgcatacttcacattgcctggccagcggagaggtgatgatctcaagcctgggcgacgtaaagggaaacggtaagggtggatttgtgttgctagatggcgaaacttttgaagtgaaggggacttgggagaggccaggtggggcagctcctctggggtatgatttctggtaccagcctagacacaacgttatgatctccacagaatgggcagcgcccaacgtactgcgcgacgggttcaatcctgccgatgtcgaggccggactgtacggatcccacctgtatgtctgggactggcagcgccatgaaatcgtccaaacactaagcctgaaggacggccttatacctctggagatccgctttctccacaaccctgatgcagcacagggcttcgtaggttgtgcgttatcatctaccatccaacgcttttacaagaacgagggtggcacatggtcagtcgagaaagtgatccaagtgccaccgaaaaaggtgaaggggtggctcctccctgagatgcccggactcattactgatatcctactgtctctagacgacagattcctgtacttttcaaactggttacacggggaccttcgccagtacgacatctcagatccccaacgacctaggcttactggccagctgttcctgggcggtagcatcgtgaaggggggcccggtccaagttttagaggacgaagagttgaaaagtcagccggagcccttagtggttaaagggaaacgcgttgccggaggtcctcagatgatccaactgtcactggacggaaagagattgtatataaccactagtctttacagcgcctgggataagcagttttacccagatctaattcgcgaaggatcggtcatgctgcaggttgacgtggataccgtgaaggggggcctcaaactgaacccaaacttcctggtagatttcggcaaggagcccctgggaccagccctcgcccacgagctcagatacccaggcggagactgttcctctgacatctggatctag

SEQ ID NO: 204476 - DNA, 1227 bp, synthetic construct
  misc_feature 1..1227: note = Description of Artificial Sequence: Synthetic coding sequence
  source 1..1227: mol_type = other DNA
atgcccaacctgaaggacgagctgcaccacagcggctggaacacctgttcttcctgcttcggggatagcactaagtcaagaacgaaactcgtgcttccaagcctgatctccagtagaatttacgtggtagatgtgggatcagagccaagggctccgaaactccacaaggtcatcgaaccaaaagatatccatgccaagtgcgagctggcgtttctgcacacgtctcactgtctggctagtggggaagtcatgattagcagcttgggagatgtaaaaggcaatggcaaaggcggattcgttctcttggacggggagacctttgaagtgaagggaacttgggaaaggcctggcggagccgcacctctggggtacgacttctggtatcagccacgccacaacgtcatgatcagcactgagtgggcggcaccaaatgtacttcgcgacgggtttaatcccgcagatgtggaagccggactctacggatcacacttgtatgtgtgggactggcagagacacgaaattgttcagacgttatcattaaaggatggactgattcccctggagatccggttcctccataatcccgatgctgctcagggctttgttgggtgtgccctgtcctccacgatccagcgtttttacaagaatgaggggggtacttggtccgttgagaaggtcatccaagttcccccaaaaaaagtgaaaggctggctcctccccgaaatgcccggcctgatcactgatattctgctgtcactggatgaccggttcttatatttctcaaactggctccacggcgacctcagacagtatgacatcagcgatccccaaagacccagactcactggtcagctctttctgggcggtagcatcgtcaaaggaggaccagtgcaggtgctggaggatgaagagttgaaatctcagccagaaccacttgtagttaaaggtaagagggtggctggaggaccccagatgatacagctctccctcgatggcaagaggctctacatcaccacatccctttactctgcttgggataaacagttctatccagacctgattcgggaggggtcagttatgctccaggtcgacgttgataccgtaaaaggcggtcttaagcttaatccgaactttctggtcgattttggcaaagagccgttgggaccagcattggctcatgagctgagataccccggtggagattgctcttctgatatttggatctag

SEQ ID NO: 204477 - DNA, 1233 bp, synthetic construct
  misc_feature 1..1233: note = Description of Artificial Sequence: Synthetic coding sequence
  source 1..1233: mol_type = other DNA
atggccaccaagtgcggcaactgcggccccggctacagcacccccctggaagccatgaaagggcccagagaggaaatcgtctatctcccgtgcatttacaggaacactggcacggaggcaccggattatctcgctaccgttgatgtggaccccaagagcccgcagtattgtcaggtgatcgagcccaaagacatccacgccaaatgcgaactggccttccttcacacatcccattgcttggccagcggggaggtcatgatcagtagtctgggcgacgtcaaaggaaacgggaagggggggttcgtgctgttggatggagaaaccttcgaagttaagggcacatgggagagaccaggcggcgctgccccactcggatatgacttttggtaccaacctcgacataacgttatgatatcaacagagtgggcggctcccaatgtgctgcgagacggcttcaatcctgccgacgtggaagccggactgtacgggtcgcacctctacgtgtgggactggcaaaggcacgaaatcgttcagacattgagcctgaaagacgggcttatcccgctagagatcaggttcctgcacaaccctgacgctgctcagggctttgtgggttgcgctctatcaagcactatccaaagattctacaagaacgaggggggtacatggtccgttgaaaaggttatccaggttccacctaagaaagttaaggggtggctgttaccagaaatgccaggcttgatcactgacatactgctgtcactggatgatcgtttcctgtacttctctaattggttacacggcgatctgaggcaatacgatattagtgatcctcagcgcccgcggttaaccggccaactgttcctgggaggttctattgtgaaaggggggcccgtgcaggtactggaagacgaagaactgaaatcacagccagagcccctcgttgtcaagggcaagcgggtggccggaggcccgcagatgattcagttatcactggacggtaaacgtctttatattaccacaagcttgtactccgcttgggacaagcaattttaccctgacctgatcagagagggatctgttatgctgcaggtcgacgtggatactgttaagggagggttgaaactcaacccaaatttcctggtggactttgggaaagagccattggggcccgctctggcccatgaactgaggtaccctggaggcgattgctcgagcgacatttggatctag

SEQ ID NO: 204478 - DNA, 1362 bp, synthetic construct
  misc_feature 1..1362: note = Description of Artificial Sequence: Synthetic coding sequence
  source 1..1362: mol_type = other DNA
atgcccggcagcagcggcgccggcatggaggccgccgtggcccccgggagagatgcaccagcccctgcggcctctcaaccttcaggatgcgggaagcacaatagcccagagcgtaaggtgtacatggactacaatgccacgacccctttggaaccagaggtgatccaagccatgacaaaggctatgtgggaggcctgggggaatccttcttccccttattcagcaggaaggaaggcaaaagatattatcaacgcagccagggagagcttagctaagatgatcggcggaaaaccccaagatattatctttactagtggtggaaccgagtctaataacctggtgatccactcagtggttaaacactttcatgccaatcagacatcaaaagggcacactggagggcaccattctccagtgaagggggcaaaaccacactttatcaccagctccgttgaacacgactcgattagattgccgctggagcacctggtcgaggagcaagtagctgctgttacattcgtgccagtgtctaaggtgagcgggcaagcagaggttgatgatattctagctgctgtgaggcccactacaaggttggtcaccattatgctcgctaataatgagactgggattgtgatgcctgtgccggagattagtcagagaattaaggcccttaatcaggagagggtggctgctgggcttccacccatcctggttcacactgacgccgcccaggctctgggcaagcagcgggtggacgtagaggacctgggggtggactttctcactatcgttggccataaattctacggcccccgcattggcgcgctgtacatccgcggattgggagaattcacacccctttaccctatgttatttggaggcggccaagagaggaattttcgtcctggtaccgaaaacacgccaatgatcgctggcctcggaaaagccgctgaactggtcactcagaactgtgaagcttacgaagcacacatgcgagacgtgcgcgactaccttgaggaaaggctggaggctgagtttggacaaaaacgcatccatctcaacagtcagttccccggtacgcagaggctgccgaatacatgtaatttcagcataagaggcccaaggctgcagggacatgtggtccttgcccaatgtcgggttctgatggcttcggtgggggcagcttgtcatagcgatcacggagaccagccctccccagttttgctctcctatggagtgccatttgacgtcgcacgaaatgcccttagactgtcggtggggagatcaaccacgagggccgaagttgacctcgtggtacaggacctaaagcaggcagttgcccagttggaggatcaagcatag

SEQ ID NO: 204479 - DNA, 708 bp, synthetic construct
  misc_feature 1..708: note = Description of Artificial Sequence: Synthetic coding sequence
  source 1..708: mol_type = other DNA
ttcagcaaccccttctgcggcgagaccttcccccggaagcccgacctgaagggaacacatagatgggcacctcaaccttccgaaggagggcaggccccctttcattattttttgggaggaacacggctgcaccccgccgctccaggagcaccaggagggcgaacttccggctccctcctaaacgtgaaaatgatgaagatgaaaacctttatgatgatttgcttccatctgatcaacactgtcactttcgtgccggtgtccaaagtgtccggacaagccgaggtggacgatatccttgcggctgtcagacctaccacacgtctggtcacgatcatgctggcaaataacgagactgggattgttatgccagttcccgaaatctcacagcgtatcaaggccttaaaccaggagcgtgttgctgctggcctgcccccaatcctggttcatactgacgccgctcaagctctgggcaagcagcgggtggatgtggaagacctgggcgtcgactttttgacgatcgtggggcataaattttacggcccaaggatcggcgcactttatatcagggggttaggagaattcacccccctgtaccccatgctgtttggaggggggcaggagcgcaattttcggcctggaacggagaacacacctatgatcgccggacttggaaaggtcagtccaggtgaattggaggagatgtcatag

SEQ ID NO: 204480 - DNA, 954 bp, synthetic construct
  misc_feature 1..954: note = Description of Artificial Sequence: Synthetic coding sequence
  source 1..954: mol_type = other DNA
atggaggccgccgtggcccccggccgggacgcccccgcccccgccgcatcacagccgtcaggttgcggtaaacacaactcgcctgaacggaaggtatatatggactataatgccaccacaccactcgagccagaagtgatccaagccatgacgaaggcaatgtgggaagcgtggggaaatccaagtagcccatactctgctgggcgcaaggctaaggatatcattaatgcggctcgggagtcgctggcaaagatgattggcggcaaaccacaggacattatctttaccagtgggggcaccgagtcgaataacctggtcattcacagcgtggtgaagcactttcatgccaaccaaaccagcaaggggcatacaggaggccatcactctcctgtgaagggcgccaaacctcactttatcacatcttctgttgagcacgattcaatcagattgcccctcgagcacctggtagaagaacaggtcgccgctgtcacattcgtgcccgtgtccaaggtaagcggacaagccgaagttgatgatatcctggcagcagtacgaccgacgactcggctcgttaccataatgcttgcgaataacgaaaccggcattgtgatgcctgtgcctgaaatcagtcaaagaatcaaagctctcaaccaggagcgcgtcgctgccggcctccctcccattctggtgcataccgacgccgcacaggctcttggtaagcagcgcgttgatgtcgaggacttgggcgttgactttctgacgattgtgggccataaattttacgggccccgtattggcgccctttacattcgcggcttgggagagttcactcctttgtatccaatgttgttcggcggtggccaggagcgcaacttccgtcccggaacagaaaacacgcccatgatagcaggcctgggcaaggtgtcccccggggagttggaggaaatgagctag

SEQ ID NO: 204481 - DNA, 1056 bp, synthetic construct
  misc_feature 1..1056: note = Description of Artificial Sequence: Synthetic coding sequence
  source 1..1056: mol_type = other DNA
atggaggccgccgtggcccccggccgggacgcccccgcccccgccgcttcacaaccgtccgggtgcggcaagcacaatagcccagagcgaaaggtttacatggactacaatgctacgacccctctggaaccagaggtgatacaggccatgactaaggcgatgtgggaagcctggggcaatccgtcttcaccctattccgcggcagtaacatttgtcccagtgtccaaggtctcaggccaagccgaggtggatgatatccttgccgcagttaggcccaccaccaggctggtcacaattatgctggcaaataatgagaccggtatagtgatgccagtacccgaaatctcacagaggattaaggccctgaatcaagagcgagtggccgccgggctgccacctatactggttcatacagatgccgcacaggcccttgggaaacagcgcgtcgacgtggaggatctgggggtggactttctgactatcgtgggccataagttttatggccctagaatcggcgccttgtacattagggggctgggcgagtttacacccctatatcctatgctgtttggtggcgggcaggagcggaatttcagaccgggcactgagaacacgcccatgatagctggactcggaaaggcggctgagcttgttacccagaactgtgaagcttatgaagctcatatgagagacgtgcgagactacttggaagaaagactggaggccgagttcggccagaagcgcattcacttgaatagccaattccctggcacccagaggttgcctaatacgtgcaatttcagcattcggggcccccgtcttcagggacacgttgtgctagcacagtgccgcgtgctgatggcatctgtcggggcagcatgccattccgaccatggggaccagccttctcctgtgctgctgagctatggcgtgcccttcgacgtcgcacgcaatgctcttagactctctgtaggtcgctcgaccacgcgggctgaggtcgatctggttgtccaggacctgaaacaggccgtggcacagctcgaggaccaggcctag

SEQ ID NO: 204482 - DNA, 720 bp, synthetic construct
  misc_feature 1..720: note = Description of Artificial Sequence: Synthetic coding sequence
  source 1..720: mol_type = other DNA
atggaggccgccgtggcccccggccgggacgcccccgcccccgccgctagtcagcccagcgggtgcggaaagcataattctccagagagaaaggtgtatatggattataatgcaacaacccccctggagccagaagtcatacaagccatgaccaaagcaatgtgggaagcttggggaaatccttcctcaccctacagcgccggcaggaaggcaaaagacatcattaacgctgcacgggagtcactggccaagatgatcgggggcaaacctcaggacattatcttcacctccgggggaacggaagctgctgagctggttacacaaaactgcgaggcctacgaggcccatatgagggatgtccgagattatctggaggagcgcttggaagccgaattcgggcagaagcgcattcacttaaacagtcagttcccagggacccagagactcccaaacacatgtaacttttctataagaggacctaggttgcaggggcatgtggtactagcccagtgtcgcgtgcttatggcctcagttggcgcagcgtgtcacagtgaccatggagaccaaccctcgccagtgttgctatcctatggcgtccccttcgatgtggcccgaaatgcgctgcgactgtccgtcgggcggtctaccacccgtgccgaggtggacctggtcgtccaggacctcaagcaggcggtggcccagctagaagatcaggcctag

SEQ ID NO: 204483 - DNA, 1338 bp, synthetic construct
  misc_feature 1..1338: note = Description of Artificial Sequence: Synthetic coding sequence
  source 1..1338: mol_type = other DNA
atggaggccgccgtggcccccggccgggacgcccccgcccccgccgccagtcagcctagtggctgcgggaaacacaacagtcccgaaaggaaggtgtacatggactacaacgctaccacgccactggagccagaagtgattcaggccatgaccaaggccatgtgggaagcatggggaaacccctcctctccatacagtgcggggcgtaaggctaaagacatcatcaatgctgcccgcgagtcccttgcaaagatgattggcggcaagccacaggacataattttcacgtcaggaggcaccgagtcaaataatctcgtcatccattctgtcgttaagcactttcacgctaatcagactagtaaaggacacacaggtggccaccactcaccagtgaaaggagccaaaccacactttatcacgtcttcagtggaacatgatagtataagactgcccctcgagcacttagtggaggagcaggtggctgccgtgacttttgtccctgtttctaaggtgagtgggcaggccgaggttgacgacatccttgccgcagtgcgtccaaccacccgactggtgacaatcatgttagcaaacaacgagactggtatagtaatgcctgtgcccgaaatctcccagcgcatcaaggccctgaaccaagaaagagtcgcggctggacttccacccattctagtgcacacagatgccgcccaggcgttaggaaagcagagagtggacgttgaggacctgggagtggatttcttaactattgtgggtcacaagttctatggcccacgcatcggcgcactttacattcggggcctgggagagtttacccctttgtaccctatgttgttcggcggcgggcaggaacgcaattttcgacccggtaccgaaaatactccaatgatagccggcctgggcaaggctgccgaactcgttacacagaactgtgaagcctatgaggctcacatgcgggatgtaagggactaccttgaggagcgtctggaggctgaatttgggcagaaaaggattcatctaaattcacagttccccggaactcagcgactgcccaacacatgcaatttttctatacgaggccccagactgcaaggccacgtcgtcttggcacagtgccgcgtcctgatggcaagcgtgggagccgcatgtcatagtgatcacggcgaccaacccagccccgtcttactgtcatatggagtgcctttcgacgtagcgcggaatgccttaaggctcagcgttggacgtagcaccacccgtgccgaagtggatttagtggtgcaggacctaaaacaggccgtcgcgcagctggaggaccaggcttag

SEQ ID NO: 204484 - DNA, 966 bp, synthetic construct
  misc_feature 1..966: note = Description of Artificial Sequence: Synthetic coding sequence
  source 1..966: mol_type = other DNA
atgagcacccgggagagcttcaaccccgagagctacgagctggacaaaagcttccgcctcacaaggttcacggagctgaaaggaaccgggtgcaaggttccccaggacgtgctccagaaactgctggagagtttacaggagaatcacttccaggaagacgaacagttcctgggggcagttatgcctaggttggggattggaatggacacatgtgttatccccctgagacacggcgggctgtcattggtgcaaacgacagattacatttacccaatcgtggatgatccctacatgatgggacgtatcgcttgcgccaacgtcctttcagatctgtacgctatgggcgtgactgaatgcgataacatgctaatgctgctgggggtgtccaacaagatgacagaccgcgagcgggataaagtaatgccgttgattatccagggcttcaaggacgccgctgaagaagccgggacaagcgtgaccggcggccaaactgtgttaaatccatggattgtattgggcggcgtcgctacaactgtgtgtcaacccaacgagttcatcatgcctgacaacgccgtcccgggtgacgtccttgttctgacaaaaccattgggcacacaggtggcagtggccgtacatcagtggctagatatcccagagaagtggaataaaatcaagctcgtggtcacacaggaggatgtcgagttggcctatcaagaggctatgatgaacatggcacgcctgaaccgaaccggaggtctgcttatttgcttacctcgggaacaggctgcacgcttttgtgcggagatcaaaagtccaaagtacggagagggccatcaggcatggataattgggatagtagaaaagggaaataggacggcacgcatcatagacaagccaaggatcattgaggtggcgccacaggttgctacgcagaatgtgaatcctacacccggagctactagctag

SEQ ID NO: 204485 - DNA, 1179 bp, synthetic construct
  misc_feature 1..1179: note = Description of Artificial Sequence: Synthetic coding sequence
  source 1..1179: mol_type = other DNA
atgagcacccgggagagcttcaaccccgagagctacgagctggacaagtctttcagactgaccagattcactgaactgaagggaaccggatgcaaggtgccccaagacgtgttgcagaaacttctggaatcactccaggagaaccatttccaggaggacgaacaattccttggcgccgttatgcctagacttgggatcggaatggacacatgtgtgatacctctgcggcatggagggcttagcttggtccagactactgactacatctatccaatagtggatgatccctacatgatggggaggattgcgtgtgcaaacgtcttgagtgatctgtatgccatgggggtgactgagtgtgacaatatgctgatgctgcttggcgtctctaacaagatgacggatagagaacgggataaggtcatgcccctgatcatacagggctttaaagacgccgccgaagaggctggaacctccgttaccgggggacagactgtcttgaacccctggatcgtcttgggcggagtggctactaccgtgtgccagccaaacgaatttatcatgcctgacaacgctgtgccaggcgacgtgctggtgctcaccaaacctttgggtacccaggtggccgtagccgttcaccaatggcttgacattcccgaaaagtggaacaaaattaagctggttgtaacccaagaggacgttgaactggcctatcaagaggccatgatgaacatggcccgactgaaccgaacagctgcggggcttatgcacacattcaatgcacacgctgccactgacatcaccggcttcggtatactgggccacgcacagaacctggccaaacagcagcgaaatgaggtaagctttgtaattcacaatctcccagtgctcgctaagatggctgcagtaagtaaggcatgcggtaacatgttcggcttaatgcatgggacttgccctgaaaccagtggaggtctgcttatctgtcttcctagagaacaagctgctaggttctgcgctgagatcaagagccctaaatatggcgaaggccatcaggcctggatcatcggcatcgtcgagaaaggtaatcgaacggccaggatcatagataaacctcgtattatagaggtagcgccccaggtcgctacccagaatgttaatcccacaccgggtgccaccagctag

SEQ ID NO: 204486 - DNA, 966 bp, synthetic construct
  misc_feature 1..966: note = Description of Artificial Sequence: Synthetic coding sequence
  source 1..966: mol_type = other DNA
atgagcacccgggagagcttcaaccccgagagctacgagctggacaagtccttcagactgacgaggttcaccgagctcaagggcaccgggtgcaaagtgccacaggacgtgctgcaaaagctgctcgagtctctgcaggagaaccactttcaggaggacgagcagtttcttggcgcagtgatgcccagactagggataggcatggacacttgcgtaatccccctgcggcacggggggctatcactagtacaaacaacagattacatctacccaattgtggatgacccctatatgatggggaggatagcctgcgcaaatgtgttgtcagacttatatgcaatgggtgtgaccgagtgtgacaacatgctcatgctccttggggtttccaataagatgacagatcgggagcgagacaaagtgatgcccctaattattcaggggtttaaagacgcagctgaagaagctggcacaagcgtgaccgggggacagacggttttaaacccctggattgtgctcggcggcgtagccaccactgtgtgtcaacctaatgaattcatcatgccggacaatgccgtgcctggcgacgtactggtgctcactaaacccctagggacgcaggtggccgtggcagtgcatcagtggctggatatcccagaaaaatggaataagatcaagctagtggtgacccaggaagatgtagaattagcatatcaagaggcaatgatgaatatggcaagacttaatagaaccggaggtctcctaatatgtctgccacgagaacaggccgccagattttgtgcggagattaaaagtcccaagtacggcgaaggacaccaagcttggatcattggaattgtggaaaaaggaaacaggacggctcggattatcgacaagccaagaatcatcgaggtggctccacaagtggccacccagaacgtgaacccaacacctggcgcgacatcttag

SEQ ID NO: 204487 - DNA, 501 bp, synthetic construct
  misc_feature 1..501: note = Description of Artificial Sequence: Synthetic coding sequence
  source 1..501: mol_type = other DNA
atgagcacccgggagagcttcaaccccgagagctacgagctggacaagtctttccggttgactcgattcacggagctgaaggggaccggctgtaaggtcccccaagacgtgctgcagaaactgctcgaaagcttacaggaaaaccattttcaggaggacgaacagttcctgggggctgtcatgcctcggctgggcataggcatggacacttgcgtaatcccattgagacacggtggcctgtcactagtgcaaacaaccgactatatttaccctattgtggatgacccttacatgatggggagaattgcgtgcgctaatgtactgtccgatctttatgctatgggggttacggaatgcgataatatgctgatgcttctgggcgtatccaacaagatgactgacagagagagagacaaggtgatgccactgattatccagggatttaaagacgcagccgaggaggccggtacaagcgtcactggcggccagaccgtactatag

SEQ ID NO: 204488 - DNA, 279 bp, synthetic construct
  misc_feature 1..279: note = Description of Artificial Sequence: Synthetic coding sequence
  source 1..279: mol_type = other DNA
atggacacctgcgtgatccccctgcggcacggcggcctgagcctggttcagaccacagattatatttaccccatagtcgacgacccatacatgatgggacgaattgcttgcgccaatgtcctgagcgatctgtatgccatgggagtgactgagtgtgacaacatgctgatgctcttgggcgtgtctaacaaaatgactgacagggaaagagataaggtaatgccccttatcatccagggattcaaagatgcagctgaggaggccggtactagcgtgtag

SEQ ID NO: 204489 - DNA, 978 bp, synthetic construct
  misc_feature 1..978: note = Description of Artificial Sequence: Synthetic coding sequence
  source 1..978: mol_type = other DNA
atggacacctgcgtgatccccctgcggcacggcggcctgagcctggttcaaaccacagattacatatacccaatcgtggacgatccatatatgatgggaagaattgcttgtgctaacgtcttgtcagatctgtatgccatgggggtcacggagtgtgataacatgctgatgctcctcggtgtgtctaacaaaatgacggacagggagcgagacaaggtcatgcccttgattatccagggcttcaaagacgccgcagaagaagccgggacttccgtgaccggaggccagactgtcctgaacccctggatcgtattaggcggggtggccaccacggtgtgtcagccaaatgaattcatcatgccggataacgccgtccccggagatgttcttgtgcttaccaaaccgcttggcacacaggtggctgtagccgtccaccaatggctggacatccctgaaaagtggaacaagattaagttggttgtcacccaggaggatgtggagttagcataccaggaggccatgatgaatatggcacgtttgaacagaaccgctgccggtctgatgcacacttttaacgctcacgcagccactgatatcactggatttggcatccttgggcatgcacagaacctcgccaagcaacagagaaacgaggttagttttgtcatccataacttacccgttctggctaagatggccgctgtttctaaagcttgcggcaatatgttcggactgatgcatggcacctgcccggagacctccggtggcctgctaatctgcttgccgcgggaacaggctgcgcgtttctgcgccgagattaaatcccccaagtatggagagggacaccaagcttggatcattggcatagtggagaagggtaataggacagccaggatcattgataaaccacggattatcgaggtagcaccccaagtcgcaacacagaatgtgaaccccactcctggagcaacatcctag

SEQ ID NO: 204490 - DNA, 975 bp, synthetic construct
  misc_feature 1..975: note = Description of Artificial Sequence: Synthetic coding sequence
  source 1..975: mol_type = other DNA
atgagcacccgggagagcttcaaccccgagagctacgagctggacaagagttttcggctgacacgcttcacggagctgaaaggcactggttgcaaagtgccacaggacgtactccagaagctcctggagtcactacaagaaaaccacttccaggaggatgaacagttcctgggcgcggtgatgcccagattagggatcgggatggatacgtgcgtcataccactgagacatggcggactcagccttgtgcaaacaacagactatatctaccctattgtggatgacccctacatgatggggcgaatcgcttgcgccaatgtgctgtcggacctgtatgccatgggggttaccgagtgtgataatatgctgatgctgctgggcgtgtcaaacaagatgaccgatcgcgaacgcgataaggtaatgcctttaattatacagggcttcaaggacgcagccgaggaggctgggacgagtgttactggagggcagacggtgcttaatccttggatcgtcctgggaggagtggccacaaccgtgtgtcagcctaatgaattcatcatgcctgacaacgcagtgcctggggatgtactggtgctgacaaagcctctcgggacacaggtggctgtggcggttcatcagtggttagacatacccgaaaaatggaataaaatcaagctggttgttacgcaagaagatgttgagctcgcatatcaggaagcaatgatgaacatggcccgcctgaatagaactgctgctgggctaatgcacaccttcaacgcccatgcagccacagatatcaccggattcggaatactgggacacgcccagaatctagccaagcagcaaagaaacgaagtttcattcgtgattcataatctccccgtccttgcgaaaatggccgcagtttcaaaggcttgcggtaacatgttcggattgatgcacggaacctgcccggagacgtccgacgtccaatag

SEQ ID NO: 204491 - DNA, 1200 bp, synthetic construct
  misc_feature 1..1200: note = Description of Artificial Sequence: Synthetic coding sequence
  source 1..1200: mol_type = other DNA
atggccgaggccagcgccaccggcgcctgcggcgaggccatggccgccgctgagggaagtagtggcccagccggccttacgctgggaaggctgaccggattctctggtatgaaaggactggtgggtgggcaggaggaggcaagtcaagaggcaggattaccagcaggcgcaggtccttcccccaccttcccagctttggggatcggcatggactcctgcgtgattccacttagacatgggggattgtcactcgtgcagacgacggactttttctacccactcgtggaagacccttacatgatggggagaatcgcatgcgcaaatgtgctctctgatctgtacgctatggggatcaccgagtgtgacaacatgcttatgctactgtctgtaagtcagagcatgtcagaggaagagcgagagaaggtgacaccattgatggtgaaggggtttagggacgctgcagaggaaggtggtacggcagtcaccggagggcagactgtggtcaatccctggattatcatcggaggagtagccactgtcgtctgtcagcctaatgaatttatcatgccagactccgctgtggtcggggatgttctggtgctgaccaaacctctcgggacccaggtcgctgtaaacgcacaccagtggctggacaatccagagcgatggaataaggtgaagatggtagtgagcagggaggaggtggaactcgcttaccaggaggctatgtttaacatggcaaccctgaacaggaccgcagccggactcatgcacacctttaatgcccacgctgcaactgacatcaccggtttcggcatccttggccattctcaaaatcttgcaaaacagcaaaggaacgaggtgtcgtttgtgattcacaacctgccaatcatcgccaaaatggcggccgtgagcaaagcttctggtcggttcgggcttctacagggcacaagtgccgagacctccggagggctgctcatttgtctgccgcgagagcaagcggccagattctgtagcgagatcaagtcatccaagtacggtgaaggccaccaggcgtggatagtcggcatcgtggaaaaggggaaccggacagctcgcataatcgataaacccagagttatcgaagtgttacctcggggggccacagcagccgtcctcgctccggactcgtcgaatgcatctagtgagccttctagttag

SEQ ID NO: 204492 - DNA, 1452 bp, synthetic construct
  misc_feature 1..1452: note = Description of Artificial Sequence: Synthetic coding sequence
  source 1..1452: mol_type = other DNA
  misc_feature 1..177: note = DNA
  misc_feature 178: note = RNA
  misc_feature 179..1344: note = DNA
  misc_feature 1345: note = RNA
  misc_feature 1346..1452: note = DNA
atggccgaggccagcgccaccggcgcctgcggcgaggccatggccgccgcggaaggcagtagtgggcccgcagggctgactctcggcaggagtttctccaattaccggccatttgaaccacaggcattgggcctttcacccagttggcgtctgaccgggtttagcggcatgaaaggttgagggtgcaaggtgcctcaggaagccctgctcaagttactagccgggctgacaaggcccgacgtcaggccgccgctgggcaggggattagtcggcggtcaggaggaagcctctcaagaagcaggactgcccgccggggccgggcctagccctacattccctgcgttaggcatcgggatggattcatgtgtgatccctttgcggcatggcgggctctccttagttcagacaaccgatttcttttatcccctggtagaggacccatacatgatggggcgcattgcctgcgctaatgtactgtccgacctgtacgccatgggcattaccgagtgtgacaatatgctcatgctgttgtcagtgtcgcaaagcatgagcgaagaggaacgtgagaaagtgaccccactaatggtaaaaggctttagagatgcagctgaggaggggggaaccgccgtcacaggggggcagaccgtagtgaacccatggataatcatcggtggggtggccacagtggtatgccagcctaatgagttcattatgccagatagcgcagtggtcggagacgtcctggtcctcacaaagcctttaggaacccaagtggcggtaaacgcccaccaatggctggacaacccagagcgatggaacaaagtgaaaatggtggtctcacgggaggaggtggagttggcctaccaagaagccatgttcaacatggccacactcaaccgaactgctgccggactgatgcacacctttaacgcgcacgccgccaccgacattacagggttcggaatcctagggcattcacaaaacttggctaagcagcagagaaacgaggtgtctttcgtgatccacaacctgccaatcatagcgaaaatggcagccgttagtaaggctagcgggagattcggcctgctccaaggcactagcgcggagacttcaggcggcttgcttatctgtctcccccgcgaacaggccgccaggttctgctcggagatcaaatcatcaaagtatggagagggtcatcaggcatggatcgtggggatcgtggagaaaggaaaccggaccgctaggattatcgataaaccccgcgtgattgaagtacttcctcgaggagccacagcagccgttctggccccagactcgtccaatgcctcatcagaaccttcctcatgagatgagcgtaccgaggtggtctggacacttgaacctctgtcgacaatcactgatggctcccaagagcttattgtaaggaatttccagagaagactacccgcttag

SEQ ID NO: 204493 - DNA, 1347 bp, synthetic construct
  misc_feature 1..1347: note = Description of Artificial Sequence: Synthetic coding sequence
  source 1..1347: mol_type = other DNA
  misc_feature 1..177: note = DNA
  misc_feature 178: note = RNA
  misc_feature 179..1347: note = DNA
atggccgaggccagcgccaccggcgcctgcggcgaggccatggccgccgctgaagggagttctggtcctgccggtctgacactgggcaggagcttttcaaactacaggccttttgaaccacaggcattaggactgagcccttcatggcgtctcactggttttagcggcatgaaaggttgagggtgcaaggtgcctcaggaggctctcctgaagctgcttgccggtttgactagaccagacgtacgcccgcccctaggacgcggtctggtgggaggtcaggaggaggctagtcaggaggctggcctccccgccggcgcgggtccttcacctaccttccctgctctcgggatcggcatggattcttgtgtgattccactgcggcacggtggcttatccctagtccagacaacagatttcttctacccgcttgtggaagatccctatatgatggggaggatcgcttgcgccaacgtgctaagcgacttatacgctatgggtatcaccgagtgcgataatatgctgatgcttttgtccgtctctcagagtatgtccgaagaagaacgcgaaaaggtgactcccttgatggtgaagggttttagggatgctgccgaagagggtggcaccgctgtgacaggcggccagacagttgtgaatccatggatcatcattggtggggttgcaacagtggtgtgccagcctaatgaattcattatgccagatagcgcggtcgtgggcgatgtgctggtgctcactaaacctctcggcacacaggtggccgtgaatgcacaccagtggttggacaaccctgagcgctggaacaaagtcaagatggttgtgagtcgggaagaggtggaactggcttatcaggaagccatgttcaacatggccacgctgaacagaactgctgctggcctcatgcacactttcaatgctcacgctgccacagatatcaccggattcgggatccttggtcattcacaaaaccttgcaaagcagcagcggaacgaagtgagctttgtgatccataatctacccatcattgcaaaaatggcagccgtcagcaaagcctccggccgcttcgggttattgcagggcacgtccgcagaaacctcggggggactcctgatttgtctgccacgcgagcaggcagccaggttctgtagtgaaattaagagtagtaaatatggcgagggccaccaggcttggatcgtgggaattgtggagaaggggaaccgcactgcccgcattattgacaaaccacgggtgatcgaagtattgcctagaggagcaactgccgccgtgctcgctcctgactcatccaacgccagttccgagccgtccagttag

SEQ ID NO: 204494 - DNA, 1176 bp, synthetic construct
  misc_feature 1..1176: note = Description of Artificial Sequence: Synthetic coding sequence
  source 1..1176: mol_type = other DNA
atggccgaggccagcgccaccggcgcctgcggcgaggccatggccgctgcggaaggcagttctggacctgccgggctgacacttgggcggtccttcagcaactacaggccgttcgagcctcaagaagccggcttaccagcaggggcggggccctcccctacttttcctgccctcggtatcggaatggacagctgtgttattcccctgcggcatggtggcctaagcctggttcaaaccacagactttttctatcccttggtagaggatccctatatgatgggtagaatcgcctgcgccaacgtgctatcagacctgtacgccatggggatcaccgagtgtgataatatgcttatgctgctgtcggtttcccagtcaatgagcgaggaagagcgtgagaaggtgacgccgctgatggtgaaaggctttagagatgccgcagaggagggtggcaccgcagtgacaggaggccagactgtggtgaacccttggatcattatcggcggcgttgcaacagtggtatgccagcccaatgagtttattatgcccgattcagccgtagttggggacgtgctggtgctgaccaaacccctgggcactcaggtggcagttaatgcacaccagtggttagacaatccggaaagatggaacaaggttaagatggtcgtgagtcgggaggaagtcgagctggcctaccaggaagcaatgtttaatatggccacactgaaccggactgctgctgggctgatgcacaccttcaatgctcacgctgcaaccgatattacagggtttggtatcctcgggcatagccaaaaccttgcaaaacagcagaggaacgaggttagttttgtgatccacaatctccctataatcgctaaaatggctgccgtgagcaaagcatccggtagattcggcttgctgcagggcacttctgctgaaactagcggcggcttgctcatctgtcttccacgcgagcaggctgcacggttctgttccgagatcaagagtagtaagtacggagagggccatcaggcctggatcgttggcatcgttgagaaagggaataggaccgcccgcattattgacaaacctcgcgtaattgaggtgttgccaagaggtgctaccgctgccgtccttgcgcccgattccagcaatgcctcttcggagccctcgagctag

SEQ ID NO: 204495 - DNA, 1671 bp, synthetic construct
  misc_feature 1..1671: note = Description of Artificial Sequence: Synthetic coding sequence
  source 1..1671: mol_type = other DNA
atgggccgggcccggcccggccagcggggcccccccagccccggccccgccgcccagccacccgcacccccccgcagaagagcgcgcagtctcgctttgctaggcgcacttctcgccgccgcagccgccgccgccgtgagggtctgtgcgaggcacgcggaagcccaggccgcagcccggcaggaactggccctcaaaacactcggtaccgatggactctttcttttcagctccctggacacggatggcgatatgtacatttcacctgaagaatttaaaccaatagccgagaagctgaccgggtctacgccagctgcatcctgtgaagaggaagagctgccccccgatccgtccgaggagactttaaccatcgaagcaaggtttcagccgctcctccccgagactatgactaaatctaaagatggttttctgggtgttagtaggttggcccttagcggcctcagaaactggactgcagccgcgtcgcctagcgccgtttttgctacgcgacacttccagccatttttacccccgcctggacaagaattgggggaaccgtggtggatcatccctagcgaacttagtatgttcacgggctaccttagcaataaccgtttttaccccccacctccaaaaggtaaagaggtgattatccaccggcttcttagcatgtttcaccctaggcccttcgtcaaaacgcgatttgcccctcagggcgctgtggcctgcctgaccgccataagtgacttctattacactgtgatgtttaggattcacgctgaatttcaactctcagaacctccagacttccctttttggttttcacccgctcagttcaccggacatatcattctgagcaaagatgccacccatgtgcgggatttccgacttttcgtgccaaaccaccgatctctgaacgttgacatggagtggctgtacggcgcctctgagtcttctaatatggaagtggatattggatatattccacagatggaattagaggcaacggggccctccgtcccaagtgtcatcctcgatgaagacggttctatgatcgactcccatctgccatctggagagccgcttcagtttgtgttcgaggagatcaagtggcagcaagagctcagttgggaggaggccgccagaaggttggaagtggcaatgtacccgtttaaaaaagttagttacttgccattcactgaggctttcgatcgcgctaaggcagaaaataaacttgtacactccatcctgctatggggtgccctagatgatcagagttgccattgtagcggtcgaaccttaagggagactgtcttggagtcgtccccgatccttacgctgctgaacgagagctttatcagcacctggtctctcgtcaaagagcttgaggagctgcagaacaatcaggaaaattcctctcaccaaaaactcgctgggcttcacctcgagaagtacagcttcccagtggaaatgatgatatgtctccctaatggtaccgtggtgcaccacataaacgccaattatttcctggatattacctctgtgaaaccagaggagatcgaatccaatctgttcagcttttccagcacctttgaagatcctagcacagcaacatacatgcaatttctaaaggaaggtctaagaaggggccttcctctcctgcagccctag

SEQ ID NO: 204496 - DNA, 1773 bp, synthetic construct
  misc_feature 1..1773: note = Description of Artificial Sequence: Synthetic coding sequence
  source 1..1773: mol_type = other DNA
  misc_feature 1..378: note = DNA
  misc_feature 379: note = RNA
  misc_feature 380..1383: note = DNA
  misc_feature 1384: note = RNA
  misc_feature 1385..1773: note = DNA
atgggccgggcccggcccggccagcggggcccccccagccccggccctgccgcacagcctcccgcacctcctaggcgcagagcgcggtcactagccttgcttggggccctgctcgccgctgctgctgccgcagccgttcgcgtctgcgctcggcacgccgaagcgcaggcggccgctcgacaggaactggctctgaagacactggggacagatggactctttctcttctcttctctggataccgacggagacatgtatattagccctgaggagttcaagcctatcgccgagaaattgacggggagttgtagtgtcacacagacgggagttcagtggtgctcccatagctcactccagccacaattgccgtggctgaactgatcctcctgcctctccttgttaagatctactcctgcagcctcctgtgaagaagaggagcttccacccgatccctccgaagagactctgacgatcgaagcacgttttcaacctttgctcccagagaccatgactaagagcaaggatgggttcctgggggtttctaggctagctctgagtggcctacgcaattggacggctgccgcctccccctcggcggtattcgctacacgccattttcaaccgttccttcctccacccggacaagaactcggggagccttggtggatcattcccagcgaactcagtatgtttaccggctacttgtcaaacaataggttttatcccccaccacccaagggcaaggaggtcatcatccatagactgttaagcatgttccacccacggccattcgtaaaaacacgtttcgcccctcaaggggccgtggcttgcttgaccgctatttccgacttctattacacggttatgttcaggattcacgcagagttccagctttcggaacccccagacttccctttctggttttccccggcgcagtttactggacacattatcctgtccaaggatgctacacatgtgcgagacttccgcctgtttgtgccgaatcacaggtccttgaatgtggatatggaatggctgtacggcgcttctgagagctccaacatggaggtagatatcggctatatcccacagatggagcttgaggcaactgggccctctgttccttccgtgattcttgacgaggacgggagcatgattgactcacatctaccttctggcgagcccttgcagttcgtgttcgaggaaataaaatggcagcaggaactatcgtgggaagaggccgcacgtaggcttgaggttgctatgtatccgttcaagaaagttagctacctgccattcactgaagcattcgatagggccaaggccgaaaataaactggtgcactctatacttctgtggggggcccttgatgatcaaagctgttgagggtccggtcgcacactgagagagacagtattggagagcagcccaattctgacgcttttgaacgaaagctttattagcacatggtcgctcgtcaaagaattggaggaactccagaataaccaagagaacagtagccaccagaagctggctggcctgcacttggaaaaatactcatttcccgtggaaatgatgatctgcctccccaacggaactgtagtgcaccacatcaacgcaaattactttctggacattacctctgtgaaacccgaggaaattgaatccaacctgtttagtttctcaagcaccttcgaagatccatcgaccgctacatatatgcagtttttgaaggagggtttgaggcggggcctgcctttgcttcagccatag

SEQ ID NO: 204497 - DNA, 1671 bp, synthetic construct
  misc_feature 1..1671: note = Description of Artificial Sequence: Synthetic coding sequence
  source 1..1671: mol_type = other DNA
  misc_feature 1..1281: note = DNA
  misc_feature 1282: note = RNA
  misc_feature 1283..1671: note = DNA
atgggccgggcccggcccggccagcggggcccccccagccccggcccagcagctcagccccccgccccacctaggcgaagggcgcgctccctggctctcctcggtgccttgctggctgccgccgctgccgccgctgtgagggtgtgtgcccgacatgctgaagcccaggccgctgcaagacaggaactggcattaaaaactctcggcaccgacggtctgttccttttctcatccctggacacagatggtgacatgtatatctcaccagaggagtttaagcctatcgctgaaaaattaactggcagcacaccagccgcttcatgcgaagaagaagaactgccccccgacccttctgaagaaacgcttaccattgaggctagatttcagcctcttcttcccgaaactatgactaagtcaaaagatggctttctcggcgtctctcggctcgcgctctctggattgaggaattggaccgccgctgcctcaccttcagccgtcttcgccactcgccacttccagccgtttcttcctcccccgggccaggaactgggcgagccttggtggattatcccaagtgagctttccatgtttaccggttacttgtctaataatcgcttttaccctccacccccaaaaggcaaggaggtcatcattcatcggttgctgtcaatgttccaccctaggcccttcgtcaaaacaagattcgcacctcagggagctgtggcctgtctcactgccatctcggacttctactatactgttatgttcaggattcacgccgagtttcaattatccgagcctccggacttccctttctggtttagcccggctcagttcactggacatattatactaagcaaagacgcaactcacgtgagagacttcaggctcttcgtacccaatcacagaagcttgaacgtggacatggagtggctctacggcgcatccgaaagttctaatatggaggtcgacatcggctacattccccagatggaactcgaggcaaccggcccctccgtcccatctgtgatcctcgacgaggacggcagcatgatcgactcccatttgccttccggcgagcctctccaatttgtgttcgaggagattaagtggcaacaagaactatcgtgggaagaagccgcaaggagattagaggtggctatgtatcctttcaagaaagtgtcatatttgcccttcaccgaagcctttgaccgcgccaaggccgaaaacaagctcgttcactcaatactgctgtggggtgccctagacgatcagtcctgttgagggtccggccgcacattgagagagactgtgcttgaatcatcacctatcctgactctcctcaatgaatcctttatcagcacatggtccctggtgaaagaactggaggagctccagaacaatcaggaaaattccagccatcagaagctggccggcctgcacctcgagaagtactccttccccgtagagatgatgatctgtctccccaacggtactgtcgtgcaccacatcaatgcaaactacttcctcgatattaccagcgttaaacctgaagagatcgaatcaaacttatttagcttttcttccaccttcgaagaccctagcaccgcaacttacatgcagttccttaaggaggggctgagacggggcttacctcttctacaaccatag

SEQ ID NO: 204498 - DNA, 1146 bp, synthetic construct
  misc_feature 1..1146: note = Description of Artificial Sequence: Synthetic coding sequence
  source 1..1146: mol_type = other DNA
  misc_feature 1..174: note = DNA
  misc_feature 175: note = RNA
  misc_feature 176..897: note = DNA
  misc_feature 898: note = RNA
  misc_feature 899..951: note = DNA
  misc_feature 952: note = RNA
  misc_feature 953..987: note = DNA
  misc_feature 988: note = RNA
  misc_feature 989..1032: note = DNA
  misc_feature 1033: note = RNA
  misc_feature 1034..1053: note = DNA
  misc_feature 1054: note = RNA
  misc_feature 1055..1098: note = DNA
  misc_feature 1099: note = RNA
  misc_feature 1100..1104: note = DNA
  misc_feature 1105: note = RNA
  misc_feature 1106..1125: note = DNA
  misc_feature 1126: note = RNA
  misc_feature 1127..1131: note = DNA
  misc_feature 1132: note = RNA
  misc_feature 1133..1146: note = DNA
atgtggcggagcctgggcctggccctggccctgtgcctgctgccctctgggggcaccgagtcccaggaccagtctagcttatgcaagcagcctcccgcctggagcatacgggatcaggaccccatgttaaattccaatgggtccgtcacagtggtcgccctgctccaggcttcatgatatttgtgtattctccaggcctctaagttagaggatctgagagtcaaactcaagaaggagggctactccaatatctcatatatagtcgttaaccaccaaggcatcagcagccgcctgaagtatacccacctgaaaaacaaggtgagcgaacacatacccgtgtaccagcaggaggaaaatcagactgacgtctggacattgttaaacggatctaaagatgactttcttatctacgaccgatgtggccgtctggtgtaccacctggggctaccattctccttcctgactttcccatatgtggaagaggccatcaagatcgcgtactgcgagaagaagtgcgggaactgcagccttacaaccctgaaggatgaagacttttgcaagcgcgtgtctttggccactgtcgataagacagtagaaacaccatccccccactatcatcacgaacaccatcacaatcacgggcatcagcatctaggatcaagtgagctgtcagaaaaccaacagcccggggcccccaacgctcccactcatcccgcaccccccgggctacatcaccaccataagcacaaaggtcagcatagacagggacatcctgaaaatagggatatgccagccagcgaagatctccaggacttgcaaaagaagctttgtagaaaaaggtgcattaaccaactgttgtgcaagctgcctaccgatagtgagttagctcccaggagttgatgctgtcattgtcgtcacctcatctttgagaagacgggttcagcaatcacatgacaatgcaaagagaaccttccttcactgtgttcttgacagggcctgagagccgaggaaaacatcaccgagagttgccaatgaaggttgcctcctgccgcatgacagatctcacagcagttaattcctaccgaggcttctgcgtcatgacgatgaaagaaccaagcaaagaagtgagagtgaccttcaaattag

SEQ ID NO: 204499 - DNA, 630 bp, synthetic construct
  misc_feature 1..630: note = Description of Artificial Sequence: Synthetic coding sequence
  source 1..630: mol_type = other DNA
  misc_feature 1..174: note = DNA
  misc_feature 175: note = RNA
  misc_feature 176..630: note = DNA
atgtggcggagcctgggcctggccctggccctgtgcctgctgccctccggcggaaccgaatcgcaggatcagagctccttatgtaagcagccgcctgcctggtccattagagaccaggacccaatgcttaacagtaatgggagcgtgaccgttgtcgccctcttgcaagcatcatgatatttatgcattctccaggccagcaaactcgaggaccttcgcgtcaaattgaaaaaggagggatattctaacatttcctacatagtcgtcaatcaccaggggatttcatctcgcttgaagtacactcatcttaaaaacaaggtaagcgaacacattcctgtgtatcagcaggaagagaaccaaaccgatgtctggacccttttgaacggatccaaggatgatttcctcatctacgaccgatgcggcaggctggtgtatcacttaggcttacccttctccttcttgacctttccttatgtggaagaggccattaagattgcctattgtgagaaaaaatgcggaaactgttctctgaccactctcaaagacgaagacttctgtaaacgagtgtccctcgccactgtggacaaaacggtcgaaaccccttccccacactaccaccacgagcattag

SEQ ID NO: 204500 - DNA, 1146 bp, synthetic construct
  misc_feature 1..1146: note = Description of Artificial Sequence: Synthetic coding sequence
  source 1..1146: mol_type = other DNA
  misc_feature 1..174: note = DNA
  misc_feature 175: note = RNA
  misc_feature 176..897: note = DNA
  misc_feature 898: note = RNA
  misc_feature 899..951: note = DNA
  misc_feature 952: note = RNA
  misc_feature 953..987: note = DNA
  misc_feature 988: note = RNA
  misc_feature 989..1032: note = DNA
  misc_feature 1033: note = RNA
  misc_feature 1034..1053: note = DNA
  misc_feature 1054: note = RNA
  misc_feature 1055..1098: note = DNA
  misc_feature 1099: note = RNA
  misc_feature 1100..1104: note = DNA
  misc_feature 1105: note = RNA
  misc_feature 1106..1125: note = DNA
  misc_feature 1126: note = RNA
  misc_feature 1127..1131: note = DNA
  misc_feature 1132: note = RNA
  misc_feature 1133..1146: note = DNA
atgtggcggagcctgggcctggccctggccctgtgcctgctgccctcaggtggaacggaatcacaagatcagagtagcctatgtaaacagcctcccgcatggagcataagggatcaagatccaatgctgaacagtaatggttccgtaacggtcgtcgcactgctgcaagcgtcgtgatatctgtgtattctccaggcctctaagctggaagacctgagagtgaaactgaagaaggagggctattctaatataagctatatcgtagtcaaccatcagggaatcagtagtagactcaagtacactcatctcaaaaacaaggtctcggagcacattcctgtatatcaacaggaggaaaaccagactgacgtgtggacactgttgaatggaagcaaagatgactttcttatttacgatcgctgtggaagattagtgtaccatctggggttgccgttttccttcctgacctttccctacgtagaggaagcaattaagattgcttattgcgaaaagaaatgcggcaactgttctctgaccacactgaaggacgaagacttctgcaagcgggtgagtctggccaccgtcgacaaaacagtggaaaccccaagcccccattaccatcatgaacaccatcataatcacggccaccagcacctgggaagctctgagctcagtgagaatcaacaacctggagcaccaaacgcgccgacgcaccccgctcccccgggccttcaccaccatcataaacacaagggccaacatcgccaaggtcatcctgagaatcgcgacatgcccgcatccgaggacctgcaggacctgcaaaaaaaactctgtagaaaacgctgcattaaccagctgttatgcaaactcccaacggatagcgagcttgcacccaggagctgatgctgtcattgccgacatctaatttttgagaaaaccggctccgcgattacatgacagtgtaaggaaaaccttccctccctctgtagttgacagggtttacgggctgaggagaatataacagagagctgtcagtgaagattgccgccagcggcctgacagattagccagcaacttatacccacggaagcatctgcttcgtgaagatgaaagaaccaggccaagaagtgagagtgaccctccaattag

SEQ ID NO: 204501 - DNA, 933 bp, synthetic construct
  misc_feature 1..933: note = Description of Artificial Sequence: Synthetic coding sequence
  source 1..933: mol_type = other DNA
  misc_feature 1..174: note = DNA
  misc_feature 175: note = RNA
  misc_feature 176..897: note = DNA
  misc_feature 898: note = RNA
  misc_feature 899..933: note = DNA
atgtggcggagcctgggcctggccctggccctgtgcctgctgcccagcggagggacagagtctcaggaccagtcgtctctttgtaagcaacctcctgcatggtccatcagggatcaggatccaatgcttaacagtaacgggtcagttaccgttgtggcattgttgcaggccagctgatacctttgcattctgcaagcctcgaagctcgaggatctcagggtgaagctcaagaaggaaggatatagcaacatttcctatatcgtggtcaaccaccaaggcatctcctctaggctgaaatatactcacctgaagaacaaggtctcggagcatattcccgtgtatcagcaggaggagaaccaaacagatgtgtggacgctcctcaatggatcaaaggatgactttctcatttacgatcgatgcggaaggctggtataccatctaggcttaccattcagctttctgacttttccctatgtggaggaggcaatcaagattgcttactgtgaaaagaaatgcggaaattgtagtcttacaacactgaaagatgaggatttctgcaagcgggttagcctcgctaccgttgataagaccgtagagactcccagcccccactatcaccatgagcaccaccacaaccatggacatcagcatctggggtcgagcgagctgagcgagaaccaacagcccggggcccccaatgccccgacgcatccagcccctccagggttacaccaccatcataaacacaaaggacagcaccggcagggccatccggagaacagggacatgccagcctccgaggatctccaggatctgcagaagaagttgtgcaggaagcgctgtataaatcagctcctgtgtaagcttccaaccgattccgagctggctcctagatcctgatgttgccattgcaggcacttaatctttgagtag

SEQ ID NO: 204502 - DNA, 1146 bp, synthetic construct
  misc_feature 1..1146: note = Description of Artificial Sequence: Synthetic coding sequence
  source 1..1146: mol_type = other DNA
  misc_feature 1..174: note = DNA
  misc_feature 175: note = RNA
  misc_feature 176..897: note = DNA
  misc_feature 898: note = RNA
  misc_feature 899..951: note = DNA
  misc_feature 952: note = RNA
  misc_feature 953..987: note = DNA
  misc_feature 988: note = RNA
  misc_feature 989..1032: note = DNA
  misc_feature 1033: note = RNA
  misc_feature 1034..1053: note = DNA
  misc_feature 1054: note = RNA
  misc_feature 1055..1098: note = DNA
  misc_feature 1099: note = RNA
  misc_feature 1100..1104: note = DNA
  misc_feature 1105: note = RNA
  misc_feature 1106..1125: note = DNA
  misc_feature 1126: note = RNA
  misc_feature 1127..1131: note = DNA
  misc_feature 1132: note = RNA
  misc_feature 1133..1146: note = DNA
atgtggcggagcctgggcctggccctggccctgtgcctgctgcccagcggcggaacagaatcccaggaccagtcatccctttgcaaacaacccccagcctggagtatacgggatcaggatcctatgctgaactcaaatggcagcgtcactgtcgtcgctcttcttcaggccagttgatacttgtgcatcctgcaggcgagtaagttggaggatctccgcgtcaagctcaagaaggaggggtatagcaacatctcctatatagtcgtgaatcaccaaggcatttcatctcggttaaagtatacacacctcaagaataaggtgagtgagcacataccagtctaccagcaggaggagaaccagacagacgtttggacattgttaaatggatcgaaagacgatttcttgatttacgatcggtgcggaagacttgtgtaccacctcggcttgccattcagtttcctgactttcccctatgtggaggaggctattaaaatagcctattgtgagaaaaagtgcggtaactgcagtctgactacgttgaaagatgaagacttctgcaagcgagtgtcactagctactgtggacaagaccgtagaaacaccctccccacactatcaccacgagcaccaccacaatcatggccaccagcatctgggctctagtgagctttcagaaaaccaacagcccggggcccctaacgctcctactcatcccgctccccccggactgcatcaccaccacaaacataagggccagcaccgacagggtcatcccgagaatcgtgacatgcccgcatcagaagacctgcaggacctgcagaagaaactatgtcgaaaacgatgcatcaaccaactcctgtgcaaactccccaccgatagtgaactggcacctcgctcatgatgttgccactgtcgacatctgatctttgagaagaccggaagcgctattacttgacagtgtaaagaaaatctgccttcattatgcagctgacaaggcctgcgggcagaggagaatatcacagaatcatgccaatgaaggctgcccccggccgcctgacagatcagccagcaactgatacccaccgaggcatcggccagttgacgctgaaagaatcaagctaagaaatgagagtgacctagtaactag

SEQ ID NO: 204503 - DNA, 264 bp, synthetic construct
  misc_feature 1..264: note = Description of Artificial Sequence: Synthetic coding sequence
  source 1..264: mol_type = other DNA
  misc_feature 1..36: note = DNA
  misc_feature 37: note = RNA
  misc_feature 38..264: note = DNA
atggccctggccgtgcgggtggtgtactgcggcgcctgaggctacaaatctaagtatttacagctgaaaaaaaagctggaggacgagtttcccgggaggcttgacatttgcggagagggcacgcctcaagctactggcttttttgaggtgatggttgctggaaaactgatacacagcaagaagaagggggacgggtacgtggatactgagtctaaattcctcaagctcgtcgcggctatcaaggctgctttggcccagggctag

SEQ ID NO: 204504 - DNA, 267 bp, synthetic construct
  misc_feature 1..267: note = Description of Artificial Sequence: Synthetic coding sequence
  source 1..267: mol_type = other DNA
atggccctggccgtgcgggtggtgtactgctgcggcgccggcggctataaatcgaaatacttgcagctcaaaaagaagctcgaagatgaattccccggaaggctcgacatctgtggcgaaggcacaccccaggccacaggcttcttcgaggtcatggtcgccggtaagcttattcatagcaaaaagaagggcgatggctacgtcgataccgagtcaaagttcctcaagttagtggctgccattaaagctgctttggcacagggatag

SEQ ID NO: 204505 - DNA, 351 bp, synthetic construct
  misc_feature 1..351: note = Description of Artificial Sequence: Synthetic coding sequence
  source 1..351: mol_type = other DNA
  misc_feature 1..282: note = DNA
  misc_feature 283: note = RNA
  misc_feature 284..351: note = DNA
atgagcttctgcagcttcttcggcggcgaggtgttccagaaccacttcgagcctggtgtgtatgtgtgcgctaaatgcggctacgagctcttctcctccaggtctaaatacgcacattcctcaccctggcctgcttttactgagaccatccacgctgatagcgtcgctaagagacccgagcataacagatcagaagctctcaaggtttcatgcggcaaatgcggtaatgggctgggtcacgagtttctaaacgacggacccaagcctggtcagtcgcgcttctgaatcttcagtagtagcctgaaattcgtgcccaaaggaaaagaaactagcgccagccagggccactag

SEQ ID NO: 204506 - DNA, 681 bp, synthetic construct
  misc_feature 1..681: note = Description of Artificial Sequence: Synthetic coding sequence
  source 1..681: mol_type = other DNA
atgagcttctgcagcttcttcggcggcgaggtgttccagaaccactttgagcccggcgtttacgtgtgcgctaaatgtggctacgagctcttttcctcccgctcaaagtatgctcacagttccccgtggcctgcattcaccgaaactatccacgccgatagtgtggccaagagaccagaacataataggtcagaggctctgaaggtgcggggtcatcggggaggagggggcaccggggcagctcgggagtcaagggagccggtgccccccagctcactgtgtttaccccactcttcccggggactggaggcctcaatcccaggcctactcccactccctggctcctgtcatccacgtttaagcggggagcccgggctgctcgttcagatgtgggagacaggccaggtgagttgcactgggagtcgaaccaaggtcaacctgctttgcagaagaagcgcgtgggagattggcgtttgggaggagactcccagcgcttctccatcaaaaggactgcattgtggctgcattatggcaaggagctcaccgagttgtctggtaatctttccaggtgtgctgtggcaggtttggcagtgggtggggccccgagtgcctgaacggcgcccacaggccggagcggtgcccatcttaaatatccagcagctggctgaggtgtgtccttag

SEQ ID NO: 204507 - DNA, 2328 bp, synthetic construct
  misc_feature 1..2328: note = Description of Artificial Sequence: Synthetic coding sequence
  source 1..2328: mol_type = other DNA
atggccagcgccggccacatcatcaccctgctgctgtggggctaccttctagagttgtggaccggagggcacaccgctgatacgacccatcccagactccgactcagccataaggagctcctgaacctgaataggactagcatatttcatagcccctttggcttcctggacctccacaccatgctcctggatgagtaccaggagcgcttgttcgtcggcggtcgggacctggtctactccctgagcttagaacgcatctctgacggctacaaagagattcactggccctctaccgcgctcaagatggaggagtgcattatgaagggcaaagatgctggtgagtgtgccaactatgtcagggtgctgcaccactacaatcgcacacacctcctcacttgcggtacaggggctttcgatcctgtgtgcgcttttattcgtgtgggatatcatttagaggatcctctgttccacctggaaagtccacgctccgagcgtggtaggggccggtgtcctttcgatccaagctcctcattcatctctacattaattggatccgagctgttcgccggtctttattcagactattggtctcgcgatgctgcgatttttagaagtatgggacgcctggctcatatcagaaccgaacacgatgacgagcgcctgctgaaagaacctaagttcgtgggttcatacatgatccctgacaatgaagatcgggatgataacaaagtttatttctttttcacagagaaggcccttgaggcagaaaataatgctcacgccatttacacaagagtaggtaggctctgtgtgaatgatgtggggggccaacggatactggtgaataagtggtccactttcttaaaagcccgcctggtatgttcagtacctggcatgaacggcattgacacatattttgacgaattagaggatgttttcctgctacctacacgggaccataagaaccccgtaatattcggcctgttcaataccacgagtaatatctttagagggcatgccatctgcgtttaccacatgagcagcatacgcgctgcttttaatgggccatacgctcataaagaaggacccgaataccattggtccgtctacgaaggtaaggtaccctatcctcgtcccggatcatgcgctagcaaggttaacggcgggagatacggaaccaccaaggattacccagacgacgccattcggttcgctaggtcccacccacttatgtaccaagcaataaagcccgcgcataaaaagccaatccttgtcaagactgacggaaaatacaacctgaagcagattgccgttgaccgcgtcgaagcggaagatggccagtatgacgtgctcttcatcggcacggacaacggtatagtcctaaaggtgattacaatctacaaccaggagatggaatctatggaagaggtcattctggaggagttgcagatattcaaggatccagtgccaatcataagcatggaaatttcaagcaaacgacaacaactgtacattggcagcgccagtgccgtagctcaagttcgctttcaccattgtgacatgtacggatccgcctgcgccgattgctgcctggctcgggatccttactgcgcttgggatggcatttcttgcagccgatactaccctaccggtacccatgcaaagagacgattccgcaggcaagatgtgcgacacgggaacgcggcccaacagtgttttggtcagcagttcgtgggtgacgccctggacaaaacggaggagcaccttgcttatggaatcgagaacaacagcacattgctcgagtgtaccccgcgctcactccaggctaaggtgatatggtttgtccagaaaggtcgagaaacacggaaagaggaggttaagacagatgaccgggtcgttaagatggatctcgggctgctgttcctgagattgcataagtcagatgcaggtacgtacttctgccaaaccgtggagcactccttcgtgcacactgtgcgcaagatcactctggaggtcgtggaagaggagaaggtcgaagatatgttcaacaaagatgacgaagaagataggcatcaccgcatgccttgtcctgctcaatcttctattagtcagggggccaagccttggtacaaagaattccttcagctgattggatatagcaattttcagcgggtggaagaatattgtgaaaaggtgtggtgtaccgaccgcaaaagaaaaaaattaaaaatgtccccaagtaaatggaagtacgcaaatcctcaggagaaaaaacttcgcagcaaaccggaacattaccgcctaccgcggcatacattggatagttag

SEQ ID NO: 204508 - DNA, 2148 bp, synthetic construct
  misc_feature 1..2148: note = Description of Artificial Sequence: Synthetic coding sequence
  source 1..2148: mol_type = other DNA
atgctgctggacgagtaccaggagcggctgttcgtgggcggccgggacttagtatattccctgagtttagagaggatatctgatggctataaagagatccactggccaagcaccgcgcttaaaatggaggagtgcattatgaagggtaaagatgcgggcgaatgtgctaattacgtgcgcgttctgcatcattataataggacccacctgttaacatgtggaaccggtgcattcgaccctgtgtgcgcattcatccgggtgggataccacctggaggatcccttatttcatcttgagtcaccgcggagtgagaggggccggggaagatgcccattcgacccaagctctagcttcatctcaactctgattggcagcgagctcttcgccggtttatactcggactactggtcgcgggatgccgctattttccggtctatgggaagattggctcacatccgaacagaacacgatgacgaaagacttcttaaggagcccaagtttgttggatcctacatgataccagataacgaagatagggacgacaataaggtgtatttctttttcacagagaaggctctggaggccgaaaacaatgcgcatgccatatataccagagtgggaagattgtgcgtaaacgacgtgggcggacaaagaattttggtaaacaaatggtctacgttcctgaaagcgagactcgtttgctcagtgcctgggatgaatggtatcgatacttactttgatgagttggaggatgtgttcttactccctacccgtgaccacaagaatcccgtgatcttcggcctcttcaataccacatctaacatttttcggggccacgcgatttgtgtctaccacatgtccagcatcagagctgctttcaacggcccatacgcccacaaggaagggcctgaataccattggagcgtatacgaggggaaagtgccataccctcgtccaggttcttgcgcttctaaggtgaacggcggcagatatggcaccactaaagactaccctgacgacgcaatcaggttcgctcgtagccatcccttaatgtaccaggcgatcaagccggcccataagaagccaatcctggtgaaaaccgacggaaaatataacctgaaacaaatcgcggtggatcgggttgaggctgaagatggccagtatgatgtgttattcatcgggacagacaacggtattgtgctgaaggtgataacaatctataatcaggagatggaaagtatggaggaagtgatcctggaggaactgcagatctttaaggatcccgtgcccataatctcaatggagataagctcaaagcgtcaacagctttacattggctccgcctcagctgtagcccaggtgcgctttcaccattgcgatatgtacggatccgcttgcgccgattgctgcttagcccgggatccctattgcgcatgggacggaataagctgtagcaggtactatccaacaggcacccatgctaagaggcgctttaggcgacaggacgtgcgacacgggaacgccgctcagcagtgcttcggacaacagttcgtgggcgacgctctggacaagacagaagaacatttggcctacggaatagagaataacagtacattgcttgagtgtactccaaggagcctgcaggctaaggttatctggttcgtgcagaaaggaagagaaactcggaaggaagaggtcaaaactgacgacagggtcgttaagatggacctgggacttctgttcctaaggctgcataaatctgacgccggtacctacttttgccagaccgtcgagcatagttttgtacacaccgtcaggaaaataacattagaggtggtcgaggaggagaaagttgaggacatgtttaacaaagatgacgaagaagacagacatcaccggatgccctgtcctgcacagagttcgatttcacagggagctaaaccttggtataaagaatttctgcaactgattggttactcaaacttccagcgagttgaggagtactgtgaaaaagtgtggtgtaccgatcgaaagcggaaaaagctcaagatgagtccaagcaagtggaagtacgccaatccccaggagaagaagttacggtctaagcctgagcattaccgcctgcccaggcacacactcgatagttag

SEQ ID NO: 204509 - DNA, 2301 bp, synthetic construct
  misc_feature 1..2301: note = Description of Artificial Sequence: Synthetic coding sequence
  source 1..2301: mol_type = other DNA
atggccagcgccggccacatcatcaccctgctgctgtggggctacttactggagctgtggacaggtggacacactgcagacacaacccacccacggctcagactttctcacaaagaactgcttaatctgaatcggacctcaatcttccacagcccctttggttttttggatcttcacactatgctcctggacgagtatcaggagaggctgttcgttgggggacgtgatttggtttacagcctgtccctagagaggattagcgacgggtataaagaaatacactggcccagcacggccttgaaaatggaagaatgtattatgaaaggcaaggatgctggagaatgcgccaactatgtacgcgtcctccaccattacaaccgaacccatctgctcacctgtggcacgggcgcctttgacccggtgtgcgcgttcattagagtgggttaccatcttgaagaccctctgtttcacctggagagcccacgtagcgaacggggacgagggaggtgtccctttgacccatcttcgagcttcataagtaccctgattggctctgaactcttcgcaggcctgtacagtgactactggagcagagatgcagcaatctttagatccatgggaagactcgcacacatccggacggaacacgacgatgagaggttgctcaaagaacctaaattcgttgggtcttacatgatccctgataacgaggaccgagacgacaacaaggtctacttcttctttactgagaaagctctggaggcagaaaataacgctcatgccatttataccagagtggggaggctgtgcgtgaatgacgtgggcggtcaacgtatactggtcaataagtggagcacatttttgaaagcccgactggtctgcagtgtgcccggtatgaatggcatagacacttacttcgatgaactagaagatgtgttcctgctgccaaccagagatcataagaaccctgtgattttcggactgttcaacactacttccaatatttttcggggccatgcaatctgtgtgtatcacatgagctccattcgagccgcatttaacggaccctacgcccacaaagaagggccagagtatcattggtccgtctacgagggtaaagtgccatatcctcgcccgggttcttgcgcttctaaagtcaacggaggcaggtacgggactaccaaggattaccctgacgacgccattaggttcgctagaagccacccattgatgtatcaagccataaaaccagcacataagaagccaatcctggttaaaaccgacggcaagtacaacctaaagcaaattgccgtggacagagtagaagcagaagatggacagtatgatgtgctgtttattggaaccgacaatggaatcgttttgaaagtgatcacgatctataaccaggaaatggagagcatggaggaagtgatactggaggagctgcaaatatttaaagatcctgttcctataatctcgatggaaatttcttcaaagaggcaacaactctacatcggatcagcatcggcagtggcacaggtgcggttccatcattgtgacatgtacggaagcgcgtgcgcggactgctgcctagcccgagacccatactgcgcttgggatggcatcagctgctcgaggtattaccccactgggacccatgccaaacgacgattcaggagacaggacgtgaggcatggcaacgcagcccagcagtgctttggccagcaatttgtgggagacgcactggacaaaacagaagaacatctggcttatgggatagaaaacaatagcaccctcctggagtgcacgccgcggtccctgcaagctaaagtaatatggttcgtacaaaagggccgcgaaactcggaaagaagaagttaaaaccgacgatagggtggtaaaaatggacctcggtttactgtttcttcgcttacacaagagtgatgccggaacttatttttgccagaccgttgagcattctttcgtgcacacggtgagaaaaattacccttgaagtcgttgaagaggagaaggtggaggacatgttcaataaagacgacgaagaggaccggcaccaccgcatgccctgtcccgctcagagctcaatcagtcaaggtgcaaagccttggtacaaagagttcttgcagcttatcgggtactctaatttccaacgcgttgaggagtactgtgaaaaggtgtggtgtaccgatcgcaaacggaagaaactgaaaatgtccccctctaagtggaaatatgccaatccccagcactacaggctcccacgccacacccttgactcatag

SEQ ID NO: 204510 - DNA, 2286 bp, synthetic construct
  misc_feature 1..2286: note = Description of Artificial Sequence: Synthetic coding sequence
  source 1..2286: mol_type = other DNA
atggccctgcccgccctgggcctggacccctggagcctgctgggcctcttcctcttccagcttttgcaactcctgctacccacaaccacggcagggggaggcgggcagggtccgatgcccagagtccgctattacgcaggtgatgaaaggagagctctgtcattctttcatcagaagggactgcaggattttgatacgctgttgttgtctggggatggtaatacactgtacgtgggcgcccgagaggccatccttgccctggatattcaggatcctggggtgcctcgactcaagaacatgataccctggcccgcctcggacagaaaaaagagcgagtgcgcattcaagaagaagtctaatgaaacacagtgcttcaattttatccgagtcctggtgtcttacaatgtgactcacctgtacacctgtgggacgttcgcatttagccccgcctgtacctttatcgagctgcaagactcatatcttttacctatctctgaggacaaagtgatggaggggaagggccagtccccatttgatcccgcccacaaacacactgccgtactggtcgatggcatgctgtactcaggcaccatgaataactttctggggagcgagcccatcctcatgagaacgctggggtcccaaccggttctgaaaactgataattttttgaggtggctgcaccacgacgccagtttcgtcgccgctatcccaagcactcaggttgtctattttttcttcgaggaaacagcctccgagtttgactttttcgaacgcctgcacacgagccgcgtagctcgggtgtgtaagaacgacgttgggggggagaagttactgcagaagaagtggactacctttctgaaggctcaacttctttgcacacagcctggacagttgccgttcaacgtgatccggcacgccgtgctcctgccagccgatagcccgactgccccccacatctacgcggtgtttacctcacagtggcaggtgggaggtactcgcagctcagcagtctgcgcgttctcccttttggatatagagagagtgtttaagggcaaatataaggagctcaacaaggagactagtcgctggacaacatacagaggcccagagactaatccaagaccaggaagctgttcagtcggcccatcttctgataaggcgttaacatttatgaaagatcactttttaatggatgaacaggtggtcggcacaccgctcttggtgaaaagcggcgtagaatacaccagactggcagttgagaccgcacagggcctggacgggcactcccacctggtgatgtatctgggaactacaacggggtctctccataaagccgtggtaagcggagactcatccgcccaccttgttgaggagatacagctgtttcccgatcccgagccggtgcgcaacctgcagctggccccaactcagggggccgtgttcgtgggcttttcaggaggagtttggcgcgtgcctagagcaaattgctccgtgtatgagtcgtgcgttgattgcgtgcttgctcgagaccctcactgcgcctgggaccccgaatctcgcacatgttgccttttatcagcccctaacctcaacagttggaagcaagatatggagcggggaaacccagagtgggcatgcgcaagcggcccaatgtctaggagcctaaggccccagagtaggcctcagattattaaggaggtgctggctgtgccaaattcgattttagaactcccatgcccccatctgtctgccctggcttcctattactggtctcacgggcccgcggccgtgcctgaggcttccagcacagtgtataacggatcgttgttgctgatagtccaggacggagtaggaggattataccaatgctgggccactgagaacggcttttcatatcctgtaatttcttattgggttgattctcaggatcagactttggctctagacccagaactcgccggaatacctagagagcatgtgaaagtccctctcacgcgcgtttcaggcggagccgctttagctgcccagcagagctattggcctcatttcgtgaccgtgacggtgttgttcgcactggtactctccggcgctttgataatcctggtggcctcccctttgcgcgcgctccgggcccggggtaaggttcaagggtgtgaaaccctccggccaggcgaaaaggccccccttagtcgcgagcaacacttgcagtcgcctaaggagtgccgaacttccgcaagcgacgtggacgctgataataactgcctggggaccgaagttgcttag

SEQ ID NO: 204511 - DNA, 2286 bp, synthetic construct
  misc_feature 1..2286: note = Description of Artificial Sequence: Synthetic coding sequence
  source 1..2286: mol_type = other DNA
atggccctgcccgccctgggcctggacccctggagcctgctgggcctcttcctctttcagctgctgcagctgctgctccctacaaccaccgccggaggagggggacaggggcctatgcctcgggtcaggtattacgccggggacgagcggcgcgcgctctccttcttccatcagaagggattacaggattttgatacactgcttctgagtggcgacggcaacacattgtatgttggcgcacgcgaggcaatcttggctctcgatattcaggacccaggggtcccgcggctgaaaaatatgatcccatggccggctagcgaccggaaaaagtctgagtgtgcatttaaaaagaagagcaatgagacacagtgtttcaactttattagggtgctggtgagctacaacgttactcatctctatacatgtggaactttcgccttcagccctgcctgtacatttatcgaactgcaggattcttatctcctgccaatttctgaggacaaagttatggaaggaaaaggacaaagccctttcgaccccgcacacaaacatactgcggtcctggtggacgggatgctgtactctggaaccatgaacaacttcctggggagcgagcctatcctgatgagaaccttgggcagccagccagtgcttaaaaccgacaattttctgcggtggctgcaccatgatgcctcttttgtggcagccatccccagtactcaggttgtgtacttcttctttgaagaaacggccagcgagtttgatttcttcgagcgcttacatacttcgcgggtagcacgggtatgcaagaacgacgttggtggcgagaagttgttgcagaaaaagtggacaacatttctcaaggcccagttgctctgcactcagcccgggcagctgcccttcaatgtaattcggcacgccgtattgctgcccgccgatagtccgaccgctcctcatatttatgccgtgttcactagccagtggcaagtgggagggaccagatcttccgctgtgtgcgccttttcattgctggatatagagcgagtctttaagggcaaatataaggaattgaacaaagagacctcgaggtggactacatatagagggccagaaactaacccacgtcctggctcttgcagtgtaggcccctcatccgacaaggcgctgacattcatgaaagatcactttttgatggatgagcaggtggtgggaactccactgctcgtgaaatccggggtcgagtacacacgtctggcagttgaaacggcacagggcctggacggacatagtcacctagttatgtatcttggcaccacaacgggttcactgcataaggccgtggtctccggcgacagttccgcccacctggtggaggagatccagctgttcccggaccctgaaccagttaggaatttgcagttggctcccacacaaggggccgtattcgtaggattcagtggcggagtttggcgcgtgcccagggcaaattgtagcgtctacgaatcctgtgtggactgcgtccttgcacgagaccctcactgtgcctgggaccccgagagccgcacgtgttgcctgctaagcgcacccaacttaaacagctggaagcaggatatggagcggggcaacccagaatgggcatgcgcttccggacccatgtccagaagccttaggccgcagtcgaggcctcagattattaaagaggtgttagccgtgcctaattccattctcgagctcccctgcccccacttatctgcactggcaagctactactggtcacatggtccagcagccgtccctgaagcatcttcaactgtgtacaatgggagccttctcctcatcgttcaagatggcgtgggaggcctgtaccagtgttgggcgacagagaatggcttcagctatcccgtgatctcgtattgggtcgactcccaggaccaaacacttgctttagatcctgagctggccgggatccccagggaacacgttaaggtgcctttgacacgcgtgtcaggaggtgctgcccttgctgcccagcagagctactggccccacttcgtgaccgtaacggtcctgttcgcactcgttctaagcggggccctgatcatacttgtggctagtccgctgcgtgcactcagagcaaggggcaaagtccaggggtgcgagacgttgcgacccggagagaaggcccccctgtctagagagcagcacctacagtctccaaaggagtgcagaacctccgcttccgatgtggacgcggataataactgcttaggcacagaggtggcctag

SEQ ID NO: 204512 - DNA, 2172 bp, synthetic construct
  misc_feature 1..2172: note = Description of Artificial Sequence: Synthetic coding sequence
  source 1..2172: mol_type = other DNA
atgccccgggtgcggtactacgccggcgacgagcggcgggccctgtctttttttcatcagaaaggcctgcaggacttcgataccttgctactatccggagatggtaacacgttgtatgtgggggcccgggaggcaattctggcactagatattcaagacccaggcgtacctcgcctgaagaatatgattccctggcctgcctctgataggaagaaaagtgagtgcgccttcaaaaaaaaatccaacgaaacacagtgcttcaatttcatacgggtcctggtttcttacaacgttactcatctgtacacatgtggcacctttgcctttagtcccgcctgtacttttattgaattacaggatagttacctgcttccaatcagcgaggataaggtcatggaaggaaagggtcaaagtccttttgatcctgctcacaagcacacggccgtcctcgtggatggtatgctgtacagtggtacgatgaataactttcttggtagcgagccaattcttatgaggaccctgggcagtcaacccgttcttaaaaccgacaactttctgaggtggctgcaccacgacgcttcattcgtcgccgcgatccctagcacccaagtcgtctatttttttttcgaggagacggcttcggagtttgatttctttgaaaggctccatacgagcagagtggctcgagtgtgcaagaacgatgtgggaggtgagaaactactgcagaaaaaatggactacttttctcaaggcccagctgctctgcacccagccaggccagcttccattcaatgtgattcggcacgccgtgctcctcccggctgattcgcccacagcacctcatatctatgccgtgtttactagtcagtggcaagtgggtggcaccagatccagcgccgtgtgcgccttctccctgctggacatcgagagagtctttaaaggcaaatataaagagctgaacaaggagacgagccggtggacaacatatcgtgggcccgaaactaatcctaggcctggctcatgctcggtgggaccgtcgtcagataaggcgttgaccttcatgaaagatcactttcttatggatgagcaggttgtgggaacacctttactcgtgaagagcggagtggagtatacgagacttgctgttgaaaccgcccaaggtctcgatgggcatagccacctggtcatgtacctggggaccacaactggttctctgcataaggccgtggtcagcggcgatagctctgctcacctggttgaagagatccagctcttccctgacccggaacccgtgcgaaatttgcagctggctcccacccaaggcgctgtttttgtgggcttttccggcggcgtgtggcgtgtcccccgggcaaactgttcggtttacgagtcctgcgtcgactgtgttttggccagggatccacattgtgcctgggatcctgaatctagaacctgctgcctcctgtccgcccctaatctgaatagctggaagcaagatatggaaagaggtaatccagaatgggcctgcgcctcaggccctatgagccgatcgctgcggcctcagtcgcgcccgcaaattattaaagaagtgctcgccgttccaaactccattctcgagctcccgtgcccccacctctccgccttggctagttattattggagtcatgggccggccgccgtgcccgaggcttcatccactgtatacaacgggagcctcctgttaatcgttcaagacggtgtggggggcctctatcagtgctgggctacagaaaatggcttttcctacccagtgatttcctattgggttgatagtcaggatcagaccctggctttagatccagaattggccggaattccccgagagcatgtcaaggttcctcttacacgcgtatcgggcggcgctgctctggcagcccagcagagctactggccccactttgtgacagtgactgtgttatttgcactggtactctccggagcattaattatcttggtggcatctccactcagagcactccgggctcggggcaaggtgcaggggtgtgagacacttagacccggtgagaaagcacctttatctagggaacagcacctgcagtctcccaaggagtgtcgcacatcagcctcagacgtcgatgcggataataattgcctgggcacagaagtcgcctag

SEQ ID NO: 204513 - DNA, 1890 bp, synthetic construct
  misc_feature 1..1890: note = Description of Artificial Sequence: Synthetic coding sequence
  source 1..1890: mol_type = other DNA
atgatcccctggcccgccagcgaccggaagaagagcgagtgcgccttcaagaagaagtctaatgaggaactccaggactcatacctcctacccatctcagaggacaaagtcatggaaggcaagggtcagtctccttttgaccctgcacataaacacacagcagtgctggtggatggcatgctctactcaggtacaatgaataacttccttggctccgaaccgatattgatgaggacgcttggctcccaaccggtcttaaagaccgacaatttcctcagatggctacatcatgatgcttcctttgtcgccgccatacccagtacccaagtcgtgtattttttcttcgaggaaaccgccagcgagttcgacttcttcgagcggcttcatactagcagagtggcccgggtctgtaaaaacgacgttgggggtgaaaagttgttgcagaaaaagtggacgacctttttgaaggcccagttgctatgtacccagcccggccagctgcccttcaacgtgatccggcacgccgttctgttgccagctgatagtcccactgcacctcatatctacgcagtttttacctcacagtggcaggtgggggggacccgatctagtgctgtgtgtgctttctcgctgctggacatagaaagagtcttcaaaggtaagtataaggagctcaataaggaaactagcagatggaccacgtatcgcggcccagagaccaaccctcgccccggaagctgtagcgtgggcccaagctccgacaaagcactgacgttcatgaaggatcacttcctgatggacgagcaggtcgtcggcacccctctcctggtgaagagtggggtagagtatactagattagccgtggagaccgcacagggtctggatggccactcccatctcgtcatgtatctcggaactacaaccggcagcctgcataaagctgttgtgagcggcgatagcagcgcccacctggtggaggaaatccagctgtttccagacccagagcccgtccgaaacttgcagctcgccccaacccagggcgccgtcttcgttggcttttcagggggggtgtggagggtgccgcgggccaactgctcagtctatgagagctgcgtggactgcgtcctggccagagatccccattgtgcgtgggatcccgagtcccgcacgtgctgtctgctgtccgcaccaaacctgaatagttggaagcaagatatggaacggggaaaccccgagtgggcttgtgctagcggacccatgagtcgcagtctgcggcctcaatcaaggcctcagattatcaaagaggtcctggcagtccctaattcgatcttggaattgccatgccctcatctaagtgccctagcctcttattactggtcacatgggcccgcagccgttcctgaggcttcctctactgtctataacggctcgctactgctaattgtccaggatggcgtcggcgggctgtaccagtgttgggcgacagaaaacggtttctcttatcctgttattagctattgggtagactcccaagaccagactttagctttggacccagaactcgccggaattcccagagaacacgtgaaagtgcccctgacccgagtcagcgggggagcagccttggccgcccagcagtcatactggccgcacttcgtgaccgtgacagtcctgttcgcattggttctctccggggctctgatcatcctagtggcctctcccctcagagcccttcgcgctcggggaaaagttcaggggtgcgagacgctgagaccgggtgaaaaagcccctctctcacgcgagcaacatttgcagtctcctaaagaatgcagaacatctgcttccgatgtggacgccgataataattgtctggggaccgaggttgcttag

SEQ ID NO: 204514 - DNA, 2286 bp, synthetic construct
  misc_feature 1..2286: note = Description of Artificial Sequence: Synthetic coding sequence
  source 1..2286: mol_type = other DNA
atggccctgcccgccctgggcctggacccctggagcctgctgggcctgtttttgttccagttgctgcaactgctgctgcccaccactaccgctggaggaggcggacaaggtccaatgcctcgagtgcggtattacgccggtgatgaaaggagggctctgagcttctttcaccaaaaaggcttgcaagattttgacacgctactgttgtccggcgacggaaataccttgtatgttggtgctagagaagccatcttagccttagacatccaggaccccggagttccgagactaaagaatatgataccatggccggccagtgaccgcaaaaaaagcgagtgcgcgtttaagaagaaatccaacgagacccagtgtttcaatttcataagagtgctagtgagttataatgtgacacatctgtatacctgtggcacttttgccttttcccccgcatgtacttttattgaattgcaggactcttatctcctcccaatatcagaggataaggtaatggagggaaaagggcagtccccttttgacccggctcataagcatactgctgtccttgtggacgggatgctgtacagcggcaccatgaataacttcctcggttcagaaccaattctgatgcgtaccctgggctcccaacccgtcctgaaaaccgacaatttcctccgctggctgcatcacgacgcgagcttcgtagcagctataccgagcacacaagtggtatactttttcttcgaggagaccgcttccgaatttgacttcttcgagcgtttgcacacttcacgagttgccagggtctgtaaaaacgatgtggggggggagaagttgctgcagaagaaatggactactttcctcaaagcccagttgctgtgcacacagcccgggcagcttccattcaatgttatacgccatgcggttctgctgcctgccgacagccctacagcgcctcacatctacgccgtgtttactagtcagtggcaagtggggggcacaaggagcagcgcagtgtgcgccttttccctccttgacatcgagcgagtgtttaaaggcaaatacaaagagctgaacaaggagacatcaaggtggacaacctacaggggtcccgagactaacccaagaccaggctcgtgcagcgtggggcctagctcagacaaggcactcacgtttatgaaggaccattttttgatggatgagcaggtggtcgggacccccctgctggtgaagagcggtgtggaatacacgaggctggcagtggaaacagcgcaggggttggacggacacagccacctggttatgtacctcggcaccacaacaggatcactgcacaaggccgtcgtatccggagattctagcgctcacctggtggaggagattcagctatttcccgaccctgagcccgtgagaaacttacagctagcccccacccagggagctgttttcgtgggctttagtgggggcgtgtggagagtgccacgggctaattgtagtgtgtatgagtcgtgtgtggattgcgtgttagcacgcgatccacattgtgcctgggaccctgagagcagaacctgctgtctcctgagcgctcccaatctcaatagttggaaacaggacatggaaaggggtaatccggaatgggcctgtgcgtccggtcctatgagtcgatctctgagaccacagtctcggcctcaaattataaaagaggttctagccgtgcctaatagtattctggaactgccctgccctcatctaagcgccctggcttcctactactggagccatggtcctgctgctgtcccggaggctagctccacagtgtacaacgggtccttgttgctaatcgtgcaggatggagtgggcggactatatcagtgctgggccactgaaaatgggttctcttaccccgtgatctcttattgggtggattctcaagatcaaaccctggctctggatccggaactagccggcattcctcgggaacacgtgaaagttcctctcacccgcgtgtctggaggcgccgcgctggcagcccagcaaagttactggccacactttgtgacggtcactgtgctatttgccttggtcctgtcaggtgccctgatcattcttgtggcctcccccctccgagcactcagagctcgcggaaaagtacaggggtgcgaaactcttagacccggagaaaaggcacctctgagccgggagcagcacctccagagccccaaggagtgtaggacttcagcttctgatgtggacgccgacaacaactgtctgggcaccgaggttgcttag

SEQ ID NO: 204515 - DNA, 1890 bp, synthetic construct
  misc_feature 1..1890: note = Description of Artificial Sequence: Synthetic coding sequence
  source 1..1890: mol_type = other DNA
atgatcccctggcccgccagcgaccggaagaagagcgagtgcgcctttaagaaaaagagcaacgaagagctgcaagattcctacttactgccaattagcgaggacaaagtgatggagggtaaagggcagtcaccgttcgatccagctcataaacataccgccgtcctcgttgacggtatgctctactcaggcactatgaacaatttcttgggcagtgaacccattctgatgcgtacactgggcagtcagccagtactaaagacggataatttcctccgatggttgcaccacgacgcgtccttcgttgctgccatcccatctacgcaagtcgtttactttttcttcgaagaaaccgccagtgaatttgacttctttgaaagactccatacatccagggttgcgcgcgtgtgcaaaaacgacgtcgggggagagaagttattgcagaagaagtggactacgtttttgaaagcccagcttctgtgcacacagcctgggcagctgccctttaacgtcatccgccacgccgtgctactcccagcggactcacccaccgcgcctcatatttatgcggtgtttacctctcaatggcaggttggcgggactagatccagcgccgtctgcgcgtttagtttactcgacatagaaagggtttttaagggaaagtacaaagagctgaataaggagacctctcggtggaccacatatcgtggccccgaaactaatcccagacccggaagctgctccgtaggcccttcaagtgataaggccctaacattcatgaaggaccattttctaatggatgaacaggtcgtagggactcctttgttggtgaagagtggagtcgagtatactcgcctggcggtcgaaacggcacaagggctggatggccacagtcatttagtcatgtatctaggaaccacaacgggttcgctgcacaaagctgtggtgtctggcgattcatccgcccatctggtggaggagatccagctgtttccagatccagaaccagtgcgcaacctgcagcttgctcctacccaaggggccgtctttgtgggtttctctgggggcgtgtggagggtcccacgggctaattgcagcgtttatgagagctgcgttgattgcgtgcttgcgcgggaccctcactgtgcctgggacccagagtcacggacttgttgtctcttgagcgcacccaatctcaattcttggaagcaggatatggaacgcgggaatcctgagtgggcatgtgcatcaggcccaatgtcacggtcgctgcgcccccagtctcgccctcagattatcaaggaagttctcgccgtacccaattccattttagaactcccttgcccacatttatccgctctcgcctcatactattggtcccatgggccagctgccgtgccagaggcttctagtacggtctacaacggttctctgcttctgatcgtgcaggacggtgtggggggactttatcagtgctgggcgactgagaatggcttttcttatcccgtaatctcctactgggtggactcccaagatcaaaccctggcactagatcctgagctcgctggaatcccaagggagcacgtcaaggtacccttgacaagagttagcggcggggccgcacttgccgcccagcaatcctattggccgcacttcgtgaccgtcactgtgttatttgctctagttttgtctggagctctgataattcttgtcgcatcgccgttgcgagcgctgcgtgctaggggcaaagtacagggatgtgagacgcttcgccctggcgagaaagcgcctctttcccgggaacagcatctgcagtccccgaaggagtgccggactagtgcttctgatgtggatgcggataataactgccttggtactgaggtggcctag

SEQ ID NO: 204516 - DNA, 663 bp, synthetic construct
  misc_feature 1..663: note = Description of Artificial Sequence: Synthetic coding sequence
  source 1..663: mol_type = other DNA
atgatcccctggcccgccagcgaccggaagaagagcgagtgcgccttcaagaagaagagtaatgaaacccagtgctttaacttcatcagagtgttggtatcttacaatgtgacccacctgtatacctgcgggacctttgccttttctcctgcctgcaccttcattgaacttcaggactcatacctgctgcccattagcgaggataaagtgatggagggaaaggggcagtcaccttttgaccctgcccacaagcacaccgctgtcctggttgatggcatgctgtattccgggactatgaataacttcttgggaagcgaacccatcctgatgcgcaccctgggctcccaacctgtccttaagacagataactttctcaggtggctccaccacgatgcctcttttgtggcagccataccatcaacgcaggtggtatatttcttctttgaggaaactgcctcagaatttgacttctttgagcgtctgcacacgagccgcgtcgctcgagtgtgcaagaatgatgtggggggcgagaaattattgcagaagaaatggacaactttcctcaaagcccagttgctgtgcacgcagcccggccagctccccttcaatgtgattagacacgccgtgttgttaccagccgactctcctactgctccccattag

SEQ ID NO: 204517 - DNA, 966 bp, synthetic construct
  misc_feature 1..966: note = Description of Artificial Sequence: Synthetic coding sequence
  source 1..966: mol_type = other DNA
atggccctgcccgccctgggcctggacccctggagcctgctgggccttttcctcttccagttgctgcaacttctgcttccgactactacagccggcggcggcggccaaggtcccatgccgagagtgcgatattatgcaggcgacgagagacgagcactgtcattcttccaccaaaaaggactgcaggacttcgacacactgctactgagtggagatggcaataccctgtacgtgggcgctcgagaagctatcctggccctggacattcaggacccgggcgtaccacgcctgaaaaatatgatcccctggccagctagcgacaggaagaagtcggagtgcgcgttcaaaaagaaatcaaatgaaactcaatgtttcaactttattagggtccttgtcagctacaacgtcactcatctgtacacatgtggaacctttgccttttcgcctgcttgtacatttatcgaactgcaggattcttaccttcttcctatcagcgaggacaaagtgatggaggggaaggggcagagtcccttcgaccccgctcacaaacacaccgccgtcctagtagatggtatgctatatagcgggactatgaacaacttccttggaagcgaaccaatccttatgcgaaccctggggagccagcccgtactgaagactgataacttcctccggtggctgcaccatgatgcaagcttcgtggccgccattccatccactcaagtggtgtatttttttttcgaagagaccgcatccgagttcgacttttttgaaaggttacacacctccagagtagccagagtgtgcaagaacgacgtgggtggggagaagctgctgcaaaagaagtggaccacctttctgaaggcgcagctcttatgtacccagccgggacaattaccatttaacgttattagacatgctgtccttctgcccgctgatagtcccaccgcccctcatatctattag

SEQ ID NO: 204518 - DNA, 711 bp, synthetic construct
  misc_feature 1..711: note = Description of Artificial Sequence: Synthetic coding sequence
  source 1..711: mol_type = other DNA
atggccctgcccgccctgggcctggacccctggagcctgctgggcttgtttctgttccaattactgcagctcctgcttccaacaacgacagcagggggcggaggccagggcccaatgccccgggtcaggtattatgctggagacgaacgacgcgctctgtcattctttcaccagaaaggcctccaagattttgatacactgctgctgtcaggagatggcaacaccctgtacgtgggcgcgcgagaagcaattcttgctctggacattcaggatcccggcgtgccaagacttaagaatatgatcccgtggccggcttctgaccggaaaaagtccgagtgcgcgttcaagaaaaaatctaacgaagaactgcaggacagctacctgctcccaatctcagaggacaaggtgatggagggcaaaggccaatctccattcgaccctgctcataagcacactgcagttctggtagatggtatgctctactctgggacaatgaacaactttttaggtagtgagcctatccttatgagaacactcggctcgcagcctgtgctgaagaccgataacttcctgagatggctgcaccacgacgcatccttcgtcgcagccataccttccacacaagtagtgtactttttttttgaggaaactgctagtgagtttgactttttcgagcgactgcatacctctcgggtcgccagagtttgttag

SEQ ID NO: 204519 - DNA, 2172 bp, synthetic construct
  misc_feature 1..2172: note = Description of Artificial Sequence: Synthetic coding sequence
  source 1..2172: mol_type = other DNA
atgccccgggtgcggtactacgccggcgacgagcggcgggccctgtcatttttccaccagaagggtctgcaggattttgacaccctactgttgagtggagacggcaacacattgtatgtgggcgccagagaggcgatcttggccctcgacatccaggatccgggcgtccccagactgaagaatatgattccatggcccgcgagtgacaggaaaaagtctgagtgtgctttcaaaaagaagagcaacgagactcagtgctttaactttattcgcgtgcttgttagctataatgtgactcacctatacacgtgtgggacctttgcgtttagtcccgcttgtacctttattgagttacaggatagctatctcctgcctatcagcgaagataaggtgatggagggcaaaggccagtccccttttgacccggcccacaagcatacagccgtcctggtcgacggaatgctatattctggtacgatgaataacttcttgggtagcgagcctatcctgatgagaacactgggctcccagcccgtgttgaaaacggacaactttctgagatggctgcaccatgacgcaagcttcgtcgcagctataccctcaacccaagtggtgtactttttcttcgaggagacagcttctgaattcgacttctttgaacggctgcacacttcccgggtcgctcgcgtgtgcaaaaatgacgtagggggtgaaaaactgctgcaaaagaaatggacaacgttcctgaaagcccagttactgtgcacacagccaggacagctgccattcaatgtgattcggcacgccgtgttgctgcccgctgatagccccactgccccccatatctatgccgtgttcacctcacagtggcaggtcggcggaacgagatcctctgcggtgtgcgccttttccttgctggatatcgagagagtattcaaaggtaagtataaggagttgaacaaagagaccagccgatggaccacataccgcgggcctgaaactaaccccagaccaggctcttgctctgtcgggcccagcagcgacaaagctttgactttcatgaaggaccacttcttgatggatgagcaggttgttggcacgcccttactcgtcaaatccggggtagagtatacgcgtcttgccgtagaaactgcccagggtttggatggccatagccacctggtgatgtatctggggaccaccaccggttctctgcataaggcagtggtgtctggtgactcctctgcccatctggtagaggagatacagttatttcctgacccagaaccggtcaggaacctccagctcgctcccactcaaggagccgtgttcgtgggtttctccggcggggtgtggagggtgccccgggctaattgttccgtgtacgaatcctgtgtggactgcgtgctggctcgagacccccactgcgcgtgggacccggagtctcgcacttgctgtctcctgtccgctccaaacttgaacagctggaaacaggacatggagagaggcaaccccgagtgggcctgcgctagcggaccgatgagtaggtcccttagaccgcaaagccggccgcagatcataaaggaggtgctggccgtgcccaattctatcctggagttaccttgtccgcatctttctgcccttgcgagctactattggtctcacggaccagccgctgtgcccgaagcctcctcaacagtctacaacgggtccttgctgcttatagtccaggatggagttggcgggttgtaccaatgttgggcaacggagaacggtttcagctacccagttatctcttactgggtggactcacaggatcagacgttggcgctcgatcccgagcttgccggcatcccacgcgagcacgtgaaagtcccattgacgcgcgtctcgggcggagcggcacttgcagcccagcagagctattggccacatttcgtcacagtcaccgttttatttgcactggtgctgagtggggccctgatcattctcgtggccagccctctacgtgctttacgtgcaaggggtaaggtccaggggtgtgagaccctgcggcccggagagaaagccccgcttagtcgagagcaacatctgcagtcgccgaaagagtgccgtacatcggccagtgatgtggatgcagacaacaactgtctaggcaccgaagtggcctag

SEQ ID NO: 204520 - DNA, 3225 bp, synthetic construct
  misc_feature 1..3225: note = Description of Artificial Sequence: Synthetic coding sequence
  source 1..3225: mol_type = other DNA
atgaagggcacctgcgtgatcgcctggctgttcagcagcctgggcctttggcggctggcacaccctgaagcgcagggcaccacccaatgccagcggactgaacacccagtgataagctataaggaaattggcccatggttacgcgagttccgggctaagaatgcagttgatttctcgcagcttacgtttgacccagggcaaaaggagctggtggtgggggctagaaactatctgttcaggctccagctcgaagacctctctttgattcaagccgtagagtgggagtgcgatgaagctacgaaaaaggcatgttactcaaaaggtaaaagcaaagaggagtgtcagaattacatccgggtgcttctggtgggaggggataggctatttacgtgcggaacaaatgccttcacgcctgtttgcaccaataggtccctctccaacctgacagaaatccacgatcagattagcgggatggctcggtgtccctatagcccacagcacaacagtacagcccttctgactgcaggaggtgaactctatgctgccactgctatggattttccgggcagggacccagccatatacagatctctcgggattctccctccactaaggaccgcccaatataactccaagtggctcaacgagcccaacttcgtgtcgagttatgacatcgggaatttcacttactttttcttcagagaaaacgcagtggagcatgactgtgggaaaacagtcttctctcgagcagcgagagtatgtaaaaacgatatcgggggacgtttcttgctggaagatacatggaccacatttatgaaggcccggcttaattgctcccggccaggcgaagtccctttctattataacgaactgcaatcgacctttttccttcctgagcttgatttaatctatgggatttttacgaccaacgtcaactctatagccgcctctgcagtgtgtgtgttcaacttgtctgctatcgctcaggcgttctccggaccgttcaaataccaggaaaatagccgctcggcctggttaccttatcccaacccaaatccccactttcagtgtggcaccgttgaccagggcctctacgtgaatctcaccgagcggaacctccaggacgcacagaagttcatcctaatgcatgaggtcgtccagccggttaccacagtgccgtcctttatggaagataattctcgttttagccacgtggccgtagatgtagtgcaggggcgagaggccctggtgcatataatctatttagccaccgattatggcactataaagaaagttcgggtccccctgaatcaaacaagcagcagctgcctgcttgaggagatagaactcttccctgaacgcaggagggagcccattcggagccttcaaattctgcactctcaaagtgtgctgttcgtcggactgagagagcatgtggttaagattccgctcaagcgctgccagttctaccgtactcgctcaacctgcattggtgcccaggacccctactgtggatgggacgtggtgatgaagaagtgtacatctctggaggaatctctttcaatgacccaatgggagcaatctatctccgcatgtccaacacgcaatctcacggtggatgggcacttcggcgtgtggtctccctggaccccttgtactcacacggacgggagtgctgtgggcagttgtttgtgcaggacaaggagctgtgactctccagcgcctcagtgcggcggttggcagtgtgagggaccagggatggaaattgcaaattgtagtagaaatggagggtggaccccttggacttcatggagcccatgttcgacaacttgtgggattgggttccaggttagacagcgctcatgctcaaaccccactccgaggcacggaggccgggtgtgtgttggtcagaatcgcgaagagaggtactgcaacgagcacttactctgcccaccccatatgttctggaccggttggggcccttgggaacggtgcaccgctcagtgcgggggtgggatacaggctcgccgccggatatgtgagaacggacctgactgcgcggggtgcaacgtcgagtatcagtcgtgcaacacaaatccttgtcccgagctgaagaaaacaacgccctggacaccctggacaccagttaacatctccgacaatggcgggcactatgagcagcgcttcaggtacacatgcaaggcccgacttgccgatcccaacctgttggaagtgggccgacaacgaatcgaaatgcgttattgcagctccgatggcactagcggctgctccaccgatggccttagcggcgactttctccgagctggccggtacagtgcccacacagttaatggagcctggagcgcctggacctcttggtcccagtgctctcgggattgtagccggggcatccgcaaccgcaagcgcgtgtgtaacaatccggaaccaaaatatggtggaatgccgtgtctcggcccttccctagaataccaggaatgtaacattcttccctgccccgtggacggagtatggtcttgctggagcccatggactaaatgttctgccacctgcggtggcggccattacatgcgcacgaggtcgtgctctaatccagcaccagcctacggtggcgacatttgtctgggccttcacacagaggaggccctctgcaacacgcaaccatgtccagagtcctggagtgagtggagtgattggtctgaatgcgaggcatctggtgtgcaagttcgcgctagacagtgcatccttttatttcctatgggttcacagtgctctggcaataccacagaaagccgaccctgcgtgttcgatagcaacttcattcccgaagtctcagtcgctcgctccagttccgtcgaagaaaagaggtgtggggaattcaacatgttccacatgatcgctgtgggtctgtcaagtagcattcttggctgtctgcttacactgcttgtttacacttactgtcagcgatatcagcagcaatcccacgacgccacagtgatccatcccgtaagccccgccccactgaacaccagtatcacaaatcacatcaataaactggacaagtacgattccgttgaggccataaaagcattcaacaagaataatttgattttggaggagaggaataagtactttaatccacacttaaccggaaagacatattcaaatgcatattttactgatcttaacaactatgatgagtactag

SEQ ID NO: 204521 - DNA, 765 bp, synthetic construct
  misc_feature 1..765: note = Description of Artificial Sequence: Synthetic coding sequence
  source 1..765: mol_type = other DNA
atgaagggcacctgcgtgatcgcctggctgttcagcagcctgggcttgtggaggcttgctcacccggaagcccaggggacgacacagtgccagagaaccgaacatccagttatatcctacaaagagatcggcccttggctcagagagtttcgcgcaaagaacgctgtagatttttcacagctgactttcgaccccgggcagaaggagctggtggtaggggctagaaattacctcttccggttgcagttggaggatctcagcctgatccaggccgtggagtgggagtgtgacgaggccacaaagaaggcttgctactctaaagggaaaagcaaggaagagtgccagaattacattcgcgtgctgctggtcgggggtgaccgcctcttcacctgtgggactaacgctttcacgcccgtctgcactaatcggtcgttgagcaatctgacagagatacacgaccaaattagtgggatggcgcgctgcccatatagcccacaacacaattctacggctttgttgactgcaggtggagagctctacgctgctactgccatggactttccagggagagaccctgctatctacaggtctctaggtatcctgccaccactgcgtaccgcccagtacaattctaagtggctgaatgagccaaacttcgtgtcttcttacgatattggcaatttcacatatttcttctttcgcgagaacgcggtggaacacgactgcggcaagacagtcttttctagggcggcgcgcgtttgttag

SEQ ID NO: 204522 - DNA, 2001 bp, synthetic construct
  misc_feature 1..2001: note = Description of Artificial Sequence: Synthetic coding sequence
  source 1..2001: mol_type = other DNA
atgaccccccccccccccggccgggccgcccccagcgccccccgggctagagtacccggcccccctgcccgtttaggtctgccgttgaggttaagactgcttctgttactctgggccgctgctgcttcagcccaagggcacctgcgatcagggccccgaatttttgccgtttggaaaggccatgtgggtcaggacagggtggactttggacagacagaacctcatacggtcctgtttcacgagcccggctccagctctgtgtgggtggggggaagagggaaagtgtatctgtttgatttccctgagggcaaaaacgcctcggtccggaccgtgaacattggttccaccaagggatcatgcctggataagagagactgcgagaattatatcacccttttagaaagacgctctgaaggacttctggcctgcggcaccaacgcccgccacccaagttgttggaatctggtgaacggaacagtggtcccgttaggcgaaatgcgcggttacgcccctttttcccccgacgagaactctctcgtgttatttgagggagatgaggtgtattccacaattcgtaagcaagagtataatggcaaaattcctaggttccgcaggatccgcggggagtccgaactgtacacttctgacaccgtcatgcaaaacccccagtttatcaaagccacgattgtgcaccaggatcaggcatatgatgacaagatttattactttttccgagaagataacccagacaaaaaccctgaggctcctctgaacgtatccagggtggcacagctgtgtagaggggaccaggggggtgagtctagtctgagcgtcagcaagtggaacacatttttaaaggccatgctggtctgtagtgacgccgctaccaacaagaactttaaccggctacaggatgttttcttgctccccgatccctcgggccagtggagagatactagggtatatggcgtcttctccaatccttggaactactccgctgtgtgcgtgtacagccttggcgacatagacaaggtcttcagaacttcctctttaaaaggataccacagcagcctccccaatccgaggcccggaaagtgcctccctgaccagcagcccatccctacggagaccttccaagtggcagaccggcatcctgaggtcgcacagagagtggagcccatgggacctctgaaaacccctttgttccacagcaaatatcattaccagaaagtcgccgtgcacagaatgcaggcaagccatggggaaacctttcatgtactctacctcactactgatagaggcactatccataaggtcgttgaacccggggagcaagagcacagttttgcattcaacattatggagatccagcctttccggcgagccgctgctatccagacaatgagcctggacgctgaaaggcggaagctttacgtgagttcccagtgggaggtttcacaggtgcccttagacctctgcgaggtctacggcggcggctgccacggctgcttgatgtctcgcgacccctactgtggatgggaccagggtaggtgtattagcatctactcatcggagaggagtgtgctgcagtcaatcaatcccgccgagccacacaaagagtgcccaaatccgaaaccagacaaagcgccattgcagaaggtctcattggcacccaactcacgctactatctttcatgcccaatggagagcagacacgcaacatactcttggaggcacaaggagaatgttgaacagtcctgtgaacccgggcaccagtcacccaattgcattcttttcatcgaaaacttaacggctcagcagtacggtcactatttctgcgaggcccaagaaggatcctacttccgggaagcacagcactggcagctcctgccagaggatggcatcatggcggagcacctgctcggccacgcctgcgccttggcagcctctttgtggctcggagtgctgcctacactgactttgggtctgctagtacactag

SEQ ID NO: 204523 - DNA, 1506 bp, synthetic construct
  misc_feature 1..1506: note = Description of Artificial Sequence: Synthetic coding sequence
  source 1..1506: mol_type = other DNA
atgcggggctacgcccccttcagccccgacgagaacagcctggtgctttttgaaggcgatgaagtgtactccactattcgtaaacaagagtataacggcaagataccccggtttcgacggatcaggggcgaaagtgaactgtatacatctgataccgtgatgcagaacccacagtttattaaagccaccatcgtgcaccaagaccaggcctacgatgataaaatttactacttcttccgcgaggataaccccgataaaaatcccgaggccccactgaacgtctcccgggttgcccaattgtgccgcggtgaccaaggaggtgagtcgtcactgagtgtctctaaatggaacactttcttgaaggctatgctagtgtgtagcgatgccgccactaacaagaactttaaccgcctccaggacgtgttcttgctgccggacccctcgggccagtggcgggacacccgcgtgtacggcgtgttttctaatccatggaattactccgctgtttgtgtgtattccctcggcgacatagacaaagttttcagaacatcgtctcttaagggctatcattcctccctgccgaaccctaggcctggcaaatgtcttcccgatcaacagccaattcctaccgaaactttccaggtcgctgacagacaccctgaggtggcccagcgcgtggaaccaatgggccctctgaaaaccccgctgttccatagcaaataccactaccagaaggttgccgtgcaccgcatgcaggcctctcacggggagacttttcacgtactctatctaacaacggacaggggcacaattcacaaagttgtggaacctggggaacaagaacacagttttgcattcaacataatggaaatccagccttttaggcgggccgcagctattcaaacgatgagcctggacgcagaacgacgcaaactgtacgtaagcagccaatgggaagtttcccaggtccccctggacctttgcgaggtgtatggaggaggctgccatggatgcttaatgtcgagggacccttattgcgggtgggaccaaggaaggtgcatttccatctattcttcagagcggtcagtgttacagtctatcaaccctgccgagcctcataaagagtgtcctaaccccaaaccggataaagctcccctgcagaaagtgagcctcgctccaaacagccgttactacttaagctgcccaatggaatcacggcatgcaacatattcctggcgacataaggagaacgttgagcagagctgcgaaccaggccatcagagtcccaattgcatcctgtttatagaaaacctgacagcacagcagtacggacattacttctgtgaggctcaggagggtagctattttcgcgaggctcagcactggcagctgctccccgaggacggcattatggccgaacacctattaggacatgcctgcgcattggcagctagtctgtggctaggcgtcttgcccacactcacactggggcttctcgtgcattag

SEQ ID NO: 204524 - DNA, 1959 bp, synthetic construct
  misc_feature 1..1959: note = Description of Artificial Sequence: Synthetic coding sequence
  source 1..1959: mol_type = other DNA
atgaccccccccccccccggccgggccgcccccagcgccccccgggctcgcgtacccggaccacccgcccggctgggtttgccactccgcctgcgcctattgctcctgctgtgggcagctgccgcctcagctcagggccacttgcggtccggccctcgcatctttgccgtgtggaagggacacgtggggcaggatagagtcgacttcggccagaccgagccccacacagtcttgtttcatgaacctggttcatccagtgtatgggtaggaggccggggcaaagtttatctctttgatttcccagaaggcaaaaacgcctcagtcaggacggactgcgagaattacataacacttcttgaaaggcgctcagagggactcttagcttgcgggaccaacgcccgccatccctcctgttggaatctggtcaacggtaccgtcgtgcccctaggtgagatgcgaggctatgctcccttcagtcctgacgagaattctctagttctgttcgaaggcgacgaagtctattctacaatacggaagcaggaatataacggaaaaatccccaggttccgccgcattcgcggtgaaagcgaactgtacacaagcgacaccgtaatgcagaatccacagtttataaaggccaccatcgtccatcaggaccaagcatatgatgataagatctactacttttttagggaagacaacccagataaaaacccagaagccccactgaacgtgtcgcgtgtggctcagctttgcaggggtgaccagggaggcgaatccagcctctctgtgtctaaatggaatacattcctaaaggcaatgttggtctgttccgacgcagccacgaacaaaaactttaatcgacttcaggatgtgtttctcctgcctgatccttctgggcagtggagggatactagggtctacggagtgttcagcaacccttggaattattccgccgtgtgcgtttacagtttaggagatattgacaaagtgtttcgcactagcagtctcaaggggtatcactcgtccttaccaaacccacgacctggcaaatgtctgcccgatcaacagccgatccctaccgaaacttttcaagtggccgataggcaccccgaggtcgctcaacgagtagaaccaatgggaccactaaaaactcccctttttcactcaaagtatcactatcagaaggtggcagttcatagaatgcaggcatcccacggcgagacatttcacgtgctgtacctgactacagatagagggaccattcacaaagtggtcgagccgggcgaacaggagcattctttcgcgttcaatattatggaaattcaaccattcaggcgtgccgccgccatccagacgatgtccttagacgccgagagacggaagctctacgtaagtagccagtgggaagtgtctcaggtacccttagacttgtgtgaagtgtacggtggagggtgccacggctgtctaatgagccgagacccctactgcggctgggaccaggggagatgtatctccatatattccagtgagaggtctgttctgcaatcgataaaccccgcagagccacacaaggaatgccccaaccctaagcctgacaaggccccactgcagaaagtgtcattggcacccaattcccggtactacttaagctgcccgatggagtctaggcacgccacatatagttggcgccataaagaaaacgtcgagcagagctgcgaaccgggacaccagagccccaattgtatcttgttcattgaaaacctcacggcccaacagtatggacattacttctgtgaagcgcaggagggatcatacttccgggaggcccaacactggcagttactgcccgaagatggcatcatggcggagcatttgctaggtcatgcgtgtgccctggccgcctccctctggctgggagtcctgccaacactgaccctcggcttactggtgcattag

SEQ ID NO: 204525 - DNA, 1209 bp, synthetic construct
  misc_feature 1..1209: note = Description of Artificial Sequence: Synthetic coding sequence
  source 1..1209: mol_type = other DNA
atgaagcccaacatcatcttcgtgctgagcctgctgctgatcctggagaagcaagccgctgtgatgggccagaaaggcgggtccaaaggtcggcttccgtccgagttttcacagtttccacacggccagaaaggacagcactactccgggcagaaaggcaaacagcagacggagagcaagggttctttcagcattcagtatacctaccacgtggacgccaacgaccacgaccagagccgcaagtcccagcaatatgatctgaatgccttgcacaaaacgacgaagtcacagcggcacctcggcgggtcccagcagctgcttcacaacaagcaggaaggcagagatcacgacaaaagtaagggccacttccaccgggtcgttatccatcacaagggcggtaaagcacatagaggaactcaaaatccatcacaagatcagggcaactcaccaagcggcaaggggatttcgagccagtattccaatacggaggagcgcctgtgggtccacggcctcagcaaagaacagacttcagtgtctggagctcagaagggcagaaaacagggcgggtcgcagagtagttatgtgctacagactgaggaactggtggccaacaagcagcagcgcgaaaccaagaactcacatcagaacaaaggtcattaccagaacgtagtcgaagtccgtgaagagcacagttcaaaggtccagacttccttatgtccagcgcatcaggacaagctgcagcacggcagcaaggatatcttcagcactcaggacgaactcctcgtgtataataagaaccagcaccagaccaagaatctcaatcaggatcaacagcacggacggaaggcaaacaaaatctcctatcagtcttcttccaccgaagaacgccgcctccactacggtgaaaacggtgtccaaaaagatgttagtcagagatcaatctattcacagaccgagaaactagttgccggtaagagccaaatccaggctcccaacccaaaacaggaaccctggcacggtgagaatgcaaaaggagaaagtggtcagagtacaaatagagagcaagacctcctctcccatgagcagaaagggaggcaccagcacggtagccatggcggattggacatagtgatcatagagcaggaggatgacagtgataggcatcttgcacagcacctgaataacgatcgcaatccgctgtttacctag

SEQ ID NO: 204526 - DNA, 1389 bp, synthetic construct
  misc_feature 1..1389: note = Description of Artificial Sequence: Synthetic coding sequence
  source 1..1389: mol_type = other DNA
atgaagcccaacatcatcttcgtgctgagcctgctgctgatcctggaaaagcaggcggctgttatgggacagaagggggggtccaaggggcgactgccatcagaattctctcagttcccacacggacagaagggccagcactactccggccagaagggtaagcaacagaccgagagtaagggctcattctcaattcagtatacctatcacgtcgacgccaatgaccatgaccaatcgagaaagtcccagcagtatgacctgaatgccctccacaagacgacgaagagtcaaaggcacctcggcggaagtcaacagctgcttcacaataaacaggagggaagggaccatgacaagagcaaggggcactttcacagggtcgtgatccatcacaagggcggaaaagcccaccggggcacccagaatccatctcaggatcaagggaatagcccgagcggcaaaggcatcagttcccagtactctaacactgaagagaggctgtgggtgcatggcctatcaaaagagcagacttccgtgagcggggctcaaaaaggccggaagcagggtgggagccaatcgtcatacgtgttgcagacagaggagttggtggccaataagcagcagcgcgagaccaagaacagtcaccagaataaagggcactaccagaatgtcgtggaggtgcgcgaggaacactcaagcaaggtccagaccagcctatgccccgcacatcaggacaaactacagcatggcagcaaagatattttttcaacgcaggacgaacttttggtctataacaagaatcagcatcagaccaagaatctgaatcaagaccaacagcacggacggaaagccaataaaatcagctaccaaagttcatccacagaggagaggcgtctgcactatggggaaaacggagtgcagaaggatgtttcccagtcttcaatttacagccagactgaggagaaggcccaagggaagagtcagaagcagataactattccctcacaggaacaggagcatagccaaaaagccaataagatatcctatcaaagtagcagcacggaagaaagaaggctgcactatggtgagaatggtgtgcaaaaagatgtctctcagcgttctatttattcacagactgaaaagctcgtcgcaggaaagtcacagatccaagctcccaatccaaaacaagaaccctggcatggcgagaacgccaagggtgagtctggacagtcaaccaacagggaacaagatctgctaagccatgaacagaagggccggcaccaacacggctcccacgggggactggacattgtcattattgaacaggaagacgactctgatcgccatctggctcagcatctgaataatgacagaaatccactgttcacgtag

SEQ ID NO: 204527 - DNA, 1749 bp, synthetic construct
  misc_feature 1..1749: note = Description of Artificial Sequence: Synthetic coding sequence
  source 1..1749: mol_type = other DNA
atgaagagcatcatcctgttcgtgctgagcctgctgctgatcctggaaaagcaggctgcggtgatggggcaaaagggaggttctaaaggccaactgccctctgggagttcccagttcccccatggacagaagggccaacattacttcggtcagaaggatcagcaacacaccaaatccaagggcagtttcagtattcagcacacgtatcacgtggatattaacgaccatgattggactaggaagtcccagcagtacgacctcaacgcactgcacaaggcaaccaaaagtaagcagcatctggggggctcccagcagctcttaaattacaaacaggagggcagagatcacgacaagtctaagggccattttcatatgattgtcattcatcacaagggagggcaagcacatcacggtacacaaaatccatcacaggaccagggaaatagtcccagcggcaagggcctctccagccagtgttctaacactgagaaaaggctgtgggtacatggtctgagtaaagagcaggcgtccgcttccggggcccagaagggtcgaacgcaaggcggaagccaaagctcgtatgtattgcagaccgaagagttggtggttaacaagcagcaacgcgaaaccaaaaatagccaccagaataaaggccactaccagaatgtggtcgatgtgagggaagaacactcctcaaagcttcagacctccctgcatcccgcgcatcaggaccgactgcagcatggccctaaagatatctttacgactcaggatgaactccttgtgtataataagaaccagcatcagaccaagaacctgtcccaggaccaggaacacggaaggaaagcccacaagatcagctatccgagctccagaaccgaggaacgccagctgcaccatggagagaagagtgttcagaaagatgtgtcgaaaggctcaattagtattcagaccgaggagaagatccacgggaagtcccaaaaccaggtgacaattcatagccaagatcaggagcatggacacaaagagaacaagatctcctatcagtctagctcaaccgaagaaagacacttaaattgtggggagaaaggcatccaaaagggagtatcgaagggctccatcagcatccagacagaggaacaaatccacggaaagtctcagaaccaggtgcgcatcccaagtcaagcccaggaatacggccataaagaaaataagatctcttaccagtccagctccactgaggagcgaagactgaattccggtgaaaaggatgtgcagaaaggagtcagcaagggatctattagcatccagacggaggagaagattcatggcaagagtcaaaatcaggtgactataccctcacaggatcaggagcatggacacaaggagaataagatgtcctaccagtcctccagcaccgaagagcggaggttgaattacgggggcaaatcaacccagaaagacgtgagccagtccagcatctcctttcaaattgagaagctggtggagggcaaaagccagatccagacacctaaccccaatcaggaccagtggtcaggccagaatgccaaaggtaaaagtggtcagtctgccgacagcaagcaggacctcctctcccatgagcagaagggtagatacaagcaggaatcaagcgagtcccataatatcgttatcaccgagcacgaagtggcccaagacgaccatttgacccagcaatacaacgaagatcgcaatcccattagcacatag

SEQ ID NO: 204528 - DNA, 447 bp, synthetic construct
  misc_feature 1..447: note = Description of Artificial Sequence: Synthetic coding sequence
  source 1..447: mol_type = other DNA
atggccgagagcgactgggacaccgtgaccgtgctgcggaagaagggcccgacagcggcccaagctaagtcgaagcaggcaattctggccgcccagagacgcggagaggacgtcgagacgagcaagaaatgggccgcaggacagaacaagcaacactctataacaaaaaatacagcaaaactggatcgagagactgaggagttacatcacgacagagtgactcttgaggtgggaaaggtgatccagcagggcagacagtccaaagggctgactcagaaagatctggcgaccaagatcaacgagaagccgcaggtcattgccgactacgaaagcggccgggccatccccaataatcaggtcctcggcaaaatagagagggcaataggcctgaagctgagagggaaggacattggaaagcccattgaaaagggcccgagggcgaagtag

SEQ ID NO: 204529 - DNA, 8121 bp, synthetic construct
  misc_feature 1..8121: note = Description of Artificial Sequence: Synthetic coding sequence
  source 1..8121: mol_type = other DNA
atgagcacctgctgctggtgcacccccggcggcgccagcaccatcgattttctgaaaagatatgcttctaacaccccctccggtgaatttcagactgctgatgaagacctgtgttactgcctggagtgcgtcgccgaatatcacaaagcgcgggatgagcttccttttctgcatgaagtgttatgggagctcgagactctgcgactgattaatcacttcgagaaatcaatgaaagccgagataggcgatgacgacgaactgtatatagtcgacaataatggcgaaatgccactcttcgatatcaccgggcaggatttcgagaacaagctgagggtcccccttctggagatcctgaagtacccatatctcttgctgcatgagcgcgtgaacgagctttgcgttgaagccctgtgcagaatggaacaagccaattgcagttttcaggtgttcgataaacaccctgggatctacctgtttttagtccatccgaacgaaatggttcggaggtgggctattcttactgcgcggaatctgggtaaagtggatagggatgactattatgacctccaggaggtactgctttgtctcttcaaggtcatcgagctcggattgctggaaagtccagatatctatacgtctagcgtgctggagaaggggaaactaatactactgccctcccacatgtacgacacgaccaattacaaaagctactggctaggcatttgcatgctgctgactatcctggaagaacaggccatggactctctgctcctcgggtcagacaagcagaatgacttcatgcagtccattctccatactatggagagagaagctgatgatgattctgtagaccctttctggccagcgctgcactgctttatggtgatacttgaccgccttgggagtaaggtctggggccagctcatggacccaatagtagccttccaaaccattatcaacaatgcatcatacaaccgggaaattcgacacatccgaaattcctctgtccgtaccaagctggagccagagtcctacctggatgatatggtgacttgttcccagatcgtgtacaattataacccagagaagacaaagaaggattctggttggaggaccgcgatctgcccagactactgcccaaatatgtatgaggagatggagacactcgcttccgtactccagagtgacatcggccaagatatgagggtgcacaacagtacatttttatggtttatcccatttgtgcagtcgctgatggatctgaaagatttgggggtggcctacatcgctcaggtagttaatcacctgtactcggaagttaaggaggttctgaatcagacagacgcagtgtgcgataaagtgaccgaattttttctgctcatacttgtaagtgtcatcgagttgcaccggaacaagaagtgcttgcacctcctgtgggtgagcagtcagcagtgggtggaagcagtggtgaagtgtgcaaagctgccgaccaccgcctttacacgctcatccgaaaagtcatcagggaactgctctaagggaaccgccatgatcagctctctgtcgttgcactcaatgccctcaaactctgttcaattagcatacgtgcagctgattcgctccttgcttaaagagggataccagcttggacaacagtcactctgcaagcgcttctgggacaagcttaacctgttcttgagaggcaacctgagcctcggatggcaattaaccagccaagaaactcacgagctgcagtcctgtctaaagcagatcatccgcaacatcaaattcaaggccccaccctgtaataccttcgtggacctcacctcagcctgcaaaattagccccgcgagttataataaggaagagagcgagcagatgggcaaaacaagccgaaaagatatgcactgtcttgaggccagcagtcctactttttctaaagagccgatgaaggtccaagactcagtactgattaaggctgataacacaattgaaggggacaacaacgagcaaaattacatcaaagacgtaaaactggaggaccacctgctggctgggagttgcctgaagcaatcttctaaaaatatttttaccgagagagcagaggaccagattaaaatcagcacaagaaaacagaaatccgtcaaggaaatcagttcgtacactcccaaagattgtacatctaggaatggtcccgagcgcggctgtgaccggggcatcatcgtcagtacacgcctcttaactgactccagtaccgacgccttggagaaagtgagcacatcaaacgaggacttttccctaaaggacgatgcgctcgctaagacatctaagcgcaaaacaaaggtacagaaggatgaaatttgtgctaaactgtcacacgtgattaagaaacaacacagaaaatctaccctggtggataatacaataaacctggacgagaacctgacggtgagtaacatagaatccttctactcacgcaaagacactggagtacagaagggggatggattcattcacaacctttctctggacccttcaggggtgctcgatgataaaaatggagagcagaaatctcagaacaacgtgctccccaaggaaaagcagctgaagaatgaggagctggttattttttcttttcatgagaataattgcaagattcaggagtttcacgtggacggaaaagaactgatcccgtttaccgaaatgacaaacgcatccgagaaaaagtccagtccatttaaagacctcatgacagtccccgagagcagggatgaggagatgagcaattccacttcagtgatatattcaaatctaacgcgtgagcaggcccccgatatctcacccaagtccgataccttgactgactcccagatagatcgcgatctgcacaaactgagcctgcttgctcaagcatcagtgataacattcccttctgatagcccccagaacagtagtcagctccaacgcaaagtgaaggaagacaaaaggtgcttcacggcgaaccagaacaatgtgggcgatacatcccgagggcaggttatcattatatccgactccgacgatgatgacgatgagaggatcctgagcctagaaaagcttacaaaacaggataaaatctgcctcgagagagagcatcctgaacaacacgtgtccactgtcaactctaaagaggaaaaaaatccggtgaaggaagagaaaaccgagacacttttccagtttgaggagagcgattcccaatgtttcgagtttgaaagctcatcagaagtgttctctgtttggcaggatcaccccgacgacaacaattccgtgcaggacggcgagaagaaatgcctagctcctatcgcaaatacaaccaatggacagggttgcactgattacgtttctgaggtcgttaagaagggagccgagggcattgaagagcacacacggcccagatctatatccgtggaggagttctgtgaaattgaagttaagaaaccaaagcgcaagcgctccgaaaaacccatggccgaagacccggtgaggcccagcagctcggtgcgaaacgaaggacagagcgatactaacaaacgcgatctggtaggcaatgactttaaaagcatcgacagaaggacctcgacaccaaacagccgcatccaaagagccactaccgtttcccagaagaaaagctccaagctttgtacatgtacagagcctataaggaaggtcccagtgagtaaaacaccaaagaagacccattcagacgccaagaaaggccagaaccgcagttctaactacctgtcttgtcgaaccacacctgccatcgtgccacctaaaaagtttcgccagtgtcccgaacctacaagcactgctgagaaactggggctgaagaaaggccctcgaaaggcctatgagctgagccagaggagtctcgactatgtggcgcaactcagggaccacgggaagaccgtgggcgttgtggacacacgtaaaaagactaagctcatctctccccagaatctgtctgttcggaacaacaagaagttgctcacttcccaggagctgcagatgcagcggcaaatacgacccaaatcccagaaaaataggagaagactgtccgactgtgagtcgacagatgtcaaaagagctggttcacacactgcacagaacagtgacatctttgtcccagagagcgaccgaagcgattacaactgtaccggcgggaccgaggtgctagctaactctaacagaaagcagctgatcaaatgcatgccttcggagccagagactataaaggccaaacatggatcacctgcaaccgatgacgcttgcccactgaaccaatgcgattcagtagtactcaatggtacagtcccaaccaacgaggttatagtgagtacaagcgaggatcccctgggcggaggcgacccgacagcccgtcatatcgagatggcggccttaaaggagggcgagcccgacagttcatctgatgccgaagaggataatttgttcttgacccagaacgatcctgaagacatggacctgtgctcacagatggagaacgacaattacaaactgattgaactaatccatggcaaggatactgtggaagtggaggaggatagcgtaagtcgcccacagctggagtctttaagcggtactaaatgtaaatacaaggattgtctggaaactaccaaaaaccaaggagaatactgtccaaaacattccgaggtcaaagctgctgacgaggacgtctttaggaaacccggcctgccccctcccgccagtaagccacttagaccgaccaccaaaatcttttccagcaaatcaacttctaggattgctggcctttctaagtccctagaaacctcttccgccctgagcccatcccttaagaacaaaagtaaaggtattcagtcaatcttgaaggtgccacaacctgttcctctcattgcccagaagcctgttggagagatgaaaaattcctgcaatgtgctgcatcctcaaagccctaataactctaaccgacagggctgtaaggtgcctttcggggagagcaaatactttcccagcagctcacccgtcaacatcctcctgagttcacagtcagtgtccgatacgttcgtcaaagaggtcctcaagtggaaatacgaaatgttcctgaatttcggccagtgtggaccaccagccagcctctgtcagagtatctctcgcccagtgccagtacggtttcataattacggggattattttaacgtcttcttcccattgatggtgctgaacaccttcgagaccgtcgcacaggagtggttgaactcacccaaccgagagaacttttaccaactccaagtgcgtaagttcccagccgattacatcaagtattgggaattcgccgtctatctcgaagaatgcgagctggccaaacagttataccctaaggaaaacgatctggtctttctggcacccgagcgaataaacgaagaaaaaaaagacacagaacggaacgacatccaggatctgcatgaatatcacagcggctatgtgcataagttccggagaacttccgtgatgcgcaacggcaagactgagtgctatctctccatccaaacacaggagaattttcccgctaaccttaatgaactggtgaattgcatagtgatatcatccttggtcacaacacagcgaaagctgaaggcaatgagcctgctgggaagtaggaatcagttagcaagggcagtcttaaacccgaatcctatggatttctgcacaaaagacctgctgactacaacatctgagcgaattatcgcttacctccgcgattttaacgaggatcagaagaaggccatcgaaacggcttacgctatggtcaagcactcgccaagcgttgccaaaatttgtcttatccacggcccgcctgggaccggaaagtcgaagaccatcgttgggttgctgtacagactgcttaccgaaaatcagcggaaaggacattctgatgagaatagtaatgctaagatcaaacagaacagggtgcttgtgtgtgccccctctaacgctgccgtggacgaactgatgaagaagatcattctggagttcaaggaaaaatgcaaggacaagaaaaatcctctagggaactgcggagacattaatttagtgcgcttaggcccagaaaaaagtatcaactccgaggtgttaaaattttcactcgattcccaggttaatcaccgcatgaagaaggaattaccctcccacgtccaggcaatgcataaacgcaaggagtttctggattaccagctcgacgagctctcaagacaacgggctctgtgtagaggcggaagagaaatccagcgtcaggaacttgacgagaatatctccaaggtgagcaaagaacggcaggagctggctagcaagatcaaggaggtgcaggggcgaccccagaaaactcagagcattatcatactggagtcacacatcatctgctgcactctgagcaccagcgggggactactactggaaagcgctttccgcggccaggggggggtgccattctcctgtgtgatagtcgatgaggctggacagagttgcgagatagagacactgaccccactcatccaccgctgcaataagctaatactggtgggtgatcctaagcagctccctccaactgtgatcagcatgaaagcccaggaatatggttatgaccagagcatgatggctcgattttgcagattgctagaggagaatgtggaacataacatgatctcccggcttccgatactacagctgacagtgcagtaccggatgcatcctgatatttgcctgttcccgtccaactatgtgtataaccggaaccttaagaccaaccggcagactgaagctatcagatgctcatctgactggccctttcagccgtacttggtgttcgacgtgggcgacgggtcagaaagacgagataatgattcctacatcaacgtacaggagatcaagttggtcatggaaataataaaactgattaaggacaagaggaaggacgtatcattccgcaacatcgggatcatcactcactataaggctcagaaaaccatgatccagaaggatttggacaaggagttcgacaggaaagggcccgcggaagtcgacaccgttgacgctttccaaggtcggcagaaggattgtgtcattgtgacttgcgtgcgtgcaaacagtattcaggggtcgatcgggttcttggcgagcctacagaggctgaacgtcacaatcactagggcaaaatatagtctgttcatcttgggccacctcaggaccctgatgcagctgctgcctcgcagtttctgcgtgcacgtgaaccactccccttttttttcccctgaaccgaagtacctgcattgggcactcaaggaaaatcaacattggaaccagttaattcaggacgctcaaaaacggggcgccattatcaagacctgcgataagaattatagacatgatgccgtgaaaattttgaagctcaaacccgtcttgcagagaagtctgacgcaccccccaactattgccccagaaggatctcgccctcagggggggctcccatcaagtaagctagattcaggattcgctaaaacctccgtggccgctagtctgtatcataccccgagtgactccaaagagataactctcacggtgacgtctaaggatcccgaacgcccgccagtccacgatcagctccaagatcccaggttgctcaaacgcatgggcatagaagtcaaaggtgggatcttcctctgggatcctcagccttctagcccccaacatcctggggctacacccccaacaggcgaacccggtttccctgttgtgcaccaggacctgagccacatccagcagccagctgcagtagtggctgctctgtcttctcacaagccaccagtgcgtggggagcccccggcagccagtcccgaggcaagtacctgccagagcaagtgcgacgatcccgaagaggagctctgtcaccgccgtgaagccagagccttcagtgaaggggagcaggagaagtgtggatctgaaacccaccatacacggcgcaacagtagatgggataaacggaccttagagcaagaggactcatcttccaagaaaaggaagttgctgtag

SEQ ID NO: 204530 - DNA, 7935 bp, synthetic construct
  misc_feature 1..7935: note = Description of Artificial Sequence: Synthetic coding sequence
  source 1..7935: mol_type = other DNA
atgagcacctgctgctggtgcacccccggcggcgccagcaccatcgattttctcaaacgatatgcttctaacacacccagcggcgagttccagaccgccgacgaggacctgtgctactgcttagagtgcgtggcagagtaccacaaggcgcgagacgagctgccctttctgcatgaggtgctgtgggaattagagactctgagactgattaatcacttcgagaaaagtatgaaggctgaaatcggggacgatgacgaactctatatagtggataataacggagagatgcccctgtttgacattacgggccaagacttcgagaacaagctccgcgttccactgctggagattctcaagtatccgtacctccttctccacgaaagagtcaatgagctatgtgtcgaggctctgtgtcgcatggaacaggccaactgctcgttccaggtgtttgataagcatccaggaatctacctatttcttgtccacccaaatgaaatggtcagacgatgggccattctgaccgcccgaaatctaggcaaggttgatagagacgattactacgaccttcaagaagtccttttgtgcctctttaaggtgatcgagttgggactgctcgaatctcccgacatttacacaagtagtgtgctggaaaagggaaagctaattctcctcccgtcacacatgtacgacaccacaaactataaatcatattggctagggatctgcatgttactgaccatactcgaggagcaagctatggatagcctgctcttgggaagtgataaacaaaatgattttatgcagtctattctgcacaccatggagagagaggctgacgacgatagtgtggaccccttttggccagcacttcactgttttatggtaatcctcgatagattagggtcaaaagtgtggggacagctcatggatccaatcgtcgcgttccagactatcatcaataacgcatcttataaccgcgagattcgtcacataagaaatagtagcgttaggaccaagctggaacccgagtcttatttggacgacatggtgacctgcagccagattgtatacaactataatcctgaaaaaacaaagaaagattccggctggagaactgcaatttgcccggattactgcccaaacatgtacgaagaaatggaaacccttgccagcgtcctccagtctgacatcggccaggacatgcgggtgcacaactccacattcctttggtttatacccttcgtccagtcactgatggaccttaaagacctgggtgtagcctacattgcgcaggtagtcaaccatctctacagcgaagtgaaggaggttctgaatcagactgatgcggtgtgtgacaaggtgacagagttcttcctattaattctggtttccgtgatcgagctgcatcgcaacaagaagtgcctccacctcctgtgggtctcttcacagcagtgggtcgaggccgtggttaagtgtgcaaagttgccgacgacggccttcaccagatcttctgagaaaagctcagggaattgcagtaagggcaccgcgatgatcagcagtctgagtcttcacagcatgccctcaaattctgtccagcttgcatatgttcagctcatccggtctctgctcaaagagggctaccagctcgggcagcaatctctgtgtaagcgattctgggacaagcttaatctctttttacgcgggaacctttcactgggttggcagctgaccagccaggaaactcacgagttgcagagttgtctcaaacaaatcatcagaaacattaagttcaaggcaccaccttgtaatactttcgtggacttgacctccgcttgtaaaatttctccagctagttataacaaagaggagtctgagcagatgggaaaaaccagccgcaaagacatgcattgtctcgaagcaagcagtccgactttttcaaaagagcctatgaaggtgcaggactctgtgcttattaaggccgataacactattgaaggcgataataacgagcagaactatatcaaagacgtcaaactagaggaccatctactggccggcagctgtctcaagcagagctccaaaaatattttcacggaacgcgcggaagaccagatcaagatctccacacgaaaacagaaatctgtcaaagagatttcatcatacacacctaaagactgtacgtctaggaatggacccgaacgtggctgcgacagaggcattattgtttccacacgccttttaactgacagttccacggatgcactcgagaaagtgagcacaagcaacgaagatttcagcctgaaagatgacgctctggcaaaaaccagtaaaagaaagaccaaggtccaaaaggatgaaatctgtgcaaaactcagccacgtgatcaaaaaacagcatcggaaaagtacactggtggacaacaccattaacctcgacgagaatcttacagtgtccaacatcgaatctttctacagtagaaaagatacgggggtgcagaaaggtgacgggttcatccataacttgtcactggatcccagcggcgtgctcgatgacaaaaacggcgaacagaagtcacagaataatgtgctccctaaggagaaacagctgaaaaatgaggagttggtgattttttcctttcacgagaataattgcaaaattcaagaatttcacgtggatggcaaggaactgattccattcaccgaaatgactaatgcttctgaaaaaaagtccagtccctttaaagaccttatgaccgtaccagagtctagggacgaagagatgagtaacagcaccagcgttatatactctaaccttacgcgcgagcaggcgccagacatctcccccaaatcagataccctgaccgacagtcagatcgacagggacctacacaagctgtctttactggctcaagcctcggtaatcacattccccagtgacagcccgcagaactcatctcagctgcagcgcaaagtcaaggaggacaaacgatgttttactgccaaccaaaataacgtaggtgatacctcacgaggccaagtgattatcatatctgactctgatgatgacgacgacgagagaattctgtctttggagaaactgacaaaacaagataaaatatgcttagagagagaacaccctgagcagcacgtctccacagtcaactctaaggaagagaaaaacccagtgaaggaggagaagacagaaacactgttccagtttgaggagtctgactcccagtgctttgagttcgagtcctctagcgaagtattctcagtgtggcaggatcatcccgatgacaacaacagtgttcaggacggagagaagaagtgtcttgctcccatcgccaacacaactaacggtcaagggtgcactgactacgtatctgaggttgtcaaaaaaggagcagaagggatcgaagagcacacccggccacgttcaatctcagttgaagagttttgcgagattgaggtgaaaaaaccaaagcgcaagcgtagcgagaaaccgatggctgaagatcctgtcagaccgtcatccagcgtgagaaacgaaggtcagagtgataccaacaagcgagatctggtcggtaacgacttcaagagtatcgatcggcgtacatcaacacccaacagcaggattcaaagagcaacaaccgtctcccagaaaaaaagctccaagctctgcacttgtaccgaacctatccggaaagtgccggtgtcaaaaacaccgaagaagacgcattccgatgcaaagaaagggcagaataggtcttctaattatctgagctgcaggactactccagccatcgtgccccctaaaaaattcagacagtgccccgagcctacctctacagcagagaagcttggcttgaagaagggacctagaaaggcttacgaattgagccagcgctctctggattacgtcgcacagctgagagaccacggtaagactgtcggcgttgtggatacacggaagaaaacaaagctgatcagtcctcagaatctcagcgtgcgcaacaataagaagctgctgacctctcaggaacttcaaatgcagcggcagatccggcccaagtctcagaaaaacagacgtcgattgagcgactgtgaatcaactgatgtgaaacgagcaggtagccatactgctcaaaatagcgacattttcgttcctgagtctgatcggtctgactacaattgcacgggaggaacagaagtgttagctaatagcaaccgcaagcagcttataaagtgtatgccgtctgaacctgagacgataaaggcgaagcacggcagccccgctacagacgatgcatgtcctctcaatcagtgtgactctgtggtccttaatgggaccgtgcctaccaatgaggtcatcgtgtcaaccagtgaggatccgctgggaggcggcgacccaactgcgaggcacattgaaatggctgctttgaaagagggagagcccgattctagctctgatgcagaggaggacaaccttttcctaacccagaatgaccctgaggatatggatttatgcagccagatggagaatgacaactataaacttatcgagctgattcacggaaaagacactgtagaagtggaggaggactcagtgagcaggccacagcttgaatccctctccgggactaagtgtaaatataaggattgccttgaaactacgaagaaccagggtgaatattgtccaaaacatagtgaagtgaaggcagctgatgaggatgttttcaggaagcctggtctccccccccctgcaagcaaacctttaagaccaaccacgaagatcttctcctcaaaatccactagcaggatcgcaggactctccaagtcacttgaaactagttcagccctgtcaccgtcactgaaaaataagagcaaaggcattcaatccattctcaaggtgccacagcccgttccactcattgcccagaaacctgtgggcgagatgaaaaactcttgcaatgtgttgcatccacaatcacccaataactccaatcgccagggttgtaaagtccctttcggagagtccaaatactttcctagctccagtcctgttaatattctgctgtcctcccaatccgtcagtgacacgttcgtgaaggaagtgctcaagtggaaatacgagatgtttcttaatttcgggcaatgcggccctcctgcttctctttgtcagtcaatctctcgcccagtgcctgtgcggttccacaattacggtgactatttcaatgtgttcttccccctgatggtgctcaatacctttgagacagtggcacaggaatggcttaatagccctaatagagagaatttctatcagctccaggtcaggaaatttcccgcggattatatcaagtactgggagttcgcagtttacctggaagaatgtgagttggcaaagcagttgtaccccaaggaaaacgatctggtgtttctggctcccgaaaggattaacgaagaaaagaaggacaccgaaaggaatgatatccaggacttgcatgagtatcactccggatatgtgcataaatttaggcgaacgagcgtgatgcgcaatggaaaaaccgaatgttatctgagcattcagacccaagaaaacttccccgcgaacctcaatgagctcgtcaattgcatcgttatttcttctctggtgactacacagcggaaattgaaagcaatgtcccttttagggtcacgaaatcaactggctcgcgctgtcctcaaccccaaccccatggatttctgcaccaaggacctgcttactactacatccgaacgcatcatcgcatatcttagggacttcaacgaggatcagaaaaaagccatcgaaactgcctacgccatggtgaaacacagtccatctgtggcgaaaatatgtttaatacacggccccccgggtacaggtaaatccaagaccattgtgggcctactgtatagactactgactgagaaccagaggaagggtcactctgacgagaacagtaacgccaaaattaaacaaaaccgggtcctggtctgcgctccatccaacgctgcagtggatgaactgatgaagaaaatcatcctcgagtttaaggaaaagtgcaaggacaagaaaaaccccttgggcaactgtggagacattaaccttgtgcggctgggccccgaaaagtcaataaacagcgaggttctcaagttttcattggattcgcaggtgaatcatcgaatgaaaaaagaacttccatcacacgtccaggcaatgcacaagcgcaaagaattcttggactatcagctcgatgagctttctagacagcgggctctctgtaggggaggccgagagatacaaagacaggaactggatgaaaacataagcaaggtgtccaaggagagacaagagctggccagcaaaatcaaggaggtccagggaaggcctcaaaaaactcaatcaatcattatactggagtcccatataatctgctgtacattgtctacaagcggggggctcctgctggaaagcgcattccgggggcaggggggagtgcccttcagctgtgtgatagtggatgaggctgggcagagttgcgagattgaaacacttactccgttgattcacagatgcaataaactgatccttgtaggggatcctaagcagctgccacctacagtgatctccatgaaggcacaggaatatgggtatgatcaaagtatgatggctaggttttgtagactgcttgaggagaacgttgagcacaacatgatatcgcgattacccattcttcagctgacggtacaatatcggatgcatcccgacatatgcctgttccctagcaattatgtatataaccggaacctaaaaaccaaccgccagaccgaggccattagatgcagctccgattggcccttccagccctacctggtctttgacgtaggagatgggtccgagcggagggataacgatagctacattaacgtgcaggaaattaaactcgttatggaaatcatcaagctcataaaagacaaacgaaaggatgtgagttttcgtaacattgggattataacacattataaagcacagaagacaatgatccagaaagacctcgacaaagaatttgatcgaaagggctttttggcctccctccagcggcttaatgtgaccattacaagagcgaagtatagcctgttcattcttggacatctgcggacactgatggaaaatcagcattggaatcagttgatacaggatgctcaaaaacgcggtgcaatcataaaaacgtgcgacaagaattatcgtcacgatgccgtgaagatactcaagctgaaacccgtccttcagaggagtctgacgcaccctccgaccattgccccagaagggtcccggccccagggaggcttgccaagctcaaaactcgactctggctttgccaagacgagtgtggccgcaagtctctaccataccccctcagactcaaaagaaattaccctgaccgttacatcgaaagacccagagcgcccccctgttcatgatcagctccaggacccccggctgctcaagaggatgggcatagaagtcaaaggaggcatattcctatgggacccccagccaagcagcccgcagcatcccggcgctacaccccctaccggggagccaggcttcccggtcgtccatcaggacttgtcccacatacagcagcctgccgccgtcgtggctgcactctcttcccacaagcccccagttaggggcgaacctcctgcagcttccccggaggcgagcacctgccaaagcaaatgtgatgatcctgaagaggagttgtgccatcgccgagaggccagagctttctcggagggtgaacaggagaagtgtgggagtgaaacccatcatacgaggcgcaacagccgatgggacaaacgaacactggagcaggaggatagctcctccaagaaacggaaattgttatag

SEQ ID NO: 204531 - DNA, 2847 bp, synthetic construct
  misc_feature 1..2847: note = Description of Artificial Sequence: Synthetic coding sequence
  source 1..2847: mol_type = other DNA
gtggcccaggagtggctgaacagccccaaccgggagaacttctaccagctgcaggtacggaaattccctgcggattatattaagtactgggagtttgcagtgtatctggaagaatgtgagcttgccaagcaactgtatcccaaggaaaatgatcttgtgttcctggcccccgagagaattaatgaggaaaagaaagacaccgaaagaaacgacatccaggacctccacgaatatcattctggttacgtgcataagtttaggcggacaagtgtcatgagaaacggcaagactgagtgctatctgagtattcagacacaggaaaacttccccgcaaaccttaatgagctggtgaattgcatcgtcattagtagcctggtaacgacccagagaaaattgaaggctatgtcccttctgggctcccgaaaccaattggcgagagcagttctgaaccctaaccccatggatttctgcactaaagacctactcactaccacttctgaaaggataatcgcctacttgagggacttcaatgaagaccaaaagaaagccattgagacagcatacgctatggtgaagcactcaccctccgttgcaaagatctgccttatacacggacccccgggaacaggcaaatccaagaccattgtggggcttctttacaggctgcttacagagaatcagcggaagggacattctgacgagaacagcaacgcaaagattaaacaaaacagggttctcgtctgcgccccgtccaatgcagccgtcgacgaattgatgaagaaaattatcctggagtttaaggaaaagtgcaaagacaaaaaaaacccgctgggcaactgtggcgacatcaatctagttaggctcggtcccgagaagagcattaatagcgaagtcttaaagttttctctggattcgcaggtgaatcataggatgaaaaaggaactcccctctcacgtgcaggcaatgcacaagagaaaagaatttctggattatcagctggatgagttgagtaggcagcgcgcactctgtcgaggtggccgcgagattcagcgccaggaactggatgaaaatatcagtaaggtatccaaggaacgacaggagctggcaagcaagataaaggaggtgcagggcaggccccagaagacgcaaagcattatcattctggagagccacatcatttgttgcaccttgtcgacgagcggtggactgttactggaatccgccttcagggggcagggaggcgtgccattttcatgtgtgattgtagatgaagccggccagtcatgtgagattgaaacgttgacccccttaatccacaggtgtaataaactcatcttagtcggcgatccgaagcagttgcctccaactgtgatttcaatgaaagcacaggaatacggatatgatcagagcatgatggccaggttctgccgcctgctcgaggaaaatgtcgagcacaacatgatttccaggctgccaatcctgcagctgacggtgcagtacaggatgcacccagacatctgcttgttccccagcaactacgtgtataaccggaatctaaagacgaaccgacagactgaggctattagatgctcgtccgactggcctttccagccctatctggtgtttgacgtgggtgatggcagcgaaaggcgagacaacgacagctatattaatgtacaggaaataaagttggtgatggagatcataaaactcattaaggacaaaaggaaagatgtctcctttcgcaacatcggcatcatcacgcactacaaggcgcagaagacgatgatccaaaaggacttagacaaggaattcgaccgaaaaggtccagctgaggttgataccgtcgacgctttccaggggcggcaaaaagattgcgtgatagtcacgtgtgtgagggcaaatagcatacagggctctatcggatttctcgcctcgctgcagcgcttgaacgtcaccatcaccagagctaagtattccctttttattcttgggcatctgcgcacgctgatgcagcttctcccaagatcattctgcgtgcatgtcaatcacagtccctttttctcgcctgaacccaagtatctgcactgggctttgaaggaaaatcagcattggaaccagctcatccaagacgctcagaagcggggagccatcatcaaaacctgtgacaaaaactatcggcacgacgccgtgaagattctcaagttaaaacctgtgttgcagcggagcctgacgcacccccctacgatcgcccccgagggaagcaggccacaggggggtctgcccagtagcaagctggatagtggttttgccaagacatctgtcgcggcgagtctgtaccatactccttccgactccaaagaaatcactcttaccgtgacatccaaggatcccgagcgccctccagtgcacgaccagcttcaggatcctagattactgaagcggatgggaatcgaggtcaagggcggaatctttttgtgggacccgcaacccagtagcccccaacatcccggagcgacacccccaaccggcgagccaggctttccggtggtccatcaggatctaagccatatccagcagcccgcggcagttgtggctgcactttcctctcataaaccaccagttaggggtgagcctcctgccgctagcccagaggcgtctacctgtcaaagtaaatgcgacgacccggaggaggagttgtgccatagaagagaagcccgggccttctccgaaggagagcaagaaaaatgtggctctgagacgcatcataccaggcgcaattccagatgggacaagaggactctggaacaggaggacagcagcagtaagaagaggaagctcctctag

SEQ ID NO: 204532 - DNA, 1269 bp, synthetic construct
  misc_feature 1..1269: note = Description of Artificial Sequence: Synthetic coding sequence
  source 1..1269: mol_type = other DNA
atgagcaccagctacggctgcttctggcggcggttcatccacggcatcggacgaagcggggacatctccgcggtccaaccgaaagcagctggttcatctcttcttaacaagatcaccaatagtcttgttcttgacattattaaactcgcgggtgtacatactgtcgctaactgtttcgtggtgcccatggcgactgggatgagtctgaccctttgtttcttgactctgcgacataaacgtcccaaagctaagtacattatctggccccgaattgatcagaagtcttgtttcaaatcgatgattaccgctgggtttgaacctgtggtgatcgagaacgtgctggaaggggacgagcttcggacagatctcaaggctgtcgaagcgaaagtacaagaactgggtcctgattgcatactttgtatccattccaccacatcatgtttcgcgcccagagtgcctgataggctagaggaactggccgtcatctgcgcaaactacgacatcccccacatcgtgaacaatgcatacggcgttcaatcttctaagtgcatgcaccttatccagcagggggctagagtgggccggatcgatgctttcgttcagagtctcgataaaaatttcatggtgcctgtgggcggtgctatcattgccggttttaatgattcgttcatacaggagatttctaagatgtacccagggagggcgtcagcttcaccctcccttgacgtactaatcacactgctctctctcggttctaacgggtacaagaagcttctcaaagaacggaaggaaatgttcagctatttgtctaatcagatcaagaaattatccgaagcttacaatgaacgtctccttcacactcctcataaccctatcagcctggcaatgactctcaagacactggatgagcaccgcgacaaggccgtgacacaacttgggtcaatgttgttcacccgacaggtctcgggagcccgagtggtgcctcttggttccatgcagaccgtgagtggttatacgttccgcggcttcatgtcccatacaaacaactatccctgcgcctaccttaacgcggcaagcgccataggaatgaagatgcaggacgtggacttgtttatcaagcggttggacagatgcctgaaagcagtccgcaaagaaagaagtaaagagagcgacgataattacgataagactgaggacgtcgatatcgaggaaatggctcttaagctggataatgtcctgctggatacataccaagacgccagttcatag

SEQ ID NO: 204533 - DNA, 1506 bp, synthetic construct
  misc_feature 1..1506: note = Description of Artificial Sequence: Synthetic coding sequence
  source 1..1506: mol_type = other DNA
atgaaccgggagagcttcgccgccggcgagcggctggtgagccccgcatacgtgagacaggggtgcgaagcgcgtcggtctcatgaacatctgatcagactgttactggaaaagggaaagtgtccagagaacgggtgggatgagtcgacactggagctctttcttcacgaacttgccatcatggatagtaacaactttctgggcaattgcggcgtaggagagagagagggacgtgttgctagtgctctcgtggctcgcaggcactatcggtttattcatggcataggaaggtcaggtgatattagcgcagttcagcctaaggccgctggcagctcactgctcaataaaataacaaatagcttagtcctggacatcataaaactcgccggtgttcacacagtcgctaattgctttgtggtcccgatggcaacagggatgtccctaactctctgtttcctaacattgcgacacaagcggcccaaggccaagtatatcatatggccgcgaatcgaccagaagagctgctttaagagcatgattactgccggattcgagcccgttgtcattgagaatgttctggagggcgacgagctgaggaccgatctgaaagcagtggaggctaaggttcaagagcttggtcccgattgcatcctgtgcatccactcgacaacatcctgctttgcacccagggtcccagaccgtttggaggaactggccgtgatttgcgctaattacgacatcccacacatagttaataatgcttacggggtgcagtccagcaagtgtatgcatctgatacagcagggcgccagggtgggccggatagacgcctttgttcaatcgctagataaaaattttatggtcccagtgggcggcgccataatcgcggggttcaacgattcttttattcaagagatatctaagatgtatcccggacgggcttctgcatccccttccctcgatgtacttatcacacttctttccctgggcagcaatgggtacaagaaactcctgaaggaacgaaaagagatgttttcctatctgagcaatcagatcaaaaaactgtctgaggcctacaatgagagactgcttcacactcctcacaaccctatctccctcgctatgactttgaagactttggacgagcacagagataaagctgtgacccagttaggatctatgctgtttacccgccaggttagcggcgcacgcgttgtcccgctgggctcaatgcagactgtgtccggctatacatttagggggttcatgagccacacaaacaattatccctgcgcctacctgaatgctgcatctgccatcggaatgaagatgcaggacgttgacctcttcataaagcgcctcgatcgatgtttaaaggcagtgcggaaggaacggagcaaagaaagcgacgataattatgacaagactgaggatgtggacatagaggagatggccctaaaactggacaacgtcctcctggatacctaccaggacgcatcaagttag

SEQ ID NO: 204534 - DNA, 903 bp, synthetic construct
  misc_feature 1..903: note = Description of Artificial Sequence: Synthetic coding sequence
  source 1..903: mol_type = other DNA
atggagggcgtgctgtacaagtggaccaactacctgaccggctggcagccacgatggttcgtgctggataatgggatcctgtcgtattatgatagccaggacgacgtatgtaagggatcaaaaggctccatcaagatggccgtctgtgaaattaaggttcacagcgcagacaataccaggatggagctgattatccctggggaacagcatttttatatgaaagctgtgaacgcagcagagagacaaaggtggctcgtggcccttggttcctcaaaggcctgcttaacagatacccgtacaaaaaaagagaaggaaatcagtgaaacatccgaatcgctcaaaacaaaaatgtccgagttaagactttactgcgaccttctgatgcagcaggtgcacacaatccaggaattcgtccatcatgatgagaaccattctagtccatccgcagagaacatgaacgaggcctcttcattgttatccgcaacctgcaatacttttataacgacccttgaagagtgcgtgaagatagccaacgcaaagtttaaaccagaaatgtttcaactacatcaccccgatccacttgtttccccagtgtcaccttctccggttcagatgatgaagagatcagtgtcccaccccgggagctgcagcagtgagagatcgagtcactctataaaagagcctgtatcgactctccaccgcctctcccagcgacggagaagaacatatagcgatacagactcatgtagtgacatccccctcgaggatcctgaccgccccgtgcattgcagcaagaacaccctgaacggggacttggcatcggctaccattcctgaagagtctcggctgatggccaaaaagcagtccgagagtgaagataccctcccctctttcagctcctag

SEQ ID NO: 204535 - DNA, 1104 bp, synthetic construct
  misc_feature 1..1104: note = Description of Artificial Sequence: Synthetic coding sequence
  source 1..1104: mol_type = other DNA
atggacaaggagtacgtgggcttcgccgccctgcccaaccagctgcaccgcaaatcagtaaaaaaaggatttgattttactctcatggtggcgggcgaatccggcctggggaagagtaccctgatcaatagtttgtttttaactaacttatatgaggatcgacaggtacctgaagcctctgcaaggcttacccagaccctcgccattgagaggcggggtgtcgagatcgaagagggcggtgtaaaggtgaaactaaccctggtggacacgccaggctttggcgactcggtcgattgttccgattgctggctgcctgtggtcaaatttatagaggagcagtttgagcagtatctcagggatgaaagcgggctgaatcgtaagaatatccaagactctcgcgttcactgctgtctttactttatttctcctttcggcagaggtttaagacccctggacgttgctttcctgcgcgccgttcacgaaaaagttaacatcattccagtgatcgggaaagccgacgccctgatgccccaggagacacaggccctgaagcaaaaaataagagatcagctgaaagaggaagaaatccacatctaccagttccccgagtgtgatagtgacgaagacgaggatttcaaacgtcaagacgctgagatgaaggagagtatccccttcgcagtcgtgggttcttgcgaggtggttcgcgacggcggaaaccgtcccgtgcgaggccggaggtacagttggggcacagtggaggtggaaaatcctcaccattgcgacttccttaatctgagaaggatgctcgtacagactcacctgcaggacttgaaggaggtaacacacgacctgttgtatgaagggtaccgggcaaggtgcctgcaatcattggccagacccggggcccgtgatcgagccagccggagcaagttatctagacagtccgctacggagataccactgccaatgctacctcttgctgacacagagaagctgattcgagaaaaagatgaggaactgagacgaatgcaggagatgttagaaaaaatgcaggcacaaatgcagcagtctcaggcccagggagagcaatcggacgctctgtag

SEQ ID NO: 204536 - DNA, 1104 bp, synthetic construct
  misc_feature 1..1104: note = Description of Artificial Sequence: Synthetic coding sequence
  source 1..1104: mol_type = other DNA
atggacaaggagtacgtgggcttcgccgccctgcccaaccagctgcatcgcaagagcgtgaagaagggctttgattttactctcatggttgctggagaatctgggttgggaaagagtacactgatcaattccttgtttctgacaaacctgtatgaggatcggcaggttccagaggcaagcgccaggctcacgcagactctggccatcgagcggagaggtgtggaaattgaggaaggtggagtcaaggtgaaactgaccttggtggatacaccaggctttggtgattctgtggactgctcagactgctggctgcctgttgttaagttcatcgaagagcagtttgagcagtatcttagagatgagtcaggcctcaacaggaagaacattcaggatagccgggtgcactgctgcttgtacttcattagcccattcggccgtggcctgagacctctggacgttgccttcttgcgcgccgtgcacgagaaggtgaatataataccggtcattgggaaagccgatgcactgatgccacaggaaacacaggccttaaaacaaaaaatccgcgatcagcttaaagaagaggaaattcatatttatcagttccctgagtgtgactccgacgaggatgaagactttaaaagacaggatgcggaaatgaaagaaagtatcccctttgcagtggtcggctcctgcgaagtagtaagagatggaggcaatcgaccagtgcgtggaagacgctacagctggggaaccgtagaagtcgagaatccccaccactgcgacttcctgaacctgcgaaggatgttagtgcagacccatctccaggacctgaaagaagtgactcatgacctgctttacgaaggttaccgggccaggtgtctgcaaagcctcgctcggcctggtgccagggatagggcctctcgctccaagctttctcgccagtccgctactgaaatcccactcccgatgctcccgctcgcggatactgagaagcttattagagagaaagatgaagagctccgaaggatgcaggaaatgctggaaaagatgcaggcccagatgcaacagtcccaggctcagggcgagcagtcagatgctctctag

SEQ ID NO: 204537 - DNA, 966 bp, synthetic construct
  misc_feature 1..966: note = Description of Artificial Sequence: Synthetic coding sequence
  source 1..966: mol_type = other DNA
atgatgaaccggtactaccagcccatcgtggactacatcgacgcccagttcgaagcttacctgcaagaagagcttaaaattaaaagatctctgttcacttatcacgattcaagaatccatgtatgcctttattttatatctcccacaggtcactccctgaagacactggacctcctgactatgaagaatctggactctaaagtcaacatcatccctgtgattgccaaggccgataccgtgtctaagacagagctgcagaagttcaagattaagctgatgagtgaactggtcagcaacggggtccagatctatcaatttcccacagacgacgacacgatcgcgaaggtcaatgccgcgatgaatggacaactgcccttcgccgtggtcggcagcatggacgaggtgaaggtggggaacaaaatggttaaagcacggcagtatccctggggcgtggtccaagtcgagaacgagaatcattgtgattttgtgaagctgcgggaaatgctgatttgcactaatatggaggacttgcgtgaacaaacccacactcgacactatgagctgtatcgcaggtgtaaacttgaagaaatgggttttacagacgtgggaccagagaataagcctgtgagcgtgcaggagacatacgaggctaagagacatgaattccacggcgagcggcagcggaaagaggaggaaatgaaacaaatgtttgtgcagagagtgaaagaaaaagaggccatactgaaggaagcggagcgagaacttcaggcaaagttcgagcatctgaaacggcttcaccaagaggaacggatgaagctggaagagaagaggaggctgctggaggaggaaatcatcgcatttagtaaaaaaaaggcgacatcagagatctttcacagccagagcttcttagccacaggcagtaatctgagaaaggacaaggacagaaagaactccaattttctctag

SEQ ID NO: 204538 - DNA, 954 bp, synthetic construct
  misc_feature 1..954: note = Description of Artificial Sequence: Synthetic coding sequence
  source 1..954: mol_type = other DNA
atgagcggccacgtgggcttcgagagcctgcccgaccagctggtgaacagatcaatccaacaaggtttttgcttcaacattctatgtgtcggcgaaacaggtatcggcaaaagcactttaattgacacactctttaacactaacttcgaagactacgaaagctctcacttctgcccgaatgtcaagctgaaggctcaaacgtacgaactgcaagagagtaatgtccagctcaagcttactattgtgaatacagtaggttttggcgaccagattaacaaagaggagtcttaccagccgatcgtcgactatatcgatgcccagttcgaggcttacctgcaggaggagctgaagatcaagcgcagcctgttcacgtaccacgattcaagaattcacgtgtgcctgtattttatctcacccacaggccactccctgaagacgctggatcttcttacaatgaagaatttggacagtaaggtaaatataatcccagtgatcgctaaggctgacactgtgtccaaaacagagctgcaaaaattcaaaatcaagctaatgagcgagctagtatcgaatggagtgcagatctatcaattccccacagatgacgacaccattgctaaggttaacgcagccatgaatgggcagctaccattcgcagtggtgggtagcatggatgaggtcaaagtcggtaacaagatggtgaaagctcggcagtacccctggggagtggttcaagttgaaaacgagaatcactgcgatttcgtgaaactgcgagagatgttaatctgcacaaacatggaagacctcagagagcagacccatacacgccactatgagctgtatcgcaggtgtaaactggaggagatgggatttacagatgtggggcccgagaacaaacccgttagttaccgacccaacctgagcacactgcgggacttcactaaaaagagggagtag

SEQ ID NO: 204539 - DNA, 1635 bp, synthetic construct
  misc_feature 1..1635: note = Description of Artificial Sequence: Synthetic coding sequence
  source 1..1635: mol_type = other DNA
atggccagcagcgaggtggcccggcacctgctgttccagagccacatggccacaaaaaccacctgcatgagctctcagggtagtgatgacgagcagataaaacgcgagaatatcagatctctcactatgtctggccacgtgggctttgaatccttacccgatcagcttgtcaatcgtagtatacagcagggcttctgttttaatatcttgtgcgtgggagagactggaataggcaaaagcacactgatcgacacactttttaacaccaatttcgaggattatgaaagcagtcacttttgtcccaatgtgaaactcaaggcacaaacctacgaacttcaagaatcgaatgtgcaactgaagctgactatcgtcaataccgttggatttggagatcagataaacaaggaggagagttatcagcctattgtggattacattgatgcacaatttgaagcatacttgcaggaggagctgaaaatcaagcggtccttgttcacataccacgacagcaggatacatgtatgtttgtatttcatttccccaactggccacagcctgaagacgctggaccttctaaccatgaagaaccttgactcaaaagtcaacatcattcccgtgattgccaaagcagacacggtcagtaagaccgaactgcagaagttcaagatcaaacttatgtcagagcttgtctccaacggcgtgcagatctatcagttccccaccgatgatgacaccatagcgaaggtgaacgctgccatgaatgggcagctgcccttcgccgttgtcggcagtatggatgaagtgaaggtggggaataagatggttaaggcacgccagtacccgtggggcgtggttcaggtggaaaatgaaaaccattgtgattttgtgaaactgcgggagatgctcatctgtaccaatatggaagaccttcgcgagcagacccatacaagacattacgagctctataggaggtgtaagctggaagagatgggctttacagacgtcggtccagagaataagccagtgagtgttcaggaaacctacgaggcaaagaggcatgaattccacggtgaacgccaaaggaaggaggaagaaatgaagcagatgtttgttcaaagggtaaaagaaaaagaagccatcctcaaggaggccgagcgcgaattacaagcaaagttcgaacacctcaaaagactgcatcaggaggaaaggatgaaactggaagagaagcgtcggctcctggaggaggagatcattgccttctcaaagaagaaggccacatcggagattttccacagccagagtttcctggcaactggatcaaacctaaggaaggacaaagatcggaagaaggagcctggctgtaggttcgaactgctttgcatcgatgtaagagcgtgcgagacaaatgggggtcgtaaagacgctgagaaggcaccaatcttctgtaaaacagaggtgccagagcaccggcgctcctcgtctcaggctaatttcattaaaaagaagctggaggtgtgttttgatttcgcagtgatttgcttcattacctctatctttggtgaacagccccagctgctgatcttcatggaaaaatacttccaggtgcagggccagtatatttcacagtccgagtag

SEQ ID NO: 204540 - DNA, 1365 bp, synthetic construct
  misc_feature 1..1365: note = Description of Artificial Sequence: Synthetic coding sequence
  source 1..1365: mol_type = other DNA
atggccagcagcgaggtggcccggcacctgctgttccagagccacatggccaccaaaaccacctgcatgtcgtctcagggttctgacgacgagcagatcaagagggaaaacatacggagcttaacaatgtccggtcatgtgggattcgagagtctgccagatcaacttgtcaaccggagtatccagcaggggttttgttttaatatactttgtgtgggggaaacagggatcggaaagtcaacactgattgacaccctgttcaatacaaatttcgaagactatgagtcctctcacttctgtcctaatgttaagctcaaagcccagacctacgaactccaagaatccaatgtgcagctcaagctgaccatcgttaacacagttggattcggagaccagatcaataaagaggagtcctatcagcccatcgtggattacattgatgcacagttcgaggcgtacttacaggaggagttgaaaataaaaagatcactgttcacttaccacgactcgcggattcacgtgtgtctgtacttcatctcaccaaccggccatagtctgaaaacgctggatctgctgacaatgaagaacctggattcaaaggtgaatattattcccgtgatcgccaaagccgataccgtttcaaaaactgaactgcagaagtttaaaattaagctgatgagcgaacttgtttccaacggagtccagatctatcagtttcccactgacgacgatactattgctaaagtaaacgcggccatgaatggtcagctgcccttcgccgtcgttgggtcaatggacgaagtgaaggtcgggaacaaaatggttaaagccaggcagtacccctggggagttgtgcaggtggagaatgagaaccactgtgatttcgtgaagctccgagagatgctgatttgcacaaatatggaggatctgcgtgagcagacacacacgcgccactacgaactttatcggaggtgtaagttggaggagatgggctttactgacgtgggcccagagaacaaacccgtcagtgtccaggagacctatgaagctaaaaggcatgagttccacggagagcgccagcgcaaggaggaagagatgaagcagatgtttgtccaacgggttaaagaaaaggaagccattttgaaagaagctgagagagagctgcaagcgaagttcgagcacctcaagaggttacaccaggaggagaggatgaaattggaagaaaagagaagactattggaagaagaaattatcgccttttcaaagaagaaagccaccagcgagattttccacagtcagagttttctcgccacagggagcaacctgaggaaagacaaggacagaaaaaattccaacttcctgtag

SEQ ID NO: 204541 - DNA, 1296 bp, synthetic construct
  misc_feature 1..1296: note = Description of Artificial Sequence: Synthetic coding sequence
  source 1..1296: mol_type = other DNA
atggccagcagcgaggtggcccggcacctgaagcgggagaacatcaggagcctcaccatgtccggtcacgtcggattcgaatcactgccagaccagctggtaaaccgctccattcaacaaggcttttgttttaacatcttatgcgtcggtgaaacgggcattggcaagagcaccctcattgacaccttgttcaataccaatttcgaagattatgagtcgtcgcacttttgcccaaatgttaagctcaaggcgcagacgtatgaattgcaggagtcaaatgtgcagttaaaattaactatagtgaatacggtaggcttcggggatcagatcaacaaggaagagtcctatcagccaattgtcgactacatagacgctcagtttgaggcctacctgcaggaagagcttaaaattaagcggtctctgttcacctatcatgacagccgtattcacgtctgtctgtactttatttcacccactggacattccctcaagacactggatcttctaacaatgaaaaatttggacagtaaggtaaatatcatccctgtgatcgccaaggcagatacagtctccaagaccgaactccagaagtttaaaatcaagctgatgtccgagctggtgtcgaacggtgtacagatttaccaatttcccacagacgatgatactattgctaaggtgaacgccgcaatgaatgggcagctccctttcgccgttgtcggcagcatggatgaggtcaaggttggcaacaagatggtgaaagcccggcaatacccatggggggttgtacaagttgaaaatgagaatcactgtgactttgtgaaacttagagagatgctcatttgcacaaacatggaggatctgcgggaacagacacacaccaggcattacgagctatacagacgatgtaaactggaagagatgggattcacagacgttgggccagagaataaaccagtctctgtgcaagagacatacgaggcaaagcggcacgaatttcacggagagcggcagaggaaggaggaggagatgaagcagatgttcgttcagagggtcaaggagaaggaggcaatcctgaaggaggccgaacgcgagctgcaggccaaatttgagcacttaaaacggttacaccaggaggagcgcatgaagctcgaggagaagcgccgactgcttgaagaggagataattgctttctctaaaaaaaaggccaccagcgaaattttccacagtcagagctttttggctaccggtagtaatcttcgcaaggacaaagaccgcaaaaactccaattttctttag

SEQ ID NO: 204542 - DNA, 1353 bp, synthetic construct
  misc_feature 1..1353: note = Description of Artificial Sequence: Synthetic coding sequence
  source 1..1353: mol_type = other DNA
atggccagcagcgaggtggcccggcacctgctgttccagagccacatggcaaccaagaccacctgcatgtcttcccaagggagtgacgacgaacagatcaagcgcgagaacatcaggtccctcaccatgtccggtcatgtgggcttcgaaagtttgcctgatcagttggtgaatagatctatccagcagggattctgtttcaacatcttgtgtgttggtgaaaccgggataggaaaatccaccctgattgataccctgttcaatactaactttgaggactacgaatccagtcatttttgccctaacgtgaagctcaaagcccaaacgtacgaactacaagagagcaatgtccagctgaagcttacaattgttaacactgtcggctttggtgaccagatcaacaaagaggagtcataccaaccaatcgtagactacatcgatgctcaatttgaggcctatctacaagaagagctgaaaataaagagatcactgtttacataccacgacagccggattcacgtgtgtctctatttcatctccccaacaggccactctttaaagactctagacctgctgactatgaagaatctggacagcaaggtgaatataatccccgttatcgccaaggccgataccgtgagtaagaccgaacttcagaaattcaaaattaaactgatgtccgaattagtttccaatggtgtgcagatctatcagtttcccacggatgatgatacaatcgcaaaggtaaatgccgcaatgaatggccagctccctttcgcagttgtaggttctatggatgaggtgaaagttgggaacaagatggtcaaggccaggcagtacccttggggcgtggtgcaggtggaaaatgaaaaccactgcgatttcgtaaaactgagagagatgctgatctgtaccaacatggaggatctgcgcgaacagacccatacccggcattacgagctctaccggcggtgcaagctggaggagatgggattcacagacgtgggtcccgaaaataaacctgtgagtgtgcaggagacatacgaggccaagcgccatgaattccatggagaaaggcaaagaaaggaggaagagatgaaacagatgttcgttcagagagtgaaagagaaggaggctattctcaaggaagccgaaagagagctgcaagccaagttcgaacacttaaaacgcctacatcaggaagagcgtatgaagctggaggagaaacgcagacttctcgaagaggagatcattgccttcagtaaaaagaaagccacctctgagatcttccattcccagtcatttttggctactggaagtaatctgaggaaggacaaggaccgcaagaagtag

SEQ ID NO: 204543 - DNA, 1422 bp, synthetic construct
  misc_feature 1..1422: note = Description of Artificial Sequence: Synthetic coding sequence
  source 1..1422: mol_type = other DNA
atggccaccaagaccacctgcatgagcagccagggcagcgacgacgagcaaattaaaagagaaaacatcaggagcctgaccatgtccggccacgttggattcgagtccctacctgaccaattggtgaacagatccatccagcagggcttctgttttaacattttatgtgtgggcgagaccgggataggcaaatcaaccttgattgacaccctgttcaacacgaatttcgaggattacgaatcctcccacttctgtccgaacgtgaaactgaaagctcagacctacgaactgcaggagtctaacgtgcagttgaaacttacaatcgtgaacacggtgggctttggcgaccaaatcaacaaagaggagtcataccagcccatcgtggattacatcgatgcccagttcgaggcttatctgcaagaggagctcaagattaagcgtagtctgttcacctaccacgactcaaggattcatgtctgtctgtacttcatttcgccaactgggcattccctcaagacgttggatttgctgacgatgaaaaatctcgatagtaaggtcaacatcattcctgtaatcgctaaggcagacacggtgtccaagacagagttgcagaaatttaaaatcaaactgatgagcgaactggtgtccaatggagttcagatttaccagtttcctaccgacgatgacacgatcgccaaagtgaatgccgctatgaacggacagctgcccttcgccgtggtaggttcgatggacgaggtgaaggtgggtaataaaatggttaaggccagacaatacccttggggcgtggtgcaggtcgagaatgaaaatcattgcgattttgtgaagctgagggaaatgctgatttgcacaaatatggaggatttgcgggagcagactcacaccaggcattatgaattgtataggcgctgtaaactggaagagatggggtttacagatgtggggcccgagaacaagcccgtgtctgttcaggagacctatgaagccaaaaggcacgaattccacggcgagcggcagaggaaagaagaagagatgaagcagatgtttgtgcagagagtgaaagaaaaggaggccattctgaaagaggccgaacgggagctgcaagctaagtttgagcacctgaagcgcctccaccaggaagagaggatgaaactggaggaaaaaaggcgacttttagaagaggagatcatagcattctccaagaagaaagcaacctcagagatattccacagccagagcttcctggcgaccggcagtaatctgagaaaagataaggatagaaaaaaggagcccggctgtcggtttgagctcttgtgcattgatgtgagggcctgcgaaacaaacggcgggcggaaagacgctgagaagggccgggagggtcactccgcacggggacaaccgtag

SEQ ID NO: 204544 - DNA, 852 bp, synthetic construct
  misc_feature 1..852: note = Description of Artificial Sequence: Synthetic coding sequence
  source 1..852: mol_type = other DNA
atggccagcagcgaggtggcccggcacctgctgttccagagccacatggcaacaaagaccacctgcatgagttcccaggggagcgacgatgagcagatagtcaatatcatccccgtcatcgcaaaagcggacacagtgagtaagaccgaactgcaaaaatttaagatcaagctgatgtccgaactggtcagcaacggcgtgcagatctaccagttccccacggacgacgatacaatcgccaaggttaacgcagccatgaatggacagcttccatttgccgtagtcggcagcatggatgaggttaaagtcggcaataaaatggtcaaagcccggcagtacccctggggagtggtgcaggttgagaacgagaatcattgtgatttcgtgaagctgagagaaatgttgatttgcactaatatggaagatctgcgcgaacagacacataccagacattatgaattgtaccgccgctgtaaattggaggaaatgggctttactgacgttggcccggaaaacaaacccgtttcggttcaagaaacttacgaggcaaagaggcacgaatttcatggtgagcgccagcgtaaggaggaagaaatgaaacagatgtttgtgcaaagggtgaaggagaaggaggctattctaaaagaagctgaaagggagctacaggccaagttcgaacacctcaagcgacttcatcaagaagaaaggatgaaattagaggagaagaggcgcctcttagaggaggagattattgcctttagcaagaagaaggctacgtctgaaattttccacagccagagctttctggccaccggaagcaacctgcgcaaagacaaggacagaaagaagtag

SEQ ID NO: 204545 - DNA, 1290 bp, synthetic construct
  misc_feature 1..1290: note = Description of Artificial Sequence: Synthetic coding sequence
  source 1..1290: mol_type = other DNA
atggccgtggccgtgggccggcccagcaacgaggagctgcggaacctgagcctgtccggccatgttggattcgactccttgccagatcagttggtgaataaatcgacaagccagggcttttgttttaacattctgtgtgtcggagagaccgggataggtaagagcacactgatggatactctcttcaatacaaaattcgagtccgatcctgctacacacaacgagccaggcgtccgactgaaggcaagatcgtatgagctgcaggagagtaatgtgcgcctgaagttaactatagtggacacagttgggttcggcgaccagattaacaaagatgactcatacaaacctattgtggaatacattgatgctcagttcgaagcctacctgcaagaggagttaaagattaaaagaagcctgtttaattatcatgacacacgcatccacgcttgcctgtattttatcgctcccacaggtcactctttgaaatcacttgatcttgtgactatgaaaaagctggattccaaagtcaatattatccctataatcgccaaggccgacacaattgccaaaaacgaactacacaaattcaagagcaaaatcatgtctgagctggtatccaatggggtgcagatctatcaatttcctaccgacgaggagacagtcgccgagatcaacgcaaccatgtccgtgcacctgccttttgcagtggtgggatcgaccgaagaagttaagataggaaataaaatggccaaggccaggcagtatccatggggcgtcgttcaggttgaaaatgagaatcattgtgattttgtgaagctccgagaaatgctgattagggtcaacatggaggatctgcgggagcagacacacactaggcattacgaactgtacaggcgctgcaagcttgaagagatgggctttaaagacactgacccagacagcaaaccattttcactccaggaaacatacgaggcgaaacgaaatgaattcctgggagaactgcagaagaaagaagaagagatgcgtcagatgttcgtgatgcgggtcaaggagaaggaggctgagctgaaagaagccgaaaaggagctgcacgaaaagtttgatctacttaagagaacccatcaggaagaaaagaaaaaggttgaagataaaaagaaagaactggaggaggaagtcaataactttcagaagaagaaagcagccgcacagctgctacagtcacaggcgcagcagtccggggcccagcagaccaaaaaggacaaagacaagaagaatgcttcttttacctag

SEQ ID NO: 204546 - DNA, 1278 bp, synthetic construct
  misc_feature 1..1278: note = Description of Artificial Sequence: Synthetic coding sequence
  source 1..1278: mol_type = other DNA
atggccgtggccgtgggccggcccagcaacgaggagctgcggaacctcagcctctccggacacgtcggctttgacagcctgcccgaccaactggtgaataaatccacgtctcagggcttctgttttaacatactttgcgtaggagagactggtattgggaaatctacactgatggacacactattcaacactaagttcgagagcgatcctgccacccacaacgagcctggagtccgattgaaagctaggtcgtatgagctccaggaatccaacgtgcgcctcaaacttacaattgtggatacggtcggattcggagatcagatcaataaagatgacagttataagcccattgtggagtatatcgacgcacagttcgaggcttatcttcaggaggaattgaagattaagcgcagtctgttcaattaccatgacacgcgcatccatgcctgtttatatttcatcgccccgacgggtcattcactgaagagtctggacctagtcactatgaagaaactcgacagtaaagtcaacatcattccaattatcgccaaagctgatacaatcgccaagaacgagctgcacaagtttaagtcaaagatcatgagcgaattggtgagcaatggggtgcagatatatcagttcccgaccgatgaggaaacagtagccgagatcaacgcgacaatgtcagtccacctcccttttgctgttgtcggcagtactgaggaagtcaagattggcaataagatggctaaagcccgacaatatccctggggcgtggtccaggtggaaaacgagaaccattgtgattttgtaaaattgcgggaaatgctgattcgcgtgaacatggaggatctcagggagcaaacacatacccgacactatgagctttaccgaagatgtaagctagaggaaatgggatttaaggacacagaccctgattctaagcccttctcacttcaagagacctatgaagccaaaaggaatgaattcctcggcgagttgcagaaaaaagaggaggaaatgcgccaaatgtttgtgatgagagtcaaagagaaggaggcagaacttaaggaggcagagaaagagctgcacgagaagttcgatctgctgaagagaacccaccaagaggaaaaaaaaaaggtggaggataagaagaaggaattggaagaagaggtcaacaacttccagaaaaaaaaggcagcagcacagctgctccaatcacaggcacagcagtcaggcgcacaacagaccaagaaagacaaggacaagaagaagtag

SEQ ID NO: 204547 - DNA, 1320 bp, synthetic construct
  misc_feature 1..1320: note = Description of Artificial Sequence: Synthetic coding sequence
  source 1..1320: mol_type = other DNA
atggaggagcggaagcccgcccacgtgctgcggagcttcaagtacgctgcctttatgaacgaggagcttcgcaatctctccttgtccggtcatgtggggtttgactcgttgcctgaccaactggtaaacaagtcaacgtcccaaggcttttgcttcaacatcctctgtgtcggcgaaactggtattggaaaaagcacgctcatggatactctgtttaataccaagttcgagtccgatcctgctacgcataatgaacctggggtccggctgaaagccagatcgtatgaactgcaggaatctaatgtacggctgaaactgactatagttgacacggtgggctttggggaccagataaataaggatgactcctacaagccaatagtcgagtacatcgacgcacagttcgaagcgtacctgcaggaggagctgaagatcaagcgcagtctattcaattaccatgacacacggatccacgcttgtttatattttatcgctcccaccggccactccctaaaatctctagatttagtgaccatgaaaaaactggacagtaaagtgaatatcatcccaatcattgctaaagcagatacgatcgcaaaaaatgaactgcacaagttcaaatcgaagattatgtccgaactggtgtccaacggtgtgcaaatctaccagtttcccaccgatgaagaaaccgtagccgagatcaacgcgaccatgtctgtgcacttaccgtttgccgttgtggggtccaccgaagaggttaaaattggaaacaagatggccaaagctcgccagtacccatggggcgtggtacaagtagagaacgaaaatcattgcgatttcgtgaagctgcgagagatgctgatcagggtgaacatggaagatctaagagaacagacccatacccgccattatgaattgtaccgccgttgtaagctcgaggaaatgggctttaaggatactgacccagactcaaagcctttttctctgcaagagacatatgaggctaaacggaacgagttcctgggagagctgcaaaagaaggaggaggagatgaggcagatgtttgttatgcgggtgaaggaaaaggaagccgagctcaaggaagctgagaaggaactgcacgagaagtttgatctcctgaagagaacccaccaggaggaaaaaaagaaagtcgaagacaaaaaaaaagagttggaggaggaagtgaataacttccagaagaagaaggcagccgctcagttgctccaaagtcaggcacagcagagcggggcccagcagactaagaaagacaaggacaagaaaaatgcctcgttcacatag

SEQ ID NO: 204548 - DNA, 1077 bp, synthetic construct
  misc_feature 1..1077: note = Description of Artificial Sequence: Synthetic coding sequence
  source 1..1077: mol_type = other DNA
atggaccccctgcggcggagccccagcccctgcctgagcagccagccctcctcaccaagtacgccaccctgtgagatgcttgggccagtaggtatcgaagctgtgttggaccagctgaaaataaaagccatgaagatgggttttgagttcaatatcatggttgtcggacaatctggtctcggcaaatccacaatggtgaacacacttttcaagtcaaaggtgtggaaatccaatccacccggactaggagttcctacgccacaaactctgcagctccacagcctgacccacgtgattgaggagaagggcgtaaagctgaagttaactgtcacagacacacccggtttcggggatcagataaataatgacaactgttgggacccgatcctcggttacataaatgagcagtacgagcaatatttgcaggaagaaatcctgatcaccaggcagcgccatataccagacactagggttcactgctgtgtttatttcgttccaccgacaggccattgtctccgtcctttggacatcgagtttcttcaaagactatgccgaaccgttaacgtcgtaccggtcattgcacgggcggatagtctgacaatggaggagagggaagctttcagaaggagaatccagcagaatttacgaacccattgcatcgatgtgtatccgcagatgtgtttcgatgaggacataaacgataaaatccttaattcaaaacttagggacaggatcccttttgccgtggttggtgctgatcaggagcatctggtgaatggtcggtgcgtgcttggccgcaagacaaagtggggcatcatcgaggtggagaatatggcccattgtgagtttccactattgagagacctcctgattcgatcacaccttcaggatctcaaggatatcacacacaacattcactacgagaactatcgtgtcatccgactcaacgagtcccatctgctacctaggggaccaggttgggtaaatctggcaccagcgagtccgggccagcttactactccacgcaccttcaaggtgtgccgaggtgcacatgatgacagcgacgatgaattctag

SEQ ID NO: 204549 - DNA, 939 bp, synthetic construct
  misc_feature 1..939: note = Description of Artificial Sequence: Synthetic coding sequence
  source 1..939: mol_type = other DNA
atggaccccctgcggcggagccccagcccctgcctgagcagccagccaagctctccttcgacacctccctgtgagatgctaggcccagtgggaattgaggccgtgctcgaccagcttaaaatcaaggcaatgaaaatgggtttcgagttcaatattatggtggtgggacagagcggcttaggcaagagtacaatggtaaatacgctatttaaatccaaagtttggaagtcaaatcctcctggactgggggtgccaacaccacagactctccaactgcattccctcacgcacgtaatcgaggaaaaaggagtgaaactcaaattgaccgtgaccgacactcctggattcggtgaccaaatcaataacgacaattgtttgagacctctcgacattgaattcctgcaacgcttatgccggactgtcaacgtcgttcccgtgattgcaagagcagactccctcactatggaagaaagagaggcctttaggcggcgcatacagcagaatctccggactcattgtattgacgtctatccacaaatgtgctttgacgaagacatcaatgacaagatcttaaattccaagttgagggataggattccgttcgccgtcgtcggcgccgatcaggagcaccttgtcaacggccggtgtgtgctgggacgcaagaccaagtggggaataatcgaggttgagaacatggctcattgtgagttccccctgcttcgggatctgctgatccgctcccatttgcaggatctgaaggacatcacccacaatattcactacgaaaattatagggtaataaggctgaatgagtcacaccttttaccgaggggcccaggatgggtcaacctagcaccggcctctcccggacagcttaccactccccgcacatttaaggtgtgcaggggtgctcacgacgattccgacgatgagttttag

SEQ ID NO: 204550 - DNA, 1299 bp, synthetic construct
  misc_feature 1..1299: note = Description of Artificial Sequence: Synthetic coding sequence
  source 1..1299: mol_type = other DNA
atggccgagcggaccatggccatgcccacccagatccccgccgacggcgatacacagaaggaaaataatatccgttgcctgacgacaatcgggcactttggctttgagtgcttgcctaatcaattggtgtcccgctctattcgtcagggtttcaccttcaatattctgtgcgtcggggagaccggcattggaaaatcaaccctgattgacacactctttaataccaacctcaaggacaacaagtcaagtcacttttactccaatgtcggcctgcaaattcaaacttacgaactacaggagtcaaatgtgcagttgaagctcactgtggttgaaacggtcggctatggggaccagattgacaaagaagcctcgtaccagcccatagttgattacatcgacgcacagtttgaagcatacctccaagaggaattgaaaattaagcggtctctgttcgagtaccatgattctagagtgcatgtgtgcctgtatttcatttctccgaccgggcacagtttaaagagccttgatctcctgactatgaagaacttagatagtaaagttaatatcatccctttgatcgcaaaggccgacactatttccaagaatgacctccagaccttcaagaacaagatcatgagcgaactgattagcaacggaatccaaatctaccagttgcccacagatgaagagactgccgcgcaggcaaacagctcagtgagcgggctactgccatttgccgtcgttggaagtacagacgaggtgaaggtcggcaagaggatggttagggggagacattacccgtggggagtgctgcaggttgaaaacgagaatcactgcgattttgtgaagctaagggatatgctgttgtgtacaaatatggaaaacctcaaggagaagacacatacccagcactacgagtgctaccgttatcagaaactacagaaaatgggctttacggatgtgggaccaaacaatcagcctgtgagttttcaagagatatttgaggctaagaggcaagaattttacgaccagtgtcagagagaggaggaggagctgaagcagaggttcatgcagcgggttaaagaaaaggaagccacgtttaaggaagccgaaaaagagctccaagacaaattcgaacacctgaaaatgattcagcaggaagagatcaggaagctagaagaggaaaaaaaacagttggagggtgaaataatcgatttttacaagatgaaggccgcctctgaagcactgcagacacagctcagcaccgatacaaaaaaggacaagcatagaaaaaaatag

SEQ ID NO: 204551 - DNA, 1086 bp, synthetic construct
  misc_feature 1..1086: note = Description of Artificial Sequence: Synthetic coding sequence
  source 1..1086: mol_type = other DNA
atgagcaagcagcagcccacccagttcatcaaccccgagacccccggctacgtcgggtttgccaatcttcccaatcaggtgcatcggaaatccgtgaaaaaggggttcgagtttactctcatggttgtgggagagtccggcttgggtaagtcgacactcatcaatagcctgttcttgacagacttgtatcccgagcgggtgatccctggcgcagccgaaaagatagaaagaacagtgcagatcgaggccagcacagtggagatagaggagcgcggagtgaagctgagactcactgtggtagacactccgggctacggcgatgctattaattgtcgggactgttttaagacgattatcagctacatagatgaacaattcgagaggtatctccatgacgaatctggtttgaatcggagacatattattgacaaccgcgtacattgctgcttttattttatctcacccttcgggcacggtctgaaacctctggacgtagccttcatgaaggcaatccataacaaagtgaatattgtccccgtcatcgctaaggccgacacgctgaccctgaaagaaagggagcggctgaagaaaagaattctggacgagatcgaagaacacaatattaagatttaccacttgcctgacgcggaaagtgacgaagatgaagacttcaaagaacagacccgtcttctcaaggcatctatacccttctcggtcgtggggagcaatcagctcatcgaggcaaaagggaagaaagtgcgaggccgcctatatccctggggagtcgttgaggtcgagaaccctgagcataatgactttctgaaacttcgtaccatgttaatcacgcatatgcaggatttacaggaagttacacaagatctacattatgaaaactttcggagcgagcgtctgaaacgaggaggaaggaaggtggaaaatgaggacatgaacaaagaccaaatcttgcttgagaaagaagccgaactgagacgaatgcaggagatgatagccagaatgcaggcacagatgcaaatgcagatgcagggaggagacggcgatggtggtgctctaggtcatcacgtgtag

SEQ ID NO: 204552 - DNA, 1086 bp, synthetic construct
  misc_feature 1..1086: note = Description of Artificial Sequence: Synthetic coding sequence
  source 1..1086: mol_type = other DNA
atgagcaagcagcagcccacccagttcatcaaccccgagacccccggctacgttggctttgcgaatttacccaatcaggtccataggaagtctgtaaaaaaaggctttgaattcaccctaatggtggtgggtgaaagtggacttggcaaatccacgctgataaattctctcttcctcacagacttgtaccctgagagagttattccgggagcagccgagaaaattgagaggacagtacaaatagaagcgtctactgtcgagatcgaagaaaggggagtgaagctccgtctgacagtcgtggacaccccgggatacggagatgccattaattgcagggattgctttaaaaccattatctcctatatcgacgagcagtttgaaagatacctgcacgacgaatctggtctaaataggagacacattatagataacagggtgcattgttgcttttacttcatcagtccttttggccatggactgaagccgttggatgtggcttttatgaaggccatccacaataaggtgaatattgttcctgttatcgccaaggctgacactctgactctcaaagagagggagcgactcaagaaaaggattctggacgaaatcgaggaacacaatataaaaatctaccatctgccagacgccgaatctgatgaggacgaggactttaaagagcagacccgattgcttaaggcgtccattcccttctcagtggtggggagcaaccagttgattgaggccaagggcaagaaggtgagggggcgtctgtacccgtggggcgtggtcgaggttgaaaaccccgagcataatgactttttgaagttgagaactatgcttataacgcatatgcaagacctgcaagaggttacccaggacctgcactacgaaaatttcaggtctgagaggctcaagcggggcgggcgcaaggtggagaatgaggacatgaataaggaccagatcttactcgaaaaagaggcagaattgagaagaatgcaggagatgatcgccagaatgcaggctcaaatgcagatgcagatgcagggcggggacggagatggtggggccctaggccatcatgtctag

SEQ ID NO: 204553 - DNA, 1191 bp, synthetic construct
  misc_feature 1..1191: note = Description of Artificial Sequence: Synthetic coding sequence
  source 1..1191: mol_type = other DNA
atgccctggatcagcgagggccgggccacccggccctgcctgcgggttccctccgcccgccgaggtgatgaggggttgcaccagcgggacgaggccagccagaagatgagcaaacagcaacctacacagtttataaaccccgagactcccgggtatgtcggcttcgccaatttgccaaaccaggtgcaccgaaagtcggtgaaaaaaggattcgagttcaccctcatggtggttggtgagagtgggctggggaagtccactctgatcaactctctgtttttgaccgacctttatcctgagagggtcattccaggtgccgccgagaagattgagcgtactgtgcaaattgaggctagcactgtagagatcgaagagcgtggcgtgaaactccggttaacagtggtggatacgcccggctatggagatgccatcaattgtagggactgtttcaaaaccatcataagctacatcgacgaacagttcgagcgctatctgcacgatgaatctggactcaataggagacacattatcgataaccgagttcattgttgtttttacttcatctcccctttcggccatggcttaaagcctttggatgtggcattcatgaaggccattcataataaggtaaatattgttccagtcatcgcaaaggccgacacactgacactgaaagaaagggaacggcttaagaagcggattctggacgagatcgaagagcataatataaaaatttatcatctgcctgacgccgagagcgatgaggatgaggacttcaaggaacagacaaggctcctcaaggcatccatcccattctcggtggtcggttctaatcagctaatcgaagcgaagggaaaaaaggtccggggccgtctttatccctggggagtggtggaggtggaaaatcctgagcataacgattttctgaagctccggacgatgttgataactcatatgcaggatctgcaagaggtgacccaggatcttcactacgaaaacttcaggtcagaacgcctcaaacggggcggcaggaaggtggagaacgaagacatgaataaagatcagatcctcttggaaaaggaagccgaactacggaggatgcaggagatgatcgcccgcatgcaggcccagatgcagatgcaaatgcagggaggggacggggatgggggagccctggggcatcatgtgtag

SEQ ID NO: 204554 - DNA, 1086 bp, synthetic construct
  misc_feature 1..1086: note = Description of Artificial Sequence: Synthetic coding sequence
  source 1..1086: mol_type = other DNA
atgagcaagcagcagcccacccagttcatcaaccccgagacccccgggtacgtggggtttgcaaacctcccaaatcaggtccaccggaagagcgtgaaaaagggctttgagttcacactgatggttgtgggcgaaagtggcctcggaaagtccaccctgatcaattcccttttcctaacagatctgtatcctgaaagggtaataccaggagcagccgagaaaattgaaaggacagtgcagatcgaagcctcaacggttgaaatcgaagaacgaggcgtaaagctgcggctgaccgtagttgacacccccggctatggcgacgcaattaattgccgggattgtttcaaaacgattatatcctacatcgacgagcaatttgaaagatacctccacgatgagtccggtctcaaccgcagacatataatagacaatcgcgttcattgttgcttttactttattagccctttcggccacggactgaaaccgctggacgtggcatttatgaaggcgatccataataaggttaacatagtcccggtcattgccaaggctgacactctgaccttaaaagaaagagagcgcctaaagaaacggatactggacgagatagaggagcacaacataaagatctatcatctgccggatgccgagagtgacgaagatgaagacttcaaggaacaaacgcgattgctgaaagcctctattcccttcagtgtggtcggctcgaatcagctgatcgaggccaaggggaagaaagttcgcggccggctttacccgtggggagtcgtcgaggtggagaatcctgagcacaacgacttcctcaagctgaggacaatgctcatcacccatatgcaagaccttcaagaagtgacccaggaccttcactatgaaaactttcgatccgaacgtcttaaacggggtggacgaaaagtcgagaacgaggatatgaataaagaccagatcctcttggagaaggaggcagaactgagaagaatgcaggaaatgatcgccagaatgcaagcgcagatgcagatgcagatgcagggaggggatggggatggtggcgccctaggtcaccacgtctag

SEQ ID NO: 204555 - DNA, 1086 bp, synthetic construct
  misc_feature 1..1086: note = Description of Artificial Sequence: Synthetic coding sequence
  source 1..1086: mol_type = other DNA
atgagcaagcagcagcccacccagttcatcaaccccgagacccccggctatgtcggcttcgcaaatctgccaaatcaggttcatagaaaatccgtgaaaaagggattcgagttcaccctgatggttgtgggcgagagtgggctgggcaaaagcacactcattaactcactctttctcactgacctgtaccctgagcgggttattccgggagccgccgaaaagatagaacggactgtgcagatagaggcttctactgtcgagatcgaagagcgtggggtgaagttgagactcactgttgtggacacaccggggtatggggacgccatcaactgccgggattgctttaagactatcattagttatatcgacgagcagtttgagcgctacctgcacgatgagtctggacttaataggagacatattatagacaatcgcgtgcactgctgcttttacttcatctcaccttttggccacggtttaaagccactggatgtagccttcatgaaggcaatccacaacaaagtgaatatcgttcccgtgattgctaaagccgataccctcactctcaaagaacgcgagaggctgaagaagaggatcttggatgaaatcgaggagcacaatataaagatctatcacctgcccgacgccgaaagcgacgaggacgaagatttcaaagaacaaactaggctgctgaaagcttctatccctttctcggtggtgggatcaaaccaactcattgaggccaaaggcaaaaaggttaggggacggctgtacccatggggcgtagtcgaggtggagaatcctgaacataatgatttcctgaaactgcggacaatgctgatcacccacatgcaggatttgcaagaggtgacccaggacctccactatgagaactttcggtccgagcggctgaagcgggggggccgtaaagttgagaacgaagatatgaacaaagaccagattcttctggaaaaagaggcagaactcaggcgaatgcaagagatgatcgcgcgtatgcaggcacagatgcaaatgcagatgcagggtggagatggagatggcggcgcactgggacatcatgtgtag

SEQ ID NO: 204556 - DNA, 159 bp, synthetic construct
  misc_feature 1..159: note = Description of Artificial Sequence: Synthetic coding sequence
  source 1..159: mol_type = other DNA
atgagcaagcagcagcccacccagttcatcaaccccgagacccccggctatgtgggctttgctaaccttcccaaccaggttcatcgtaaaagcgtgaagaagggctttgaatttacattgatggtcgtgggagaaagcgggttgggaaagtctacttag

SEQ ID NO: 204557 - DNA, 153 bp, synthetic construct
  misc_feature 1..153: note = Description of Artificial Sequence: Synthetic coding sequence
  source 1..153: mol_type = other DNA
atgagcaagcagcagcccacccagttcatcaaccccgagacccccggctatgttggctttgctaacctaccaaaccaggtccaccggaagagcgtcaagaaagggttcgaatttaccctcatggtcgtcggggagtcagggcttggcaaatag

SEQ ID NO: 204558 - DNA, 72 bp, synthetic construct
  misc_feature 1..72: note = Description of Artificial Sequence: Synthetic coding sequence
  source 1..72: mol_type = other DNA
atgagcaagcagcagcccacccagttcatcaaccccgagacccccggatatgtcggcttcgctaatctgtag

SEQ ID NO: 204559 - DNA, 447 bp, synthetic construct
  misc_feature 1..447: note = Description of Artificial Sequence: Synthetic coding sequence
  source 1..447: mol_type = other DNA
atgagcaagcagcagcccacccagttcatcaaccccgagacccccggctatgtcggattcgccaatctccccaaccaggtgcatcggaagtctgtcaaaaagggatttgaatttacactaatggttgtaggagagagcgggttaggcaaaagtacgctcattaattccctgttcctgactgacctctaccccgagagagtgataccaggcgcagcagaaaagatagaaagaacagtccaaatcgaagctagcactgtagagatcgaagaacgaggcgtaaagttacgtctgactgtagtggatacacctggatatggggatgccataaactgtagagactgctttaaaacaatcatctcgtatattgacgaacaatttgagaggtaccttcacgatgagagtgggctaaacagacgacatatcatcgacaatagggtgcactgttag

SEQ ID NO: 204560 - DNA, 396 bp, synthetic construct
  misc_feature 1..396: note = Description of Artificial Sequence: Synthetic coding sequence
  source 1..396: mol_type = other DNA
atgagcaagcagcagcccacccagttcatcaaccccgagacccccggttatgtaggcttcgctaacctgcccaaccaagtgcaccgaaagtcagtcaagaaggggttcgagttcaccctgatggtcgtgggcgagagcggcctcggtaagagtaccttgatcaatagtctgtttttaaccgacctgtatcctgaacgtgtgatcccgggggcagctgagaaaattgagagaacagtgcagattgaagcctctactgttgagatagaggaaaggggggtgaagctgcgcttgactgtcgtggacacccctggatatggtgacgccataaactgccgtgactgttttaaaaccattatctcttatatcgacgagcagttcgaaaggtatttgcactag

SEQ ID NO: 204561 - DNA, 219 bp, synthetic construct
  misc_feature 1..219: note = Description of Artificial Sequence: Synthetic coding sequence
  source 1..219: mol_type = other DNA
atgagcaagcagcagcccacccagttcatcaaccccgagacccccggctatgtgggattcgcgaatctccctaatcaggtgcatcggaagtccgtgaaaaagggttttgagttcacattgatggtggtaggagaatcaggcctgggcaaaagcacactgataaattcgttatttctgacagatttgtatcccgagcgagtgattcctggagccgcctag

SEQ ID NO: 204562 - DNA, 219 bp, synthetic construct
  misc_feature 1..219: note = Description of Artificial Sequence: Synthetic coding sequence
  source 1..219: mol_type = other DNA
atgagcaagcagcagcccacccagttcatcaaccccgagacccccggctacgtaggctttgccaatctcccaaatcaagtccatagaaagagcgtgaagaagggttttgaattcacactaatggtggtgggagaaagtggcctggggaaatctacactgattaatagtctgtttctcactgatctgtatcccgagagagttatacctggcgctgcgtag

SEQ ID NO: 204563 - DNA, 522 bp, synthetic construct
  misc_feature 1..522: note = Description of Artificial Sequence: Synthetic coding sequence
  source 1..522: mol_type = other DNA
atgagcaagcagcagcccacccagttcatcaaccccgagacccccgggtatgtcggattcgcaaatttgcccaaccaagtgcataggaagagtgtcaaaaagggctttgagttcacacttatggtcgtgggagagtctggtctcggaaaatcaacactgatcaattctctgtttcttactgacctgtaccccgagagagttatccctggggccgcggagaaaatcgagcggactgtacagatcgaggcgtctacagtggagatagaagaacgcggagttaaacttagactgacagttgtagacactcctgggtacggcgatgctattaattgtagggattgtttcaagacgatcatcagttatatagatgaacaatttgagaggtacttgcacgacgagtccgggctgaacagacgccatatcatcgacaaccgcgtgcactgctgtttttactttatttcaccattcgggcacggactgaagcctctggacgttgctttcatgaaagctatccataattag

SEQ ID NO: 204564 - DNA, 90 bp, synthetic construct
  misc_feature 1..90: note = Description of Artificial Sequence: Synthetic coding sequence
  source 1..90: mol_type = other DNA
tgagagatgatcgcccggatgcaggcccagatgcagatgcagatgcaggggggtgacggcgacgggggtgctttagggcaccatgtgtag

SEQ ID NO: 204565 - DNA, 861 bp, synthetic construct
  misc_feature 1..861: note = Description of Artificial Sequence: Synthetic coding sequence
  source 1..861: mol_type = other DNA
atgagcaagggccagagcggcctgggcaagagcaccctggtgaacacgctctttaagagccaagtgtctcgtaaagcctcttcctggaacagggaggagaagatcccaaaaacagtggaaatcaaagccatcgggcacgttattgaagaaggaggagttaagatgaagttaactgtaattgacactccagggtttggagaccagatcaacaacgagaactgctgggagcctattgagaagtatataaatgaacagtatgaaaagttccttaaggaggaggtgaatatagctcgaaagaaacggatacccgatacacgcgtgcattgttgcctttactttatcagcccgaccgggcactctctgcgtcctttggacctcgagttcatgaaacacctgagcaaggtggttaacataattcccgtcattgccaaagccgacaccatgaccctggaagaaaagtcggagttcaagcagagagtgcgcaaggaactggaggtgaatggaatcgagttttacccacagaaggagtttgatgaggatctcgaggacaagactgagaacgacaagatacgccaagagagcatgcccttcgctgtcgtgggctccgacaaagaataccaggtcaacggtaagcgggttttaggcagaaagactccctggggcattattgaagtcgaaaacttaaatcactgtgagttcgccctcctacgggattttgtcatcaggacccacctgcaggaccttaaggaagtgactcacaatattcactacgagacctaccgtgcaaaacgactgaatgacaacggcgggctgccaccagtcagcgttgatactgaggagtcccacgattcgaatccatag

SEQ ID NO: 204566 - DNA, 252 bp, synthetic construct
  misc_feature 1..252: note = Description of Artificial Sequence: Synthetic coding sequence
  source 1..252: mol_type = other DNA
atgagcaagggcctgcccgagacccggaccgacgccgccatgagcgagcttgtgccagaaccaagaccgaagcccgctgttcctatgaaacctatgagcattaattccaacctgctcggatatatcggtattgatacgatcatcgaacaaatgagaaagaaaaccatgaagacgggctttgattttaacattatggttgttgcggggagccctttaaggtctacaagtatgtcaagcactaggagttcctag

SEQ ID NO: 204567 - DNA, 1053 bp, synthetic construct
  misc_feature 1..1053: note = Description of Artificial Sequence: Synthetic coding sequence
  source 1..1053: mol_type = other DNA
atgagcaagggcctgcccgagacccggaccgacgccgccatgagcgagctggtcccagaacctcgtccaaagcctgccgtgccaatgaagcccatgagcatcaactcaaatctattaggctacattggaatagatacaattattgaacaaatgaggaagaaaactatgaagacaggcttcgactttaacatcatggtagtgggccagtcaggcttaggtaaatctactttagttaacactctgttcaaatcccaggtgtctcggaaggcctctagctggaaccgcgaagagaagatccccaaaacagtcgaaattaaggcaataggtcacgtcatcgaggagggtggtgttaagatgaagctgaccgtgatagacacacccggctttggtgatcaaattaacaacgagaattgctgggaacctattgagaagtatatcaacgaacaatacgagaaattcctgaaggaggaggtgaatattgctaggaagaagcgaatcccagacacccgagtgcactgttgcctgtattttatttctccaactggccacagtctgaggcccctggacctagagtttatgaaacacttatcaaaggtagtcaatataataccggtaattgccaaggccgatactatgaccctcgaggaaaagtctgaattcaagcagcgtgttcgcaaagaattagaagtaaatggcattgagttttacccacaaaaggaatttgatgaagatctggaggataagacagaaaatgacaagatccggcaagaaagcatgccttttgctgtggtcggatctgacaaagagtaccaagtgaacggcaaaagggttctggggaggaagaccccatggggaattattgaggttgagaacctgaaccattgtgagtttgccctcctcagggatttcgtcattcgcacgcacctgcaggacttaaaagaggttactcacaatatacactacgaaacttaccgcgctaaaagactgaacgataatggcggactccctcctgtcagtgtggatacggaagaatcccacgatagtaacccttag

SEQ ID NO: 204568 - DNA, 1077 bp, synthetic construct
  misc_feature 1..1077: note = Description of Artificial Sequence: Synthetic coding sequence
  source 1..1077: mol_type = other DNA
atgagcaagggcctgcccgagacccggaccgacgccgccatgagcgaattagtgcctgaacctcggcctaaacctgccgttcctatgaagccgatgtccataaacagcaacctgctggggtacatcggaattgacactatcatcgagcagatgagaaagaaaaccatgaagaccggttttgatttcaatatcatggtggtaggacaaagcggcctcggcaagagcactctggtgaacactttgtttaagtcacaagtgagtaggaaagctagcagctggaaccgggaggagaaaattcccaaaaccgttgaaattaaggctatagggcacgtcattgaagagggcggtgtgaagatgaagctgacagtgatcgacactcccggtttcggcgaccaaattaataatgaaaattgttgggagcctattgagaagtatatcaatgagcaatacgagaagtttttgaaggaagaagtgaatatagcacggaaaaaaagaattcccgatacgagagtgcactgctgtctgtacttcattagccctactggtcattctctgcgaccactcgatttggagttcatgaaacacttaagcaaagtggtgaatatcataccagtgatcgctaaagccgacactatgaccctcgaggagaagagtgaatttaagcagagagtgcggaaagagctggaagtgaatggaattgagttttaccctcagaaagagttcgacgaagatcttgaagataagaccgagaatgacaaaatccgccaagagtctatgccttttgcggttgtcggaagcgataaggagtaccaggtgaatgggaagagagtgctcggacggaagaccccatggggcattattgaagtagaaaacttgaatcattgtgagttcgctttgctcagggattttgtcatccgcactcatctgcaggaccttaaagaagtcacccacaacatacattacgagacctaccgcgcgaaacgtctgaatgacaacggtggtctacctcctggcgaaggtttactcgggacagtgctccctcccgtaccagccaccccttgccctactgccgaatag

SEQ ID NO: 204569 - DNA, 885 bp, synthetic construct
  misc_feature 1..885: note = Description of Artificial Sequence: Synthetic coding sequence
  source 1..885: mol_type = other DNA
atgagcaagggccagagcggcctgggcaagagcaccctggtgaacaccttgttcaagagccaggtgtctcggaaggccagctcctggaacagggaggaaaaaatacctaagaccgtggagattaaggcgatcggccacgtaattgaggaaggtggagtcaagatgaagctgaccgtcatagataccccaggattcggagaccaaatcaacaacgagaactgctgggagccgattgaaaagtacattaatgagcagtatgaaaaatttctgaaagaggaggttaacatagcccggaaaaagaggatcccagacacccgggtgcactgttgcctctatttcattagcccaacaggacactctctgcgacccctggatctagaattcatgaagcatctgtccaaagttgtgaacatcatacctgtgattgccaaggccgacacaatgaccctcgaggaaaagtccgagttcaaacagcgcgtgcgcaaagagctcgaagtgaacggcatcgaattttaccctcaaaaagaattcgacgaggacctcgaggataagaccgagaatgacaagattcgtcaggagtccatgccatttgcagtggtcggatcagacaaggagtatcaagtcaacggcaagcgcgtgctgggcagaaagacaccatggggcataatcgaagtggagaaccttaatcactgcgagttcgcactgttgagggactttgtcattcggacccaccttcaagacttgaaggaggtgactcacaatatacactatgaaacatatcgcgccaaaaggctgaacgataatggcggccttcctccaggggagggcttgctcggaactgtattgcctccggtgcccgccactccctgtcccacggcagaatag

SEQ ID NO: 204570 - DNA, 537 bp, synthetic construct
  misc_feature 1..537: note = Description of Artificial Sequence: Synthetic coding sequence
  source 1..537: mol_type = other DNA
atgagcgagctggtgcccgagccccggcccaagcccgccgtgcccatgaaacctatgagcatcaacagtaacctgcttggatatattggcatcgacacaataatcgaacagatgaggaaaaaaacgatgaagactggcttcgactttaatattatggttgtcggacagtccggcctgggaaaatcgacccttgttaacaccctgttcaagtcacaagtgagtcggaaagctagcagttggaaccgggaggagaagattccaaagaccgtggagattaaggctatcggacacgtgatagaagaggggggagtcaaaatgaaactaaccgtcatcgacacacctggcttcggagaccaaatcaataatgagaactgttgggaacccattgagaagtacatcaatgaacagtatgagaagttcctgaaagaggaggttaacattgcacgcaagaagagaatccccgacactagggtccactgctgtctctatttcatcagccctaccggccactcattaagacccctagacctagaatag

SEQ ID NO: 204571 - DNA, 1137 bp, synthetic construct
  misc_feature 1..1137: note = Description of Artificial Sequence: Synthetic coding sequence
  source 1..1137: mol_type = other DNA
atggacagcctggccgccccccaggaccggctggtggagcagctgctgagcccaagaactcaagctcagaggagactgaaagacatcgacaagcagtatgtaggatttgccaccctgcccaatcaggtgcaccggaagagcgttaaaaaaggctttgacttcacactcatggtagcgggagaatctggattgggcaagtctaccttggtccactctctcttcttaaccgatctctataaggacagaaagctattgtcggccgaggagcgtatctcgcaaacagtagagatactcaagcatacggtagacattgaggaaaaaggagttaagctgaaactgacgatcgtcgataccccagggttcggggatgccgtcaataacaccgagtgctggaagccaattaccgattatgtggatcagcagttcgaacagtactttagagatgagagcggcctgaataggaagaatatccaggacaaccgcgtgcactgctgtttgtatttcatcagtccgttcggacacggactcagacctgtggacgttggcttcatgaaggctctgcatgaaaaggttaatatagtcccactgattgcaaaggctgattgccttgtcccatctgagatcagaaagctcaaagagcggattcgcgaggaaattgacaaatttggaatccacgtgtaccaatttcccgagtgtgactctgacgaggacgaggactttaaacagcaggatagagagcttaaggaatccgcaccattcgccgtcataggttctaacactgtggtggaagcaaagggccaacgagtgagaggaaggctctacccctgggggatcgtcgaggtggagaatcaggcacactgcgactttgttaagttgagaaacatgctcatccgcacacatatgcacgacctcaaggatgtgacttgcgatgttcactatgaaaattacagagcccattgtattcagcaaatgacttcaaaactgacacaggattctagaatggaatctcctataccaatcctgcctcttcccacccccgatgccgaaactgagaagctgattcgcatgaaggacgaagagctgagacggatgcaggagatgctgcagcgaatgaaacagcagatgcaggatcagtag

SEQ ID NO: 204572 - DNA, 969 bp, synthetic construct
  misc_feature 1..969: note = Description of Artificial Sequence: Synthetic coding sequence
  source 1..969: mol_type = other DNA
atggtggccggcgagagcggcctgggcaagagcaccctggtgcactcactcttcctgaccgacctgtataaggacagaaaactcctcagtgcagaggagaggattagtcaaaccgtggaaatcctgaagcacacagtggatatcgaggagaaaggggtcaaattgaagcttactatagtggatacacctgggtttggtgacgcggtgaacaataccgaatgttggaagcctatcacggactatgtagaccagcagttcgaacagtacttcagggacgaatctgggctgaatcgcaaaaatattcaggataatcgggtacactgttgcctgtattttataagcccatttgggcacggcctcaggcccgttgatgttggctttatgaaggcgctccatgagaaagtcaacatcgtgcccttgatagctaaggcagattgtctcgtgccctctgagatcagaaagctgaaggagcgaataagggaagagattgataagtttggcatccatgtgtatcaattcccagaatgcgatagtgacgaggatgaggactttaagcagcaggacagagagctgaaggaaagcgcaccgttcgccgtgataggatcgaacaccgtggtggaggccaagggacagagggtgcgcggcaggttgtacccgtggggcatcgtggaggtagaaaatcaggcccattgtgatttcgtcaagctccgcaatatgctaatcaggacccacatgcatgacctgaaggatgttacttgtgatgtccactacgagaactaccgcgcccattgtatacaacagatgacttcgaagctgactcaggattctcggatggaaagtccaatcccaatcctccccctcccaacccccgacgccgaaaccgaaaaactgattcgcatgaaagacgaggagttgcgacgtatgcaggagatgctgcagcgaatgaagcagcagatgcaggatcagtag

SEQ ID NO: 204573 - DNA, 1041 bp, synthetic construct
  misc_feature 1..1041: note = Description of Artificial Sequence: Synthetic coding sequence
  source 1..1041: mol_type = other DNA
atggacagcctggccgccccccaggaccggctggtggagcagctgcttagccctcgcacccaggctcaacgccgactcaaagatattgacaaacagtatgttggattcgcaaccctgccaaatcaggtccatcgcaaaagcgtgaaaaaaggatttgattttaccctaatggtggctggcgagtccggattgggaaaatccactttagtccacagcctcttcttaaccgacctttacaaagatagaaagctgctctccgcagaagagcggataagtcagacggtcgaaatactgaagcatacagtagacattgaagagaagggcgtgaagttgaagctgaccattgtcgatacgcccgggtttggagacgccgtaaacaacaccgagtgctggaagcccattacagactacgtggaccaacagttcgaacagtactttagagatgaaagtggccttaatcgaaagaatatccaggacaacagagtgcattgttgtttatattttattagtccctttgggcatggcctgaggccagtggatgttgggttcatgaaggccctccatgagaaagtgaatatagtaccacttatcgccaaagccgattgccttgttccatccgagatcaggaagctcaaggagcgaattcgtgaggaaatcgataagtttggcatacatgtataccaatttcctgaatgtgattctgatgaggacgaggattttaaacaacaagacagagagctaaaagagtcggctcctttcgctgttattggctctaatacagtcgtggaggcaaagggccagagagtgcgcgggcgcctctacccctgggggattgtagaaggggcgcttcgcctgcgtgaagccgcccagcacgctcatccacacgcatatgcccgtccccaggggcgcgacgttcgcagagctcttcgggaattacctagggccctccaccccgccgatgaccagcagacagatccgggccaaccccatggggagccccatccagatccagcagccgcccaccctggacgcagagactag

SEQ ID NO: 204574 - DNA, 450 bp, synthetic construct
  misc_feature 1..450: note = Description of Artificial Sequence: Synthetic coding sequence
  source 1..450: mol_type = other DNA
ctgcccaaccaggtgcaccggaagagcgtgaagaagggcttcgacttcaccctgatggtagctggcgagtccggactggggaaatccaccttagtacatagcctctttttaaccgatctgtataaggaccgcaagttactgagcgctgaggaaagaatcagtcagacggtcgagatcttaaagcacaccgtcgacatcgaggagaagggcgtgaagttgaagctgactatagtggacacccccggattcggcgacgccgtgaacaacactgagtgctggaagcccatcactgactacgtggaccagcaatttgagcagtacttccgtgatgaatctggccttaatagaaaaaacatccaagataaccgagtccattgttgcctttatttcatcagcccatttgggcatggactgagaccagtggatgggtttcacgagggaatagcttag

SEQ ID NO: 204575 - DNA, 1110 bp, synthetic construct
  misc_feature 1..1110: note = Description of Artificial Sequence: Synthetic coding sequence
  source 1..1110: mol_type = other DNA
atgagcaccggcctgcggtacaagagcaagctggccacccccgaggataaacaagacatcgacaaacagtacgtcggattcgcgacactccccaatcaggtccatcggaaaagcgttaagaagggcttcgacttcacactcatggttgcaggtgaatccggactgggtaagtctacactggtgcactccctgtttctcacagacctgtataaagatcgtaaactgctctcagccgaggaacggatttctcaaaccgttgagatccttaagcacaccgtagatatcgaagagaagggcgtgaaacttaaactcacaattgtggatacccctgggttcggcgacgctgtgaacaatacagagtgctggaaaccaatcacagactatgtcgaccagcagttcgaacagtactttcgcgatgaaagcggactgaacagaaaaaatatacaggacaaccgtgtccactgttgcctgtattttataagcccatttggacatggactgcgaccagtggacgtcgggttcatgaaagctctccacgagaaggtgaatattgttcctctgatcgccaaggcggattgtctcgtacccagcgaaatacgcaagctgaaggagaggatccgagaggagatcgataagttcggtatccacgtgtaccagtttccagaatgtgattctgacgaagacgaggatttcaaacagcaggacagggaactcaaagagagcgccccatttgcggtgattggttccaatactgtggtagaggccaagggccagagggtccggggtaggctctacccctggggaatcgtggaagtcgaaaaccaggcacactgcgatttcgtgaaactccgtaatatgctgatacgtacccatatgcatgatctgaaggacgttacctgcgacgtccactatgaaaactaccgcgcccattgtattcagcagatgaccagcaaattgacccaggacagccgtatggaatctcctatccccatcctgcccctgccaacccccgatgctgagacagagaagctgatccgaatgaaggatgaagagctgcgccgcatgcaggaaatgctacagagaatgaagcagcagatgcaggatcaatag

SEQ ID NO: 204576 - DNA, 1137 bp, synthetic construct
  misc_feature 1..1137: note = Description of Artificial Sequence: Synthetic coding sequence
  source 1..1137: mol_type = other DNA
atggacagcctggccgccccccaggaccggctggtggagcagctgctaagcccacggactcaggcacagcgcaggctcaaggacatcgacaagcagtacgtggggttcgctaccttgcctaaccaggtgcatcggaagtctgtgaagaaaggtttcgattttacgctgatggttgcaggcgaatctggcctgggcaagagcacattggtgcattctctattccttactgacttgtacaaagacagaaagctgctgtccgcagaagaacggatttctcagacagtggagattctgaaacatactgtggacatcgaggagaaaggcgtgaagttaaagctgaccatcgttgatacccctggcttcggcgacgccgtgaacaatacagagtgttggaagccaatcaccgattatgtggaccagcaattcgaacagtattttcgcgacgagagtggtctcaatcggaagaatatccaggacaacagagtccattgttgtctgtacttcatttcccccttcggtcacgggctgagacccgtggacgtcggtttcatgaaggcattgcacgagaaagtcaatatcgtgccactgattgcgaaagctgactgtctggttccctccgaaatccgaaagctgaaagaacgcatcagggaggaaattgataaatttgggatacacgtataccagtttcccgagtgtgattcggatgaggatgaggactttaaacagcaggaccgggaactcaaggagtcagcacctttcgccgtgatcgggagtaacaccgttgtggaggctaagggtcaacgagtgcgcgggaggctgtacccttgggggatagtggaagtggagaaccaagcacattgcgacttcgtgaaactcaggaacatgttaatccgcacccacatgcacgatttaaaggacgtgacttgtgatgtccactacgagaactatagagcccactgcattcagcagatgacatctaagctaacccaagatagcaggatggaatcccctatcccaattctgccgctccctacccctgatgctgagacggaaaaactgataaggatgaaggacgaagaactccggaggatgcaggagatgctccaaaggatgaaacagcagatgcaagaccagtag

SEQ ID NO: 204577 - DNA, 1305 bp, synthetic construct
  misc_feature 1..1305: note = Description of Artificial Sequence: Synthetic coding sequence
  source 1..1305: mol_type = other DNA
atggccgccaccgacatcgcccggcaggtgggcgagggctgccggaccgtgccactcgctggacacgtcggttttgactctctaccagaccaactggtgaataagagcgtgtcacagggattctgtttcaatatattatgcgtgggcgaaacaggcctgggaaaatccacattgatggataccttgttcaacactaagttcgagggcgaacctgctactcacactcagccaggtgtgcaactgcagagcaacacatatgatcttcaagaatctaacgttagactcaaactgaccatcgtcagcacagtcggattcggagatcaaatcaataaagaggattcatataaacccattgttgaattcattgacgcccagtttgaagcctatctacaggaagagctgaaaattcggcgggtgttgcatacttatcatgactctagaattcatgtgtgcctttacttcattgcaccgacgggccattctctcaagtcattggatcttgttaccatgaaaaagctggattcaaaagtgaatattattcctattattgcaaaagccgatgccatttctaagtctgagctgacgaagttcaaaatcaagatcacatccgagttagtgtctaatggcgtccaaatctatcagtttccaaccgatgacgaaagcgtggctgagataaacggcaccatgaatgctcatctgcctttcgccgtgatcggctccacagaagaacttaagattgggaacaagatgatgagggcaaggcagtacccttggggcacagtccaggtagagaacgaagcccactgtgactttgttaaattgcgggaaatgcttataagagtgaacatggaagacctgagggagcagacccatacgcggcactacgagctgtatcggcgctgcaagctggaggagatgggatttaaggacaccgacccggacagtaagccgttctccttgcaggagacctacgaagccaaacggaatgagttcttaggcgaactgcagaagaaagaggaggaaatgagacagatgtttgttcaaagggttaaggagaaagaagctgaacttaaggaggctgagaaagagttgcatgagaaatttgaccgcctcaagaaacttcaccaggatgagaagaagaagctggaggacaaaaagaaatccctggacgacgaggtcaatgccttcaaacaaaggaagacggcagcggaactgctgcagagtcagggcagtcaggctggtggctcccagaccctgaaacgcgacaaggagaagaagaataatccatggctgtgtactgagtag

SEQ ID NO: 204578 - DNA, 1290 bp, synthetic construct
  misc_feature 1..1290: note = Description of Artificial Sequence: Synthetic coding sequence
  source 1..1290: mol_type = other DNA
atggccgccaccgacatcgcccggcaggtgggcgagggctgccggacggtccctcttgcagggcatgtgggttttgatagccttcctgaccagttggttaacaagtccgtttcccaagggttctgtttcaacatcttgtgcgtgggtgaaaccgggctcggaaagtccaccttgatggataccctgtttaataccaagtttgaaggggaaccggcaacacacacacagcccggagttcaactccagtccaacacctacgacctgcaggagtcaaatgtgagactgaagctgactatagttagcacagtcggttttggcgaccagattaataaggaggattcttacaaacccatcgtggagtttattgatgcacaattcgaagcctatctgcaagaggaactgaagattcgtagagtcctgcacacgtatcatgattcacgcattcacgtctgcttatacttcattgcccccacaggtcattcccttaaaagcctcgacttagtgactatgaagaaattagatagtaaagtaaacatcattcccattatcgccaaagccgacgccatctctaagtcagagctgacgaagttcaagatcaagataaccagtgagctggtcagcaacggtgtgcaaatttaccagtttccgacagatgatgagtccgtcgccgagattaatggaacaatgaatgcacacctccccttcgccgtaataggctcaacagaggaactgaaaattggaaataagatgatgagagcgcgtcagtacccctgggggacagttcaggtggagaatgaggcgcattgtgattttgtcaaattaagggagatgctgattagagtcaacatggaagatctgcgtgaacagactcatacccgacactatgaactgtatcggaggtgtaagctggaggagatgggattcaaagacactgaccctgattcaaaaccattcagtctgcaggaaacatatgaggcaaaacgaaacgagtttctaggagagctccaaaaaaaagaagaggagatgagacagatgtttgttcagagggtcaaagagaaggaagcggagctgaaagaagcagagaaggagcttcacgagaagttcgatcgcctgaagaagctgcaccaggacgaaaagaagaagctcgaggacaagaagaaaagtctggacgatgaggttaatgcatttaaacagaggaaaacagccgccgaacttctacaaagccaaggcagtcaggctgggggtagccagacattgaaacgtgataaagagaaaaagaatttcttttag

SEQ ID NO: 204579 - DNA, 1296 bp, synthetic construct
  misc_feature 1..1296: note = Description of Artificial Sequence: Synthetic coding sequence
  source 1..1296: mol_type = other DNA
atggccgccaccgacatcgcccggcaggtgggcgagggctgccggacagtaccactggccggtcatgtgggctttgatagcttgcccgaccaattggtgaacaagtccgtgtctcaagggttttgcttcaatatactgtgtgtcggagagacgggcctggggaaaagtacactgatggatacactattcaatacgaaattcgagggtgagcctgcaactcacacacagcccggggtgcaactgcagtcaaacacttacgatttacaagaaagtaatgtgcggctgaagcttaccattgtaagcaccgtgggcttcggagatcagatcaataaggaagactcttataaaccaattgtggaatttatagacgctcaatttgaggcatatctgcaagaagaactaaagattcggagagtgctgcacacttaccacgatagccggatccacgtgtgcctctacttcatcgcccccacaggacactctttgaagagtctcgacctcgtgactatgaagaagctggattccaaggtgaacatcattcctattatcgcgaaggcggacgccatttccaagagcgagctaactaaattcaagattaagattacctccgagcttgtctcaaatggcgttcaaatttaccagttccccaccgacgatgaaagcgtggcagagataaatggcaccatgaatgcgcacctgccatttgcagtaataggctcaactgaggaactcaagattggaaataagatgatgcgagcccgacaatatccatggggtacggtgcaagtggagaacgaggcccactgcgatttcgtgaaactcagagagatgctgattagggtgaatatggaggacctgcgagagcagacacatactagacactatgaactttaccggaggtgtaagctggaggaaatgggatttaaagataccgatcccgactcgaagccttttagtttgcaggagacatatgaggccaaacgtaatgagtttctgggcgagctccaaaagaaggaagaggagatgcgccagatgtttgtccaacgggtgaaggagaaggaggctgaactgaaagaggcggagaaggagctgcatgaaaaatttgatagacttaagaaacttcatcaggacgagaagaagaagctggaagacaaaaagaagtcccttgatgacgaagtcaacgcgttcaagcagaggaagacagcagctgaactgctgcagtctcaggggtctcaggctgggggcagccagaccctgaaacgtgataaggaaaagaagaacctcggctttctttag

SEQ ID NO: 204580 - DNA, 1284 bp, synthetic construct
  misc_feature 1..1284: note = Description of Artificial Sequence: Synthetic coding sequence
  source 1..1284: mol_type = other DNA
atggccgccaccgacatcgcccggcaggtgggcgagggctgccggacagttcctctcgcaggtcacgtcgggtttgacagcctccccgaccagttggttaataagtcagtgtcccaaggattctgtttcaacatactctgcgtgggcgaaaccgggctcggtaagtcaaccttgatggacaccctattcaataccaagttcgaaggagagccagctacccacacacagccaggcgtgcagctgcagtccaacacatacgatctgcaagaaagcaatgtgcgtcttaagttgacaatcgtctcaacagtcggtttcggtgatcaaatcaacaaagaggactcttacaaacctatcgtggagtttatcgatgcacaatttgaggcatatttacaggaagaactaaaaatccgaagggtgttacatacatatcatgattctaggatccacgtgtgcttatactttatcgcacctaccggccactccctaaagtcactggacctggtaacaatgaaaaagcttgattctaaggtgaatatcatccctatcatagcaaaagccgacgctatctctaagtctgagctgacgaagttcaaaatcaaaataactagtgaattggtgtcgaacggagtgcagatataccaattccccacggacgacgaatccgtggcggagatcaatggtaccatgaacgcccacttgccatttgcagtgatcggtagcaccgaggagttgaaaattgggaacaaaatgatgcgagcccgccaatatccttggggaacagtacaggtcgaaaatgaagcacactgtgatttcgtaaagctcagagaaatgctgatcagggtcaatatggaggacttacgcgagcagacccacacacgccattatgagctctatcgaaggtgcaagttagaagagatgggctttaaagatactgaccctgatagtaagcctttcagccttcaagagacctatgaggcaaagcggaacgaatttcttggcgaattgcagaagaaagaagaggagatgcgacagatgtttgtgcaacgcgtgaaagagaaggaagccgagctcaaagaagccgagaaggagcttcacgaaaagttcgatagattgaaaaagttacatcaggatgagaaaaagaagctcgaagataagaaaaagtctctagacgatgaggttaacgcgtttaagcagagaaagacagcggcagaactacttcagtctcagggctcccaggccggcggttctcaaacccttaagcgggataaagagaaaaaaaattag

SEQ ID NO: 204581 - DNA, 1284 bp, synthetic construct
  misc_feature 1..1284: note = Description of Artificial Sequence: Synthetic coding sequence
  source 1..1284: mol_type = other DNA
atggccgccaccgacatcgcccggcaggtgggcgagggctgccggactgtcccgctggccggccacgtcggcttcgattcgctacctgatcaattagtaaacaagtccgtgtcgcagggtttttgtttcaacatcctgtgtgtgggtgaaacaggcctcgggaagagcacactcatggacactttgttcaacacaaagttcgaaggggagcccgcaacccacactcaacctggggtgcagctgcaatcaaacacctacgacctgcaggagtccaatgtgagactcaaactgacaattgtgagcacggtcggattcggggatcagattaataaggaggattcgtataagcctatcgtcgaattcatcgatgctcaatttgaggcctacctgcaggaagagctgaagattagacgagtgctccatacctaccacgacagcaggatccacgtatgcctgtattttattgcacccacgggacactccctcaagtctttagacctcgtcaccatgaaaaaactggacagcaaggtcaacataattcctatcattgccaaagcggatgccattagcaagagtgaactcaccaaattcaaaattaaaatcacatcagaactggtctctaatggagtccagatctaccagttccccacagatgatgagagcgtcgcagagattaatggaacgatgaacgcccatctgccattcgccgttattggttccaccgaggagcttaaaatcggcaataaaatgatgcgggctagacaatacccctgggggaccgtgcaagtcgagaatgaggctcattgcgactttgtgaagttgcgagagatgcttattcgggtgaacatggaggatttgagggagcagacccacacccgccactatgaactctatcgccggtgtaagcttgaagagatgggctttaaggacacagaccctgattcaaagccattttccctgcaggagacatatgaggcaaaacggaatgagttcctcggcgagttacagaaaaaagaggaagagatgcggcaaatgttcgtgcagcgcgtgaaagagaaagaggcagaactgaaagaagcagagaaggaactacacgaaaaatttgatcgtctcaagaaactgcatcaagatgagaagaaaaaattggaggacaagaagaaatctctagatgatgaggtgaatgctttcaagcagaggaagaccgccgctgaactcctacagagccaaggatcacaggcggggggctctcaaaccctgaaacgggataaagaaaagaaaaactag

SEQ ID NO: 204582 - DNA, 1110 bp, synthetic construct
  misc_feature 1..1110: note = Description of Artificial Sequence: Synthetic coding sequence
  source 1..1110: mol_type = other DNA
atggacaccctgttcaacaccaagttcgagggcgagcccgccacccacactcagcctggggtgcagcttcagtccaacacctatgacctgcaggagtccaacgtgcgattgaagctgactatcgtatcaaccgttggatttggagaccagattaataaggaagattcctataaacctatagtggagttcatcgacgcccagttcgaggcttatctgcaagaagagttgaaaatcaggcgcgtgctgcacacctaccatgacagcaggatacatgtctgtctctatttcatcgcccccaccggacatagcttgaaatcactggatctggtcaccatgaaaaaattagactccaaagtgaatatcattcccattatcgccaaagcggacgcaatttctaagtcagaacttaccaaattcaagatcaaaatcactagcgagctagtctccaacggcgtgcagatataccaattccctacggatgatgagtccgtcgctgagatcaacggaaccatgaatgcacatctccccttcgctgtcatcggatcaacagaggaactgaaaatcgggaataagatgatgagggctagacagtacccttggggaaccgtacaggtggagaacgaagctcattgcgatttcgtcaaactgcgtgaaatgttgataagagtaaacatggaagatctgcgggaacagacacatacgagacattatgagctgtatagacggtgcaaacttgaagagatgggctttaaagatacagatcccgatagcaaaccattctctctgcaggagacctacgaggcaaaaagaaacgagtttttgggtgagctgcaaaaaaaggaagaagagatgaggcagatgttcgttcaacgcgtcaaagagaaggaagctgaattgaaagaggccgagaaggagctgcacgaaaagttcgaccgcctgaagaagttgcaccaggatgaaaagaaaaagctggaggataagaaaaaaagcctggacgatgaggtaaatgcctttaagcagaggaaaactgcagctgaactcctgcaaagtcaagggagccaggccggcgggtcccaaaccctgaaaagagacaaggagaagaagaaatag

SEQ ID NO: 204583 - DNA, 1374 bp, synthetic construct
  misc_feature 1..1374: note = Description of Artificial Sequence: Synthetic coding sequence
  source 1..1374: mol_type = other DNA
atggccgccaccgacatcgcccggcaggtgttcggccggcggcggctgcttcttctcggattcgagactgtggggttctctgcagcctgtactgaagagggcggtcatatgttaaggaggggagaaggttgtcggacagtcccactcgcgggacacgttggtttcgactcactgcccgaccagctggttaacaaatctgtgagtcagggcttctgtttcaacattctgtgcgtcggcgagacgggactaggtaagtcaacgcttatggacactctttttaacacaaagttcgaaggtgagcctgctacccatactcaaccaggggtacaactccagtcgaatacttatgacctgcaagaaagcaatgtccggctgaagttaaccatcgtctctaccgttgggttcggggaccagattaataaggaggactcctacaagccaatcgtagagttcatcgatgctcagtttgaggcttacttacaggaggaactgaagatcaggcgtgtactccatacttaccatgactcccgaattcacgtgtgtttgtacttcatcgctcccacaggccactcccttaagagtttggacttggtgacaatgaaaaaactcgacagcaaggtcaatatcattcccatcatagctaaggccgatgctatttctaagtctgagctcacgaaattcaagattaaaattaccagcgagctggtttctaacggagtccaaatttaccaattccctactgatgacgagtccgtggcggaaattaacgggaccatgaatgctcatctgccttttgctgtaataggctcaacagaggaactgaagattgggaacaaaatgatgcgagcacgacaatatccctggggcactgtgcaggtagaaaatgaggcccattgcgactttgtgaagctacgagaaatgcttatcagagtgaacatggaagatttgagggagcagactcacactaggcactacgagctctacagacggtgcaaattggaggagatgggattcaaggacactgacccagactctaagcccttctcattgcaagaaacctacgaggcgaagcgcaacgaatttttaggtgaacttcagaagaaggaggaggagatgcggcagatgtttgtacagcgagttaaggagaaagaagccgagctgaaagaggccgaaaaggagttgcatgagaagttcgaccgcctcaaaaaactgcatcaggacgagaaaaaaaaacttgaagacaaaaaaaagagtcttgatgacgaggtgaacgccttcaagcagaggaagacggccgccgagttgctccagtcacaaggcagccaggccggggggtcccagactcttaaacgggacaaggagaaaaagaaatag

SEQ ID NO: 204584 - DNA, 1284 bp, synthetic construct
  misc_feature 1..1284: note = Description of Artificial Sequence: Synthetic coding sequence
  source 1..1284: mol_type = other DNA
atggccgccaccgacatcgcccggcaggtgggcgagggctgccggacagtcccgcttgccggccacgtcggcttcgactcactccctgaccagttagtgaacaaaagtgtgagtcagggattctgtttcaatattctgtgcgttggcgagaccggactcggcaagtccacactcatggacaccctgttcaatacaaagttcgagggcgaaccagccacccacacacagcctggagtccagcttcagtccaatacctatgacttgcaagagagcaacgtgcgcctcaagctgaccattgtgtcaacagttgggttcggcgaccaaattaataaggaagattcctacaaacctattgtagaattcatagatgcccagttcgaagcctacttgcaggaggagctgaaaatacgccgggtgttgcacacctaccatgactcccggatccatgtgtgtctatacttcatcgcccctactggtcactcgcttaaaagtctcgatctagtgacaatgaaaaagctggacagcaaggtgaacatcatccccattatcgcaaaagcagatgcaatctctaaatccgagctgactaaatttaaaatcaaaataacatctgaacttgtatctaatggagttcaaatatatcagttccccacagacgacgagagcgtagcggagatcaacggcactatgaatgcacatctcccttttgccgttattggaagtaccgaagaattgaaaattgggaataagatgatgcgcgcccggcaatatccttggggcaccgtgcaggtggagaacgaagcgcattgcgattttgtcaagctgcgggagatgctgatcagggtcaatatggaggatctgcgggaacagactcacacacgccactatgagttatatagacgctgcaagttggaagagatggggtttaaagatacagaccccgactctaagccattttcactccaggaaacatacgaagccaaacggaacgagttcctcggtgagttgcaaaaaaaagaggaggagatgcggcagatgttcgttcagcgggtcaaggaaaaggaagctgagctgaaagaagccgagaaggagctccatgaaaagttcgatagactgaagaagctgcaccaggacgagaaaaagaaattggaggataaaaaaaagagcctggatgatgaagtgaacgcctttaaacagcggaagacagccgcagagctgctgcagtcgcaaggatcccaggccggcgggtctcaaaccctgaaacgggacaaagagaagaaaaattag

SEQ ID NO: 204585 - DNA, 804 bp, synthetic construct
  misc_feature 1..804: note = Description of Artificial Sequence: Synthetic coding sequence
  source 1..804: mol_type = other DNA
atggccgccaccgacatcgcccggcaggtgggcgagggctgccggacggttcctctggcaggacacgtgggatttgatagtctgccggatcaactggttaacaaaagcgtgtcacagggcttttgttttaatatcctgtgtgttggcgaaacaggcttgggcaagagtacactgatggatacgcttttcaacactaagtttgaaggggagcccgctacacacacccaacccggtgtgcaattacaaagcaacacttacgaccttcaggaaagtaacgtgcgactaaaattgaccatagtgtccactgtgggcttcggggaccagatcaacaaagaggatagctacaagcccatcgtggagttcattgacgctcagttcgaggcctatctccaagaggagctcaagatcagacgtgtgcttcatacctaccatgactcccgcattcatgtgtgtctttattttatagcccctacaggccactccctcaaatccctcgacctcgttacgatgaagaagttagacagtaaagtcaacatcatccccatcatcgctaaagctgatgctatatctaagtccgagctgaccaagttcaagatcaaaatcacatcagaattggtgtctaacggcgtgcagatctatcagtttcctacagacgacgagagcgtggccgaaatcaacgggacaatgaatgctcatttaccctttgccgtgattggctcaacagaggagttgaagatcggtaataagatgatgcgggcccgccagtacccctggggcactgttcagggaagcagccaagtgtag

SEQ ID NO: 204586 - DNA, 1452 bp, synthetic construct
  misc_feature 1..1452: note = Description of Artificial Sequence: Synthetic coding sequence
  source 1..1452: mol_type = other DNA
atggccgccaccgacctggagcggttcagcaacgccgagcccgagccacggagtcttagcctcggagggcacgtcggcttcgatagcctcccagaccagctcgtcagcaagtcagttacgcaagggttttcctttaatatcttgtgcgtgggggagacagggatcggtaaaagcacactcatgaacactctgttcaacaccacatttgaaaccgaagaagcctctcaccatgaagcatgtgtgcggctccgcccacagacgtatgacctgcaggagagcaacgtgcagctgaaacttacaatcgtagatgcggtcggcttcggggatcagattaacaaggacgagtcctatagacccattgtcgactacatagacgctcagttcgaaaactatctgcaggaggaactgaagataaggcgctccttgtttgactaccatgacacccggattcatgtgtgtctctactttattactcctaccggtcactcactgaaaagcctggacctcgttacaatgaagaagctggactccaaggtaaatatcattcccatcattgctaaagctgacactatcagcaagtccgagttgcacaaattcaaaatcaaaataatgggcgagttggtgagtaacggtgtgcagatctaccaatttcccacagacgacgaagctgtggcagagattaatgctgttatgaacgcacatctcccattcgctgtcgtaggaagtacggaagaggtgaaagttgggaacaaactggtgcgtgccagacaatacccatggggcgtggtgcaggtggaaaatgaaaaccactgtgacttcgtgaagttaagagagatgctgatccgggtcaatatggaagatctgagagaacagactcactcccggcactacgagctttaccgcaggtgcaagctcgaggagatgggctttcaggatagcgacggtgactcacagcctttttccctccaggaaacctacgaagccaagaggaaggaattcttgtcagagttgcagaggaaagaagaggaaatgagacagatgtttgtaaataaggtcaaagaaacagaactggagctgaaagaaaaggaaagagaactccacgagaagttcgagcacttaaaaagagtccaccaggaggagaagcgcaaggtggaggagaagcgacgggaactcgaagaggaaacaaacgcatttaacaggcgaaaggccgcggtggaagccctgcaatcccaggcactgcacgctacttcccaacagccactgcgcaaggataaggataaaaagaatcgttctgatattggtgctcaccaacctggaatgtctctcagctcctccaaggtaatgatgactaaagcaagcgttgagcccctcaattgtagctcatggtggccagcaatccagtgctgctcatgtttggtccgggacgccacctggagagaggggtttctgtag

SEQ ID NO: 204587 - DNA, 1110 bp, synthetic construct
  misc_feature 1..1110: note = Description of Artificial Sequence: Synthetic coding sequence
  source 1..1110: mol_type = other DNA
atgaacaccctgttcaacaccaccttcgagaccgaggaggccagccaccacgaggcttgcgtccggttgagaccacagacatatgacctgcaggagagcaatgtccagttaaagctcactatcgtagacgccgttgggttcggcgaccagattaacaaagatgagtcctaccggccaattgttgattacatagatgctcagtttgagaattatcttcaggaggagctgaagatcaggcgatcactctttgactatcatgatacccgaatacacgtgtgcttgtattttattacacctacaggtcattccttgaaatctcttgaccttgtcactatgaaaaagcttgattcaaaagttaatattatccctattattgcaaaggctgatactatcagcaaatccgaactccacaaatttaaaatcaagattatgggggaattagtgagcaatggcgtccagatataccaatttcccactgacgacgaggcggtagccgaaataaatgctgtgatgaacgcccacctgcccttcgctgtggttggatccaccgaagaggttaaggtcgggaataaattagtaagggcaagacagtacccttggggggtggtgcaggtcgagaacgaaaatcattgcgactttgtgaaactgagggaaatgctgattagggtcaacatggaagaccttcgcgagcagacacactccaggcactatgagctctatcgtcgctgcaaactggaggagatgggattccaggactctgatggggacagtcagccttttagcttacaggagacctatgaagcgaaacgaaaggagttccttagtgagctgcagagaaaagaggaggaaatgcgccaaatgttcgtgaacaaggtcaaggagacagagctggagttgaaggaaaaggagagagagcttcacgaaaaatttgagcacctgaagcgggtgcatcaggaagagaagagaaaggtggaggaaaagagacgagagctcgaggaagagaccaatgcgttcaataggcgcaaggctgctgtggaagcactacagtcgcaggcccttcatgcgaccagccaacagcccctccgtaaagataaagacaagaagaactag

SEQ ID NO: 204588 - DNA, 1290 bp, synthetic construct
  misc_feature 1..1290: note = Description of Artificial Sequence: Synthetic coding sequence
  source 1..1290: mol_type = other DNA
atggccgccaccgacctggagcggttcagcaacgccgagcccgagccccggagcctaagtttgggaggacatgtcggcttcgatagcctgccagatcaactcgtaagcaaaagcgtaacacaagggttttcatttaacatcctgtgcgttggagagacaggaatcggcaagagcacgctgatgaacacactgtttaacaccaccttcgagacagaggaagctagccaccacgaggcatgcgttagactcaggccccaaacttacgatctgcaggagtccaatgtccaacttaagttgacaatagtggacgccgttggtttcggtgatcagataaacaaggacgaaagctacagacccattgtcgattatatcgacgcccagttcgagaactacttgcaagaggagctcaagatccggcgctccctgttcgactaccacgacacgagaattcatgtatgcctgtatttcatcacccctacgggtcacagcctgaagtccctcgatttggtgacaatgaagaaactggattcaaaggtaaatatcatccctattattgccaaggccgatacgatttctaagtccgaattacataagttcaaaataaagatcatgggcgaactcgtctccaatggcgtacagatttaccagttcccaaccgacgacgaggccgtggccgaaattaacgccgtaatgaatgcccatctgccctttgccgtcgtaggctctaccgaagaggttaaggttggaaataaactcgtgagggccaggcagtacccgtggggagtggttcaggtggaaaatgagaaccactgcgactttgtcaaactgcgcgagatgttgatcagggtgaacatggaagaccttcgtgagcagactcactcccgccactacgagctataccgaaggtgcaaacttgaagaaatggggtttcaggacagcgatggcgatagccagccgtttagcttacaagaaacctacgaggctaaacggaaggaatttcttagtgaactccagcgaaaagaagaggagatgcggcagatgtttgtcaataaggtcaaggaaactgagctcgaactgaaagagaaggaacgcgagctgcacgagaagtttgaacatctcaagcgggtgcatcaggaagagaaaagaaaggtggaagagaaaagacgggaacttgaagaggagaccaatgcattcaaccgtcggaaagccgcagtcgaggcacttcaatctcaggccctgcatgccacctctcaacagccgcttcgcaaagacaaggacaagaagaactag

SEQ ID NO: 204589 - DNA, 1329 bp, synthetic construct
  misc_feature 1..1329: note = Description of Artificial Sequence: Synthetic coding sequence
  source 1..1329: mol_type = other DNA
atggccgccaccgacctggagcggttcagcaacgccgagcccgagcccagaagcttatcgcttggcggacacgtgggattcgactcccttcccgatcagctggtgtccaagtccgtcacacagggattctccttcaatatcctctgcgttggggagacagggattggcaagagcacacttatgaatacgcttttcaacaccaccttcgagactgaagaggcgagccaccacgaggcctgtgtgaggctgaggccccagacttatgacctgcaggaaagtaatgtacagctgaagttaactattgtggacgcggtcgggttcggagatcagattaataaggatgaatcctatagacccatagtggactacattgacgctcagtttgagaattacctccaggaagagctgaaaattaggcgcagcctctttgactatcacgacaccagaatccacgtgtgcctatattttatcacacccacgggtcattcattgaaatccctcgatcttgtcaccatgaaaaaactggattccaaggttaacattatccctatcattgcaaaagccgacacaatttccaagtctgaactccacaagttcaagatcaagattatgggtgaacttgtaagtaatggagtccagatttatcaatttcctaccgacgatgaagctgttgcggagatcaatgccgtcatgaatgctcacctgccctttgcagtggtggggagcacagaagaggtgaaggttgggaataagctagtgcgggctcggcagtatccttggggggtcgttcaggtggaaaatgaaaaccattgcgatttcgtcaaactgcgcgagatgttaattagagtgaatatggaggaccttagggagcaaactcatagccgacattatgaattgtatcgcaggtgtaaactagaagagatgggcttccaggattcagacggcgattcacagccattctctctgcaggaaacttacgaggccaagagaaaggagtttttgtctgagcttcagagaaaggaggaggaaatgcgacagatgttcgtgaataaggtgaaagagaccgagctcgaactcaaggagaaggagagagaactgcacgagaaattcgagcacctgaagagggttcatcaggaggaaaagcgcaaggttgaggaaaaaaggcgagagctcgaggaagaaacaaatgctttcaacaggcgcaaagccgcggtagaggctctccagtcgcaagccctccatgcaacctcccaacaacccctacgaaaagataaggataagaagaaggcatctgggtggtcctcaatttattcagtcacaattccctag

SEQ ID NO: 204590 - DNA, 1707 bp, synthetic construct
  misc_feature 1..1707: note = Description of Artificial Sequence: Synthetic coding sequence
  source 1..1707: mol_type = other DNA
atggagcgggaccggatcagcgccctgaagcggagcttcgaggtggaagaagtggagactcccaattctacccctccgcgaagagtgcagaccccgctgcttcgggcgacagtcgcctcctccactcagaaatttcaagatctgggagtgaagaattctgaaccctcagccagacacgtcgatagcctgtcccaacgcagcccaaaggcctcgctgaggcgtgtcgagctgtcgggacctaaagctgccgaacccgtgtctcggagaactgagctgtccattgacatttcctccaagcaggtcgaaaatgcgggcgccatcgggcctagtcgattcggacttaaacgagcagaagttctgggacacaagacccctgaacccgcccctcgcaggaccgagatcacaatagtaaagccccaggagtccgcccacagaaggatggaaccacccgcttccaaagtccccgaagtgcccacggcacctgcaacagacgccgctcctaagcgggtggaaatccaaatgccgaaaccagccgaagccccgactgctccttctccagcccagacccttgagaactccgaacccgctcccgtgtcccagcttcaatccaggctggaaccgaaaccacagccacccgttgctgaggctacaccaagaagtcaggaggctaccgaagctgctccctcttgcgtgggcgacatggctgataccccccgggatgcaggtctgaagcaggcgccagcttctagaaatgaaaaggcacccgtggatttcggttacgttggaatcgatagcatccttgaacaaatgcggcgcaaggccatgaagcagggcttcgaatttaacattatggtagtcgggcaatccggcctgggaaaaagtaccctcataaacacactgtttaaatctaagatttcgagaaagagcgtgcagcccaccagcgaggaaaggattccgaagacaattgaaatcaaatctattacccatgatattgaagagaagggggtgaggatgaaacttactgtcatagatacacctggattcggagaccacattaataatgagaactgttggcagccaataatgaaattcatcaacgatcagtacgagaagtatcttcaggaggaggtgaacattaacagaaagaaaaggattccagacacgagggtccattgttgtttatatttcattccggccactggccattccctgaggccgctggatattgaattcatgaaacgcctgtctaaggttgtgaacatcgtgcctgtgatagccaaggcagatacactcactctggaggagagggtgcacttcaaacaacgcattaccgccgacctattgtctaacgggattgatgtgtatccacagaaggaattcgatgaggactctgaggatcggctcgtcaacgaaaagtttagggagatgataccctttgctgtggtcggctccgatcacgaataccaggtgaatgggaaacgtatcctcgggcgcaaaaccaagtgggggacgatcgaagttgagaacacaactcactgcgagtttgcgtatcttcgcgacctactcattcgaacacacatgcaaaacattaaggatatcacttcaagcattcactttgaggcctatcgggtgaagcgcttgaacgaaggttcctctgccatggccaacgggatggaggagaaagagcctgaggctcctgagatgtag

SEQ ID NO: 204591 - DNA, 591 bp, synthetic construct
  misc_feature 1..591: note = Description of Artificial Sequence: Synthetic coding sequence
  source 1..591: mol_type = other DNA
atggccgacaccccccgggacgccggcctgaagcaggcccccgcctctcgtaacgagaaagctcccgttgatttcgggtacgtgggtatagacagcattctagagcagatgaggcgcaaagctatgaaacaggggttcgagttcaatatcatggtcgtcggccagagtggtcttggaaaaagtactctcataaacacactgtttaagagtaagataagccggaaatccgttcagcctacttcggaagaacgcatacctaaaacaatcgagatcaagagtatcactcatgacatcgaggagaaaggtgttaggatgaagctgactgttattgatacacctggttttggggatcacattaacaatgagaactgttggcagcccatcatgaagtttatcaatgaccagtatgagaagtaccttcaggaggaagtgaatataaacaggaagaagcgaatccccgatacccgcgtccactgctgcctgtattttattcctgcaacggggcattcactgcccctgttagaacagaaggttccattatcccagccgtcagcggattgcctggctcgatgcggggacaggttggagtag

SEQ ID NO: 204592 - DNA, 1740 bp, synthetic construct
  misc_feature 1..1740: note = Description of Artificial Sequence: Synthetic coding sequence
  source 1..1740: mol_type = other DNA
atgagcgaccccgccgtgaacgcccagctggacggcatcatcagcgactttgaggccctgaagcggtcctttgaggtggaggaagtggagaccccaaacagcacccctcctagaagggtgcagacaccacttctccgagctactgtcgcttcctcaacgcagaagttccaggacctgggcgtgaagaattcagagcctagtgctcgtcatgtcgattcgttatctcagcgatcaccaaaagccagcctgcggagggtcgagctgtcaggcccaaaggccgccgagccagtatcacggcgtaccgagctgtcaattgatatctcaagtaagcaggttgaaaatgccggagccatcggcccttccagattcggtttaaaacgtgccgaggtactgggtcataagactccagaaccagctccccgaagaacagagatcacaatcgtcaagcctcaggagtctgcacaccggcgcatggagccacccgccagtaaagttcctgaggtgcctacagcccccgctacggatgccgctcctaaacgggtagaaatccagatgcccaagccagccgaagcccctaccgctcccagcccagcgcagacactagaaaactccgagccggcacccgtgtctcaactccaaagcaggctggaacccaagccccagcccccagttgctgaagcaacacccagaagccaggaggccacagaagccgctccatcctgcgtgggagatatggccgacactccgcgggatgccgggctcaaacaggcccccgcctcacggaatgaaaaggcgcctgtggattttggctacgtcgggattgatagtattttggagcagatgaggcgtaaggcaatgaagcaaggttttgagttcaatattatggttgttggccagtccggactcggaaaatctacgctcataaacactctctttaagagcaagatttcccggaagtccgtgcagcccactagcgaagaacgtattccaaagaccattgagataaaatctattacgcatgacatcgaagagaaaggcgtgcgtatgaaactgactgtgatcgacacgcccggcttcggcgaccacattaacaatgaaaattgctggcaacctataatgaagtttattaacgatcagtatgagaaatacctgcaggaggaggtgaacatcaaccggaaaaagcggatacccgataccagagtccattgttgcttgtacttcatccccgctactgggcactccctcagaccgttagatatcgaattcatgaagcggctgagtaaggtggtcaatatcgtaccagtcatcgcgaaagcggatacactaaccctggaggagagggtgcactttaagcaacgcatcactgcagacttgctcagcaatgggatcgacgtttatccgcagaaggaattcgatgaggacagcgaggaccgccttgtgaatgagaaatttagagagatgatcccctttgccgtggttggaagcgatcatgagtatcaggtgaacggcaaacgaattctggggcggaaaaccaagtggggcacgatagaggtggaaaacacgacgcactgcgaatttgcttacctgcgcgacctgcttatacggacccacatgcagaatatcaaagatatcacctctagcatccacttcgaggcctatcgggtaaagcggctcaatgagggcagcagcgccatggctaacggaatggaagagaaagaacctgaggcccccgagatgtag

SEQ ID NO: 204593 - DNA, 1761 bp, synthetic construct
  misc_feature 1..1761: note = Description of Artificial Sequence: Synthetic coding sequence
  source 1..1761: mol_type = other DNA
atgaagaagagctacagcggcggcacccggaccagcagcggccggctgcgtcggctcggcgattccagcgggcccgctttaaaacgtagtttcgaggtcgaggaggtagagacgcccaattccacgcccccaaggcgagttcagaccccccttctgcgagctaccgtagccagctctacgcagaagttccaggacctgggggtaaagaatagtgaacctagcgctcgccacgtggattctttatctcaacggtcccctaaagcctcgctccggcgggttgagttgagcgggccgaaggccgctgaacccgtttctagacgcaccgagctatccatcgatatttccagcaagcaggtcgaaaacgcaggcgctatcggcccctcaagatttgggctgaagagggccgaggttttaggtcataagactcccgaaccggccccacgccgcaccgaaatcactattgttaagccgcaggagagcgcacatagacgcatggagccgccagcctccaaggtgcctgaagtcccaaccgcccccgccaccgacgctgcaccaaaaagagtggaaatccagatgccaaaaccggctgaagcccccaccgctccctcacccgctcagactctggagaattcggagccagcgccagtgtcccaactgcagtcgaggctggagccaaaaccccagccccccgtggccgaagcgacccctcgtagccaggaagccaccgaggcggcgccatcctgtgtaggggacatggcagataccccaagagacgcgggcctgaagcaggcgccagccagccgaaacgagaaggcccccgtggattttggatatgtaggaatagattctatcttggagcaaatgaggagaaaggcaatgaagcaggggttcgagtttaatattatggtggtcgggcaatctggccttgggaagtccactcttatcaatacattgtttaaatctaagatatctcggaagagcgtgcagcctactagtgaggaacgcatccctaaaaccattgagataaagtcaataacacatgatatcgaggaaaaaggcgtgcgaatgaaacttacggtgatcgatacaccaggatttggcgaccacatcaataatgaaaattgctggcagcctatcatgaagtttatcaatgatcagtacgaaaaatatctgcaagaggaggtgaacattaatcgcaaaaagaggatccctgacacacgcgttcattgttgcctctattttatccctgcaaccgggcacagtttgagaccactggatattgaattcatgaagcgtctgagtaaggtggtgaacatcgtccccgtaatcgccaaggctgacaccttgaccctggaggagcgagtgcacttcaagcagcggattacagccgatctcttgtccaatggcatagacgtttatccacagaaagagtttgacgaggattcagaggatagattggtcaatgagaagttccgagagatgatccccttcgcagtggttggcagcgaccatgagtatcaggttaatgggaaacggatactggggagaaagactaaatggggaaccatagaggtggagaacaccactcattgcgagttcgcctacttgcgcgatttgctgatcaggacccacatgcagaacatcaaggatataacatcgagcatacactttgaggcttacagggtgaaaaggctaaacgaggggagttctgctatggccaacgggatggaagaaaaggagcctgaagctcccgaaatgtag

SEQ ID NO: 204594 - DNA, 1425 bp, synthetic construct
  misc_feature 1..1425: note = Description of Artificial Sequence: Synthetic coding sequence
  source 1..1425: mol_type = other DNA
atgggcagcagcttctgggagggcctgcaggtggccgtgggcctgcctcagggttgttggcctcagggcctggattctggggagccagccgaaggcggccaactggaggcagcaccggtctgcattgtgactcgccaaagcaaagagactgccggtcctactctgggccgagggggatggagacagggctcccttcgaagaggcaaaggcacgtcgtgtaggtgtagacagctaagccccggccatggcccgggccgactgaccggatgcggcgagtgtcacaggctcccatgccgcggcctggtgtcagggtttacaggactcaggggacaggaggaggatgatctcgccttctgtctggccaccatcggaagcgacagacaggccaccgaagcggcgccttcatgtgtgggagacatggcagacactcccagggatgccggcctcaaacaggctccagcctcacggaacgaaaaggctccagttgatttcggatacgtcgggatcgattccatcctggagcaaatgcggcgtaaggctatgaaacaggggttcgaatttaacatcatggtggtgggacagtctggtctggggaaatctacattgataaacactttattcaagtctaagatctcacgcaagtctgtacaacccactagtgaagagagaattccaaaaacaatagagattaaatcaatcacccacgatatcgaagaaaaaggcgttcggatgaagctgacagtaattgatactcctgggtttggtgaccatatcaataacgaaaactgttggcagcctataatgaaattcattaatgaccaatatgagaaatacttacaagaggaggtcaacatcaaccgtaagaagcgtatccctgataccagagtccactgctgcctgtattttattccagccactggtcactcccttcgaccacttgacattgaatttatgaagagattgtcaaaagtggttaatatcgtgccagtgatcgccaaggcagatacacttactctcgaagagagagtgcatttcaaacagcgcataaccgcggatctgctaagcaatggcattgatgtatatccccaaaaagagttcgatgaggactcagaagatagactagtaaacgagaagttccgggaaatgattcctttcgccgttgtcggctccgaccatgaatatcaggtcaacggcaagagaatactcgggcggaaaacaaagtggggaactattgaagtggagaataccacccattgcgaatttgcttatctccgtgacctgctcattaggacacacatgcaaaatattaaggatattacctcttctattcacttcgaggcgtatagagtgaaacgacttaacgaagggtcatcagccatggccaacggcatggaggagaaggagccagaagccccggaaatgtag

SEQ ID NO: 204595 - DNA, 1269 bp, synthetic construct
  misc_feature 1..1269: note = Description of Artificial Sequence: Synthetic coding sequence
  source 1..1269: mol_type = other DNA
atggagccccccgccagcaaggtgcccgaggtgcccaccgcccccgccactgacgccgccccaaagagagttgaaatccagatgccgaaaccagcagaggcacccaccgccccgtcacctgcccagacacttgaaaactctgagccggctcccgtttcccagctccagtctcgtttagagccaaagccccaaccccccgtggcggaggctacccctcgcagccaagaagccaccgaagcagccccgtcttgtgtgggggacatggcagacacaccgagagatgccgggcttaagcaggcaccagcttcacggaacgagaaggctcctgtggactttggctacgtgggaattgatagcattctggagcagatgaggcggaaggctatgaaacagggcttcgagttcaatattatggtggtgggacagtctgggttgggtaagtccacgctcattaataccctattcaagtcaaagatctctcggaagtcagttcagcccactagcgaggagaggatccccaagaccattgaaatcaagtccattacacacgatatcgaggaaaagggagttaggatgaagctaaccgtaatagatacccctgggtttggcgatcatattaacaatgagaattgctggcaaccaattatgaagtttattaacgatcagtacgaaaaatacctgcaggaagaagtcaacatcaaccggaagaagcgcatccctgatactagggttcattgctgtttgtattttatcccagccactgggcatagcttacgaccacttgacatcgagtttatgaaaaggctgtccaaagtagtcaatattgtaccagttattgcaaaagcagatacgctgaccttagaagaaagagtgcatttcaaacagcggatcacagccgatctgctatcaaacggcatagatgtctatcctcagaaggagttcgatgaagattcagaggaccgactagttaatgagaagttccgggaaatgattccattcgcagtggtcggcagcgatcacgagtaccaggttaacggcaaacggattctggggaggaaaactaaatggggcaccattgaagtggaaaataccactcattgtgagttcgcctacttgagggacctcctcatcaggacgcacatgcagaacatcaaagatattaccagctcaatccactttgaagcctaccgtgtcaagcgcctcaatgagggcagtagtgcgatggctaatggaatggaggagaaagagccagaagcccccgagatgtag

SEQ ID NO: 204596 - DNA, 1008 bp, synthetic construct
  misc_feature 1..1008: note = Description of Artificial Sequence: Synthetic coding sequence
  source 1..1008: mol_type = other DNA
atggccgacaccccccgggacgccggcctgaagcaggcccccgccagccgaaacgagaaagctcctgtggacttcggttacgtcggaatcgactcaatcctggaacagatgaggagaaaggccatgaagcaaggcttcgagttcaatatcatggtggtgggacaaagtgggttgggcaagtctaccctgattaacacactgttcaaatctaaaatttccagaaaatctgtccagccaacctctgaggagagaatccctaagacaatcgagatcaagagcataacccacgatattgaagagaaaggagttcggatgaaattgactgtcattgatacccccggctttggagatcacattaacaatgaaaactgctggcagcctataatgaagtttataaacgaccagtacgaaaagtatttgcaagaagaggtgaatattaacaggaagaagagaatccccgacactcgtgtgcactgctgcctctactttatccccgccaccgggcacagcctgcggcctctggacattgagttcatgaagagattgtcgaaggtggtcaatattgtacctgtaatagcgaaggcggacactctgaccctcgaggaacgggtgcacttcaaacaacggatcaccgctgacctcttatctaacggcattgatgtttatccccagaaggagtttgacgaagatagcgaagatcgcttagttaatgagaagtttcgcgagatgatcccattcgccgtcgtgggctctgatcatgagtaccaggtgaacggaaaaagaatactaggacggaaaaccaagtggggcacaattgaggtcgagaacactactcattgtgagtttgcctacctgcgagacctgctgattaggactcacatgcaaaacattaaagacatcacttcttccatccatttcgaagcgtaccgggtgaaaagactcaacgaagggagtagcgctatggccaacgggatggaagagaaagaacccgaagcccctgaaatgtag

SEQ ID NO: 204597 - DNA, 1269 bp, synthetic construct
  misc_feature 1..1269: note = Description of Artificial Sequence: Synthetic coding sequence
  source 1..1269: mol_type = other DNA
atggagccccccgccagcaaggtgcccgaggtgcccaccgcccccgctaccgacgctgcacccaaacgcgtcgagatccaaatgcctaaacctgctgaggctcctaccgctccttcccccgcccagaccttggagaacagtgagccagctcccgtgtcccagctgcagagtcgattggagcccaagcctcagcctcctgtagcagaagccacacctcgatcccaagaagcaaccgaagctgccccgagttgtgttggtgacatggccgacactccaagagatgccggccttaaacaggctccagcgagccggaatgagaaagcaccggtggatttcggttacgttggaatcgattccatcctggagcagatgcgccgcaaggctatgaagcaggggttcgaatttaatatcatggttgtaggccagtctggactggggaagtctactctgattaatacactgttcaagtccaagatatccaggaaaagcgtgcagcccacgagcgaagagcggatcccaaagacgattgagattaagagtataacacatgacatcgaagaaaagggggtaagaatgaagttgaccgtgattgatacgccagggttcggagatcatataaataatgaaaattgttggcagcctatcatgaaatttatcaatgatcagtacgagaagtatttgcaggaagaggttaatataaacaggaagaaaagaattcctgacactagggtgcactgttgtctttattttattcccgcgaccggacattccctgcggccactcgatatcgaatttatgaaacggctcagcaaagtggtgaacatcgtgccagttatcgccaaagccgacactcttactctcgaggaacgcgtgcactttaaacagcgtataacggctgatttactgagtaacggcattgatgtctacccgcaaaaagagttcgatgaagattcagaggaccgtctggtaaacgagaaatttagggagatgattcccttcgcagttgtgggctctgatcacgagtaccaggtcaatgggaaacgcattttggggaggaagacaaagtggggcactatagaggtggagaataccacccattgtgaatttgcctatttgcgcgaccttttaatcagaactcatatgcagaacatcaaggatatcaccagcagcatccacttcgaagcataccgggtgaaacgattgaatgagggttcctccgcgatggccaacggaatggaggagaaggagcccgaagccccggagatgtag

SEQ ID NO: 204598 - DNA, 1089 bp, synthetic construct
  misc_feature 1..1089: note = Description of Artificial Sequence: Synthetic coding sequence
  source 1..1089: mol_type = other DNA
atggccggcgccggctgcaccggcacctggagctggctgtggggcaccgccactgaagctgctccctcttgcgtcggggacatggccgatacacctagagacgccggccttaaacaggctccagcctctcgaaatgagaaggcaccagtggactttggctatgtgggtattgactcaatacttgagcaaatgagaagaaaagcaatgaaacagggcttcgaattcaatattatggtagtcgggcaaagcggattgggtaagagtacgctcattaacactcttttcaagtcaaaaatctctcgtaagtcggtacaaccaacctctgaagagagaatcccaaagaccatcgaaatcaaatccatcacacatgatatcgaggaaaagggcgtgaggatgaaactgacagtgatagatacacccggtttcggggaccacatcaataacgaaaattgctggcagcccattatgaaattcatcaatgatcagtacgaaaagtacctgcaggaggaggtgaacattaatcggaagaaaagaatccccgacacaagagtccactgctgtctctacttcatccccgcgaccggacacagtcttaggcctcttgacattgagttcatgaagcggctctctaaggtcgtgaacattgtgccagtgatagccaaagcggataccctgactttggaggaacgcgtacacttcaagcagcggattactgccgacttactgtccaatggcattgacgtctatccacagaaggagttcgatgaagacagcgaagacaggttggtaaatgagaagtttagggagatgatacccttcgctgtggtaggctctgatcatgagtaccaggtgaacggtaaaagaattttgggtagaaaaacaaagtggggcacgatagaagtggagaacaccacccactgcgaattcgcgtatctgagagacctattaatccggacccacatgcagaatatcaaggacatcactagcagcatccacttcgaagcctatagagtcaagcgcctaaacgagggtagttctgcaatggctaatggtatggaggagaaagaaccagaggctcccgaaatgtag

SEQ ID NO: 204599 - DNA, 582 bp, synthetic construct
  misc_feature 1..582: note = Description of Artificial Sequence: Synthetic coding sequence
  source 1..582: mol_type = other DNA
atgaccctgtgcccccaggcctggctgcccgagggcagcgaggagcagctacgctgtgcagaccatccttcgtgtggcgtgctgtctgctgggccctgggggggcggccaggcaagccacttgcaacggtcccccgtgggatgtactcttccttctatcccaattgggccggtgccgtggtctgttagcgagccccgaggggagtgttcacctcctggagcccccggcccccccgccagacacatggtctggccttccctttccccctacccttgtcccgctccaaagggcagaaaattacagggcccactgcccccaactgcacagccactgcaggccccttggcagctcccactccttgaacagaaagttcccctgtcccaaccaagcgccgattgttggccggatgccggaactggctggaatgaaggcggggtgtttatatcccttcccagcccaagtcacgcaaccccagctcctaccggcctccaggtcctccttatgagatgggacctaatcgaggacaaaaaggagggggaaatgacacccaccccgagctcacccagcttcgaaaaagtgtag

SEQ ID NO: 204600 - DNA, 1071 bp, synthetic construct
  misc_feature 1..1071: note = Description of Artificial Sequence: Synthetic coding sequence
  source 1..1071: mol_type = other DNA
atggccatgagctacgtgaaggacgacatcttccggatctacatcaaggagaaaaaggaatgcagaagggatcatcgcccaccctgtgcccaggaggcacccagaaatatggtccaccctaacgtcatctgtgatggctgtaacggtcccgtggtagggaccagatataaatgtagcgtgtgtcctgactatgacctttgctctgtgtgcgaaggcaaaggactacatagagggcacacgaagctggcttttccaagtccatttggccacctgagtgagggattctcacacagcagatggctcaggaaagtgaagcacggccacttcggatggccagggtgggaaatggggccacccgggaactggtcacccagaccacctagagccggcgaggctaggcccggcccgaccgctgagagcgcttccggcccgagcgaagatcccagcgttaatttcctcaagaatgtgggagaatccgtggcggccgcactttctccgctgggcatcgaagttgacattgatgtggagcatggcgggaaacgctccagactgacaccagtgtcacccgagagttcgagcaccgaagaaaagtcctcttcccagccctcctcctgctgctctgacccctccaagccaggggggaatgttgaaggagccacacaatctctggctgagcagatgcgtaaaatcgcccttgaaagtgaggggcggcctgaagagcagatggagagtgacaattgctcggggggcgacgacgactggacccacctttcaagtaaggaagtggaccccagtaccggtgagctgcagtccttgcaaatgcccgagagcgaggggcccagcagccttgaccctagtcaggaaggccctactgggctgaaggaagccgcattgtacccccacctcccccccgaagctgaccctcgcctcattgaaagcttgtctcagatgttgtccatgggtttctctgatgagggtggctggttgacccgcctgctgcaaacaaaaaactatgatatcggagcggccctggatactattcagtactctaagcacccgccaccgctgtag

SEQ ID NO: 204601 - DNA, 1071 bp, synthetic construct
  misc_feature 1..1071: note = Description of Artificial Sequence: Synthetic coding sequence
  source 1..1071: mol_type = other DNA
atggccatgagctacgtgaaggacgacatcttccggatctacatcaaagaaaagaaagaatgtagacgtgaccaccgccccccgtgcgcacaagaagccccacggaacatggtgcatcccaacgtgatctgtgacggatgcaacggtcctgttgttggcacgcgctataagtgtagtgtgtgcccagattacgatctctgttccgtgtgtgaagggaagggtttgcaccgtgggcacacgaaactggcgttcccttctccatttggacatctctccgaggggttttcccacagccgatggctgcggaaagtgaaacatggtcatttcggttggcctggttgggagatgggaccacctgggaactggagtcctagacccccgagagccggcgaggctcgcccagggccaaccgccgagagcgcctctgggccaagtgaggacccttctgtgaacttccttaagaatgtaggggagagcgtcgcagctgccctgtcacctctcgggatcgaggtggacattgacgttgaacatggggggaaacgatctcggctgacaccagtgagcccagaatcgtcctctaccgaggaaaaaagctccagccagccatcttcttgttgttcagacccaagcaagcccggtgggaacgtggagggggccacccaaagtctcgccgagcagatgagaaagatcgccctggaaagcgaaggaagaccagaagagcagatggagtccgataactgttcgggcggcgacgatgattggacacacctgtcaagtaaggaagtggacccctccacaggcgaactccaatccctgcagatgccggaaagtgagggcccaagctcattggacccaagtcaggagggaccaactgggctgaaagaggcggccctatatccacatctcccccctgaagcagaccctaggctgatcgagtccctctctcagatgctgagcatgggtttcagtgacgagggtggctggctgacgcggctccttcaaaccaagaattacgatataggtgccgctctggacactattcagtactccaagcaccccccccccctatag

SEQ ID NO: 204602 - DNA, 1323 bp, synthetic construct
  misc_feature 1..1323: note = Description of Artificial Sequence: Synthetic coding sequence
  source 1..1323: mol_type = other DNA
atggccagcctgaccgtgaaggcctacctgctgggcaaggaggacgccgcaagggagataaggcggttctcattctgctgtagcccggagcccgaggccgaggctgaggctgctgccggaccagggccttgcgagcggctgctatccagagtggccgccctctttcccgcattgaggcctggcggatttcaggcccattatcgagatgaagatggcgacttagtcgctttctcctccgacgaagaactcactatggccatgagttacgttaaggacgatatttttcggatctatattaaagagaaaaaggaatgtcgcagggatcatcgacctccctgcgctcaggaagccccccggaacatggtgcaccccaatgttatatgcgacgggtgcaatggccctgtcgtcggcacaagatataaatgctcggtgtgccctgattacgatctctgtagcgtctgtgagggcaaaggtctgcaccgcggacatactaagctggcgttcccttctccgttcggacatctgagcgaagggttctcccactctcgatggcttagaaaggtaaagcacggccattttggctggccgggttgggaaatgggccctccaggcaattggagcccccgtcccccacgagccggagaagcacgccctggcccaactgcagaatcggcaagcggcccctccgaggacccctcagtgaacttcctcaagaatgtgggagaaagcgtggcagctgctctgtcccctctggggatcgaagtggatatcgacgttgagcatggaggcaaacgctcacgcctaacacctgtctcgcctgagagcagctctactgaagaaaaatcctccagccaaccatcttcctgttgcagcgacccgtcgaaacctggcgggaatgtagaaggtgcaacgcagagcctggccgagcaaatgaggaagattgcattagaaagtgagggacggcctgaggagcagatggagtccgataattgtagcgggggtgatgacgattggacacacctatcctctaaggaagtcgacccctccacaggggagctgcagtctttgcagatgccagagagcgaggggccgagttcactcgacccctcccaagaagggcccacagggttgaaagaggctgccctgtatccacacttaccccctgaggccgatcctagactgattgaaagtctcagtcagatgctgagtatgggttttagcgacgaagggggatggttgacccgcctgctgcagactaaaaactacgatataggggctgccttggacacaatccaatactccaaacaccccccacccctgtag

SEQ ID NO: 204603 - DNA, 1071 bp, synthetic construct
  misc_feature 1..1071: note = Description of Artificial Sequence: Synthetic coding sequence
  source 1..1071: mol_type = other DNA
atggccatgagctacgtgaaggacgacatcttccggatctacatcaaagaaaaaaaagaatgcaggcgagaccatcgcccaccctgcgcgcaggaagctccgcgcaacatggtacatcccaatgtcatctgtgatggatgtaacggcccagtggtaggcactcgctataagtgtagcgtgtgtcccgattacgatctgtgcagcgtgtgcgaaggtaagggtctgcaccgggggcataccaaactggctttcccatctccatttgggcatctcagcgaggggttttcacattctcgctggctgcggaaggtgaagcacggccacttcggctggcccggttgggaaatgggcccccccggaaactggagtcctcgccctcctagggcaggggaagctagaccgggcccgactgctgaatccgcaagcgggccaagcgaagacccatccgtcaatttccttaagaatgttggcgagagcgtggccgccgcactgagcccattgggaattgaagtggacatcgatgtggagcacggaggtaagagatcacggttgacccccgtgtcccccgagtcctcttcaacggaagaaaaaagcagttctcagccatcctcctgctgctcagacccttccaagcccggcggaaacgtcgaaggcgcaacacagagtctggctgagcagatgcgaaagatcgctttggagtcagaaggcagacccgaagagcagatggagtccgataattgcagtggcggagacgacgactggacccacctgtcaagcaaagaagttgatccgtccacaggcgagctgcagtctctccaaatgcccgagtccgagggcccaagctcattagacccctcccaggaaggtcctactggtctgaaggaggccgccttgtacccacatttgccacccgaagcagaccctagactaatcgagagcctaagtcaaatgttgagtatgggattttctgatgaagggggttggctcactaggctactgcaaacaaaaaactacgatattggtgcagctctcgacacaatccagtactctaaacacccaccccccctgtag

SEQ ID NO: 204604 - DNA, 423 bp, synthetic construct
  misc_feature 1..423: note = Description of Artificial Sequence: Synthetic coding sequence
  source 1..423: mol_type = other DNA
atggccatgagctacgtgaaggacgacatcttccggatctacatcaaagaaaagaaagaatgtcggcgggaccaccgccccccctgtgcacaggaagctccccgtaacatggtgcatcccaatgtgatctgcgatggatgcaacgggcctgtggtggggacaagatacaaatgtagcgtatgtcccgactacgacctgtgcagcgtatgtgaaggtaagggcctgcatcgcggccacacaaagctcgcatttccatcgccattcggccacttgtccgaagggttttctcacagcaggtggctcagaaaggtcaaacatggccacttcgggtggcccggttgggagatgggcccccccggcaattggagccctaggccacctagggctggagaggcacggcctggacctacagctgagagttag

SEQ ID NO: 204605 - DNA, 891 bp, synthetic construct
  misc_feature 1..891: note = Description of Artificial Sequence: Synthetic coding sequence
  source 1..891: mol_type = other DNA
atgaccagcagcgagagcaccctgaagcggaagaagagcgccggcggaaccactgctcaccgagtgctgcgacgaagaccgttcggacaccttagcgagggtttttctcactctcgctggctgaggaaggtgaaacacggccatttcggatggccagggtgggagatgggtccacccggaaactggtcccccaggccaccacgcgctggagaggcccggcccggtcccacagcagagtcggcctctggaccgtcggaggacccttccgtaaatttcctcaaaaatgttggcgaaagcgtcgctgccgcactctcccctctggggatcgaagtggatatcgatgttgaacacgggggaaagcggtcccggcttacacccgtgtccccggaatcttcaagtactgaggaaaagagcagcagccagcctagtagctgctgcagcgatccgtccaaacccggaggcaatgttgagggcgccacacaatccctagccgaacaaatgcggaaaatagccctcgaaagcgaaggccgccctgaagaacagatggagtccgataactgctctggaggagacgacgactggacacacctttctagcaaggaggttgatccctcaacaggagagctgcagtctcttcagatgccggagtccgaaggacctagctctctggatccaagccaggagggacctaccgggctcaaggaagccgcactatatccccacctgcctccagaggcagatcctcgcttgatagaaagtctgagccagatgctgtccatgggcttcagcgacgaaggcgggtggctcacacgcctgctgcaaacaaagaattatgacatcggagctgccctggacaccattcaatactctaagcatcctccccccctttag

SEQ ID NO: 204606 - DNA, 504 bp, synthetic construct
  misc_feature 1..504: note = Description of Artificial Sequence: Synthetic coding sequence
  source 1..504: mol_type = other DNA
atggccatgagctacgtgaaggacgacatcttccggatctacatcaaagagaagaaggagtgtcgacgagaccaccgccctccctgcgctcaggaggcaccacggaatatggtgcatcctaatgtcatatgtgacggttgtaacggacccgtcgtagggactaggtacaagtgctctgtgtgccctgattacgatttgtgctccgtgtgcgaagggaaggggcttcatcgaggacataccaaactggcttttccaagtcctttcgggcatctatctgaggggttttcgcacagtagatggctcaggaaggtgaagcatggtcatttcggctggccagggtgggagatggggccacctggcaattggtcccccagaccccctagagccggcgaggccaggcccggccccaccgctgaatccgcgtcaggtccttcagaggatccttccgttaacttcttgaagaacgtgggagagtccgtcgctgccgccctatcaccactgtag

SEQ ID NO: 204607 - DNA, 477 bp, synthetic construct
  misc_feature 1..477: note = Description of Artificial Sequence: Synthetic coding sequence
  source 1..477: mol_type = other DNA
atgatgcagaagctgctgaagtgcagccggctggtgctggccctggccctgatcctggtgttggagagttcggtgcagggttacccgacccggcgcgcacgctatcaatgggtgagatgtaatccggacagcaattctgccaactgcctggaggagaagggccctatgttcgagctactccctggcgagagcaataagatccctagactgcggaccgaccttttcccaaagacccgaattcaggacctcaatcggatctttcccctctccgaggactactcaggtagtggcttcggatccggatccggttctggctctggctccggatctggctttctcactgagatggagcaggattaccagctggtcgacgaatctgacgcgtttcatgacaacctgcgctccttggataggaacctacccagtgacagtcaagatctcgggcagcacggcttagaggaagacttcatgctgtag

SEQ ID NO: 204608 - DNA, 987 bp, synthetic construct
  misc_feature 1..987: note = Description of Artificial Sequence: Synthetic coding sequence
  source 1..987: mol_type = other DNA
atgatgagcggcgagcccctgcacgtgaagacccccatccgggactcaatggctctgtctaagatggcaggcaccagcgtgtaccttaaaatggatagcgcccagccatcaggctcatttaagattaggggcatcggtcatttttgcaagcggtgggccaaacagggatgtgcgcacttcgtgtgctcgtccgcagggaacgccggaatggcggctgcatacgctgcccggcagctgggcgtacctgcaactattgtggtgccatcgaccactcccgcactaaccatcgagaggctgaagaatgagggcgctacggtgaaggtggtcggcgagctgctggatgaagcttttgagctggccaaggcccttgccaaaaacaatcctggctgggtgtatattcctccctttgacgacccactgatatgggaaggacatgcctctatcgtgaaggaacttaaggagacgttgtgggagaagcccggcgcaatcgcactgtccgtgggaggtggcggactgctgtgcggcgtggtgcaaggtctgcaggaagtgggatggggtgacgttccagttatcgccatggaaacctttggcgctcactcattccatgctgcaaccaccgctggaaagctggtgagcctgcccaaaataacatcggtggcaaaggccttgggagtcaaaacggtgggggctcaggctctcaaactatttcaggagcacccaatattcagtgaggtgatttcggatcaggaagcagtcgccgccatcgaaaaattcgtggatgacgaaaagattcttgttgagcccgcgtgtggagcggcactggctgccgtgtatagtcacgttatccagaagctgcagctagaaggtaaccttaggacccccttaccctcattggtggttatagtctgtggtggcagcaatatctcccttgctcaactgcgggcgttgaaagaacaattaggcatgaccaataggttgcctaagtag

SEQ ID NO: 204609 - DNA, 657 bp, synthetic construct
  misc_feature 1..657: note = Description of Artificial Sequence: Synthetic coding sequence
  source 1..657: mol_type = other DNA
atgatgagcggcgagcccctgcacgtgaagacccccatccgggactcgatggctttaagcaagatggccggtacctcagtgtatctgaaaatggactctgcgcagccgagtggcagcttcaagatcagagggataggacacttctgcaaacgatgggcaaagcagggttgtgcacactttgtttgttccagtgccgggaacgcgggtatggccgctgcatatgcagccagacagctgggcgtccccgctacaatagtggttccctcgacgaccccagccttaacaatcgagcgtctcaaaaacgaaggggcaaccgtcaaggtggtgggggagcttctggacgaagcttttgagctggccaaggctttggcgaaaaacaatcccggctgggtctatataccaccgtttgatgacccactgatctgggagggccatgccagcatagtcaaagagcttaaggagacactttgggaaaagcctggagctattgctctgagtgtgggcggcggcgggctcctttgtggcgtcgtgcagggactgcaggaggtcggatggggggacgtccctgttattgccatggaaacctttggcgctcacagtttccatgcagccactacggccggcaagctggtgtccctcccaaaaatcacaaggtag

SEQ ID NO: 204610 - DNA, 1452 bp, synthetic construct
  misc_feature 1..1452: note = Description of Artificial Sequence: Synthetic coding sequence
  source 1..1452: mol_type = other DNA
atgaccatgcccgtgaacggcgcccacaaggacgccgacctgtggtccagccacgacaagatgcttgctcaacccctgaaggactctgacgttgaagtttataacataataaaaaaggagtctaaccggcagcgggtgggattagaactcatagcttcggagaactttgcctcccgggctgtgctcgaagcccttggcagctgcctgaataataaatattctgagggctatcccggacagagatactatggaggcacagaattcatagacgagctggagaccctttgccagaagcgggcacttcaggcctacaaattagacccccagtgctggggagtgaatgtccagccatattccggcagcccagccaatttcgccgtctacactgcccttgtggagccccatggccgaatcatgggcctggatctacctgatggaggacacttgacccacggtttcatgacggacaaaaagaagataagtgcaaccagcatattcttcgagagcatgccctataaagtgaaccctgacactgggtatattaattatgaccagctcgaagagaacgcacggctgttccacccaaagttaataatcgctgggaccagctgttactcacgcaaccttgaatacgcgcggctgcggaagattgccgacgaaaacggcgcctatcttatggcagacatggctcacatttccgggctcgtggccgccggggtcgtgccgagccctttcgagcattgtcatgtggttacaaccacgactcacaaaaccctccgcggctgcagagctggaatgatcttttatagaaaaggggtgaaaagtgtagacccgaagactgggaaagaaattctttacaatctagaaagcctcattaacagtgcagtgtttcctggcctgcagggtggacctcataatcacgccatagccggagtggctgtggctctaaagcaggctatgaccctggagtttaaggtataccagcatcaggttgtggcaaattgccgggcattgagcgaggccctaacagaactcggatataagatcgtgaccggggggagcgataatcacttgatcttggttgacctcagaagtaagggcacggatggcgggcgcgccgaaaaagtgctggaagcgtgttcaattgcctgtaacaaaaacacttgcccaggagatagatccgctcttcgacctagcgggttacgccttggcacgcccgccctgacgagccgagggctgttagagaaggattttcagaaagttgcccattttatccaccggggtatagagttgactcttcaaatccagtctgacacaggagttagggccaccctcaaagaatttaaggagaggctggccggagacaagtaccaagcagccgttcaggcacttagagaagaagtggagtcgttcgcttccctcttcccactccccggtctgcccgacttttag

SEQ ID NO: 204611 - DNA, 378 bp, synthetic construct
  misc_feature 1..378: note = Description of Artificial Sequence: Synthetic coding sequence
  source 1..378: mol_type = other DNA
atgcggtacctgctgcaggtggcccagctggtgtggctgaccgtggatagccggggaattggagggaccctggatcacgctgggtttagtatctgtattttcaccgtgcctcctttgtccttcttcgggctgtgtgaagctcagacattcggactttccgggtccaaatctccagcccttcatcgctattatggaggcacagagttcattgacgagcttgagaccctgtgccaaaagcgtgccctgcaagcttacaaactggacccacagtgctggggagtcaatgtgccaacacaggtgttagtatcatctatatggcccggcgctgcgtcatcctgcgcatcacctagagctgatatgcatcaggaagagtcctag

SEQ ID NO: 204612 - DNA, 1212 bp, synthetic construct
  misc_feature 1..1212: note = Description of Artificial Sequence: Synthetic coding sequence
  source 1..1212: mol_type = other DNA
atgaccatgcccgtgaacggcgcccacaaggacgccgacctgtggtcaagccacgataaaatgctggcacagccactgaaggacagtgatgtggaagtctacaacataatcaaaaaggaaagcaaccggcagcgagtggggttagagctaattgcaagtgagaatttcgccagcagggccgtgctggaagcattgggaagctgtttgaataataagtactctgagggctatcccgggcagcggtattacggaggaacagaattcatcgatgaactggaaaccttatgccagaagcgcgccctccaggcgtataagctggatccccagtgctggggcgtcaatgtgcaaccatattcaggtagtcccgccaatttcgcagtctatacggctctggtggagcctcatgggcgcatcatggggctcgacctgccggacggtggccatctgacacatgggtttatgaccgataagaagaagatctccgccacgagcatcttttttgaatccatgccgtataaagtgaatcctgacaccggttacatcaactacgaccagctagaggagaatgctaggctttttcatccaaagcttattattgcaggcacctcatgctactctcggaatcttgaatatgctcgactaagaaagatcgctgatgagaacggcgcctatctgatggcggatatggcccatatctccggtctggtggccgctggcgttgtcccaagcccctttgagcactgccacgtcgttacaaccacaacgcacaagacgttgagaggctgcagagctggcatgattttttatcgtaagggaggatcagataatcatctcattctggtggacctgagatctaagggaactgacggtgggcgtgccgaaaaagtcttagaagcatgcagtatcgcatgtaataagaatacgtgcccaggcgacagaagcgctttaagaccttccggacttaggctgggcacacctgctttaacttctagagggctgttggagaaagactttcaaaaagtggcccacttcatccaccgcggtatcgagttaactctgcagatccagtccgacactggggtacgggctactctcaaggagttcaaggaaaggctggccggggacaaataccaagctgccgtacaagctctacgcgaagaagtcgaaagtttcgcatcccttttcccgctcccgggcctgcccgatttttag

SEQ ID NO: 204613 - DNA, 1335 bp, synthetic construct
  misc_feature 1..1335: note = Description of Artificial Sequence: Synthetic coding sequence
  source 1..1335: mol_type = other DNA
atgaccatgcccgtgaacggcgcccacaaggacgccgacctgtggtcctcacatgataaaatgctggcccaacccctcaaagactctgatgttgaggtgtataacatcatcaagaaggagtctaaccggcagcgagtgggtttggagctgatcgccagtgaaaacttcgcgtcccgcgctgtacttgaggcacttggttcatgcctcaacaacaaatacagcgagggctaccccgggcagcgctactatggcggtacagaattcattgacgagctggaaactctatgccaaaagcgagccctgcaggcctacaagctggacccacaatgttggggcgtcaacgtgcagccctactcaggtagtcccgctaattttgctgtgtatacagcactcgtggagccccatggaagaattatgggtctagacctgccggacggtgggcatttgactcacggcttcatgactgacaaaaagaagatctctgcaaccagcatttttttcgagtcaatgccttataaagtcaacccggacaccggctatatcaattatgatcagctcgaagaaaacgctagattattccatcccaaactgataatagcaggaacaagttgctacagcaggaacttagagtacgcaagactacggaaaattgccgatgagaatggagcttatctgatggctgacatggcccatatctccggtctcgtcgccgctggtgtggttccttcgccatttgagcactgccacgttgtgaccactaccacccataagacccttcgcgggtgccgggctgggatgatcttttaccgcaaaggagtggccgtcgcactaaagcaggctatgactcttgaatttaaggtataccagcatcaggtggtcgcaaactgtagggcattgagcgaggcacttactgaactagggtataagattgtaacagggggctccgacaatcaccttattcttgtagacttgagaagcaaaggaacagatggaggacgagcagagaaggtccttgaggcctgttcaatcgcatgtaacaaaaatacctgccccggagacaggtccgcactgcgcccttcaggcttgaggctaggcacccctgctctcacctcccgtggcctcttggaaaaggacttccagaaggttgcccactttattcaccgtggtattgagctcactctgcagatccaatccgacaccggcgtgcgggccactctcaaggagttcaaagaacgcctggctggcgataaatatcaagccgccgtgcaagctctgagagaggaagtggagagcttcgcgagcctcttccccttacccggcttgccagacttctag

SEQ ID NO: 204614 - DNA, 285 bp, synthetic construct
  misc_feature 1..285: note = Description of Artificial Sequence: Synthetic coding sequence
  source 1..285: mol_type = other DNA
atgaccatgcccgtgaacggcgcccacaaggacgccgacctgtggtcatcccatgacaagatgttggcgcagcctctgaaggactcggatgtggaagtatacaatatcatcaagaaagaatctaaccggcagcgcgtcggactggaactcatcgccagcgaaaacttcgcgtcaagggctgtcctcgaagcgctcggctcttgcctgaacaataaatacagcgagggttacccggggcagagatatgtcaacatcttcaaaggtttagttctaacacagtcatag

SEQ ID NO: 204615 - DNA, 777 bp, synthetic construct
  misc_feature 1..777: note = Description of Artificial Sequence: Synthetic coding sequence
  source 1..777: mol_type = other DNA
atggccgacatggcccacatcagcggcctggtggccgccggcgtggtacctagccctttcgaacactgtcacgttgtgacaaccacaacacataagactctccgggggtgccgggccggcatgattttctatcgaaaaggagtgaaatccgtagaccctaaaacaggaaaggaaattctttataatctcgagtcccttattaatagcgcagtgtttcccggtctgcaagggggtccgcacaatcatgcgatcgctggggttgccgttgctctgaaacaggccatgacactggagttcaaagtgtatcaacatcaggtggtcgccaactgccgggcacttagcgaggccctgaccgaattgggatataaaatagtgacaggtgggagcgacaaccacctcatcctggtggacctgaggtccaagggtacggatggtgggagggccgaaaaagtcctggaggcttgtagtattgcatgcaataagaatacctgccccggggaccgctctgccctgcggccaagcggcctgcggctgggaacccctgctttgacttccagggggctgcttgagaaggatttccaaaaagtggcccacttcatccaccgagggatcgaattgaccctacaaatccagagtgatactggggtgagagcaactcttaaggagtttaaggagcgattggcgggagataagtaccaggccgccgttcaagccctaagagaagaagtggaatcctttgcttcactgttccctttacctggcttgcccgatttctag

SEQ ID NO: 204616 - DNA, 1341 bp, synthetic construct
  misc_feature 1..1341: note = Description of Artificial Sequence: Synthetic coding sequence
  source 1..1341: mol_type = other DNA
atgaccatgcccgtgaacggcgcccacaaggacgccgacctgtggtcatctcacgacaagatgctggcccagccactaaaggattcagacgtagaggtttataacatcatcaagaaggaaagcaataggcagagagtaggcttggaactgattgcctctgaaaatttcgcttctcgtgctgtgctggaagcgcttggatcatgtctgaataataagtattccgaagggtaccccggacagcgctactacgggggcactgagttcattgacgaactggagactctctgtcagaagagagcactccaggcatacaaactggaccctcaatgttggggcgtcaatgtgcaaccctattccggctcccctgcaaattttgccgtatataccgccctcgtggagcctcatgggcgcataatgggactggatctccctgacggcggccacctgactcacggatttatgacagataaaaaaaaaattagcgccactagtattttcttcgagtctatgccttacaaggttaacccagataccgggtacatcaattatgaccagttagaggaaaatgcccggctgtttcaccctaaactgattatcgcaggcaccagttgttattccagaaatctcgagtacgcccgtctgaggaaaattgctgacgagaacggggcttacctgatggccgatatggcccatatatccggtttggttgctgctggggttgttccatctccttttgagcattgtcatgtagtcaccacaactactcacaagacactgaggggatgccgtgcaggcatgattttctaccgaaagggcgtcaagagtgtggaccctaagaccggcaaggaaatcctctataacctggagagtcttattaacagcgctgtttttccgggtttgcagggaggtcctcacaaccatgccatcgccggggtagctgtggccctgaaacaggctatgaccctggaattcaaggtgtatcagcaccaagttgtagctaactgtcgggccttgagtgaggctcttacagaactgggatacaagattgtgaccggaggttccgataaccatctaattctcgtggatctccggagtaaaggcaccgacggtggacgggccgagaaggtactggaagcatgttccattgcctgcaacaagaacacttgtcctgggatagagctgacactccagattcagtccgacacaggtgtcagagcaactcttaaggaattcaaagaaagactggccggggataaatatcaggcagccgtgcaggcacttagagaagaagtcgagtctttcgctagcttgttcccgctgcctggactacctgatttctag

SEQ ID NO: 204617 - DNA, 1038 bp, synthetic construct
  misc_feature 1..1038: note = Description of Artificial Sequence: Synthetic coding sequence
  source 1..1038: mol_type = other DNA
atgggcctggacctgcccgacggcggccacctgacccacggcttcatgaccgacaaaaaaaaaatctctgccaccagcatcttcttcgaaagcatgccttataaggttaatcccgatactgggtatatcaattacgaccagctggaggagaacgccagactgttccatcccaaactgatcattgctggtacaagttgttactcgagaaacttagaatacgcaaggctgcgaaagatagcggacgagaacggagcatatctgatggcagatatggctcacattagtgggctggttgccgccggagtagtcccatcacctttcgaacactgccacgtcgtgacaactactacccacaagactcttagaggctgccgcgccgggatgatcttctatcgcaagggagttaagtccgtggacccgaagaccggtaaggagattctctacaacctggaaagcctgattaactcagccgtatttcctggcctccaaggcggcccacacaatcacgctattgccggcgtcgccgttgctctgaaacaggctatgaccctggagtttaaggtgtatcaacaccaggtggtggcaaattgtagagcgttatccgaggcgttgacggagctgggctataagatcgtgacggggggaagcgacaaccaccttatcctggtggatctaaggtcaaaaggaacagatggggggagggccgagaaagttcttgaggcatgttctattgcgtgcaacaaaaatacctgtccaggggaccgatccgctctccgtccctctggcctgcgcctgggcactcctgccctgaccagcagaggattgcttgagaaggattttcagaaagtcgctcactttatccacagaggaattgagctcactctacaaatccaaagcgatactggcgtccgcgctacacttaaggagttcaaagagagactggctggcgataagtaccaagccgcagtccaggctctgagagaggaagttgaatcttttgctagcctgtttccactgccagggctgcccgacttctag

SEQ ID NO: 204618 - DNA, 1515 bp, synthetic construct
  misc_feature 1..1515: note = Description of Artificial Sequence: Synthetic coding sequence
  source 1..1515: mol_type = other DNA
atgctgtacttcagcctgttctgggccgcccggcccctgcagcggtgcgggcaactggtcagaatggcaattagagcacaacactcgaacgcagcacagacccagaccggagaggcaaacaggggctggacaggccaggagtcactttcagatagtgatccagaaatgtgggagctgctgcagagggaaaaagatcggcaatgccggggactcgagctgatcgctagcgagaacttttgctcaagagccgcactagaggcgctgggctcatgtctgaataacaagtacagtgaaggctaccccggcaagagatattacggaggagccgaggtcgttgacgaaattgagctcctatgtcagagacgtgcgctggaggccttcgatctcgaccctgcccagtggggggttaacgtacaaccctattccggatccccagcaaatctcgctgtgtacaccgcgctgctgcagccgcacgaccggatcatgggactggatctgccagatgggggccacctgacccatgggtacatgtctgacgtgaaacgaatcagcgccaccagtattttcttcgagtccatgccttacaagttgaatccaaagactggactcatagattataaccagctggcgttaacagctcgcctcttcaggccacgccttatcatagcggggactagtgcgtacgccaggctcatcgactatgcacgcatgcgcgaggtgtgtgacgaagttaaagcacatctgctggcggacatggctcacataagcggtttggttgcagctaaggtcattcctagtcccttcaaacacgctgatatcgtgactacaaccactcacaaaaccttaaggggcgccagatcaggcctcattttctaccgcaagggagtgaaggccgtggatcctaagaccggcagggaaattccatacacattcgaggacagaatcaacttcgccgtttttccttccctgcagggtggaccccataaccacgcaatagccgcagtcgctgttgcattgaaacaggcttgcactcccatgttccgagaatattccctgcaagtgctgaaaaacgccagagccatggctgatgccctactggaacgaggttactctctggtcagtggaggtaccgataatcacctggtgctagtggatcttagaccaaaggggctggacggcgcccgtgcagaaagggtacttgaactggtatccatcaccgcaaataagaacacgtgcccaggcgacagaagcgccatcacacctggaggtttgaggctgggggccccagccctgacctcgcgtcagttcagagaggatgattttcgccgggtggtcgattttattgacgaaggtgtgaacatcgggctcgaggtgaagtccaagactgctaagctgcaggacttcaagagtttcttactgaaggatagcgagactagccaacgactcgccaatttacgacagcgggttgaacagttcgcacgtgctttcccgatgcccggctttgatgaacactag

SEQ ID NO: 204619 - DNA, 1227 bp, synthetic construct
  misc_feature 1..1227: note = Description of Artificial Sequence: Synthetic coding sequence
  source 1..1227: mol_type = other DNA
atgggcgagcagcggtggtggatgaagctgagctgctgcgccagcgccggcccttggaaaccattgacatggattctccattctggtgaatctatgtcaagcccaactcctggaccccagccgacttggccatctacccagccattttgcaaccttaccaccggatcatgggggtggacatgccctatgggagccatctcaccaaccgctacctgcctgacttcaagcggctaccagccgcgcccctcttcatccagcctgtgcccaatatcttctacagcgctggctgtgtgtgtgtcagtgcagcctaaaacgggcttgattgactacaaccagctggcgctgacagccaggttatttcggcctagactgattatcgcagggacatctgcgtatgcccggctgattgactacgctagaatgagagaagtctgcgacgaggtcaaagcccacctgttggccgatatggcgcacatatccggtctggtcgctgcaaaagtcattcctagccccttcaagcatgcagacattgtgacaaccactacacataagaccctgcggggtgcccgatctggattgatcttctatcgaaaaggcgttaaagcggtcgaccctaaaaccggcagggagattccttatacatttgaggacaggatcaatttcgccgtattcccatccttacagggcggccctcacaaccacgccatcgccgcagttgcggtcgccctgaaacaggcttgcacacccatgtttcgtgaatattccctacaggtactgaaaaacgctcgagcaatggctgatgccctccttgagaggggatatagtctggtatcaggaggtactgataaccacctggtgctcgttgatctgagaccgaaaggcctggacggcgccagggcagagagagttctggagttggtgagcataacagctaataagaatacatgccctggggacaggtctgccatcacacctggtggcttaagacttggtgcaccggccctgacgagcagacagtttagggaggacgacttcaggcgagtggtggacttcatcgacgagggggtaaacatcggactggaggtgaaatctaaaaccgcaaaactgcaagacttcaagtcttttcttttaaaggattctgaaacatcccagcggctcgcaaatcttaggcagagagttgagcaattcgcacgcgcgtttccaatgcctggttttgacgagcactag

SEQ ID NO: 204620 - DNA, 1452 bp, synthetic construct
  misc_feature 1..1452: note = Description of Artificial Sequence: Synthetic coding sequence
  source 1..1452: mol_type = other DNA
atggccatccgggcccagcacagcaacgccgcccagacccagaccggagaggccaatcgcggttggacgggacaagaatccctgtctgactccgatccagaaatgtgggaattacttcaaagggaaaaggaccggcagtgccggggattggagctcattgcatctgagaatttttgctcaagggctgctctagaggctttaggttcttgcttaaacaataaatattctgagggctatcccggtaagcgctattatggcggggcagaagtcgtcgacgagattgagctcctgtgtcaacgtagagccttagaggctttcgatctggacccagctcaatggggagtcaatgttcaaccctattctgggtcacccgccaatctggctgtgtacaccgccttgttacagccacatgatcggatcatgggactcgatctgccggatggcggacacctgacgcatggctatatgtccgatgtgaaacgcatatccgctacgagcattttttttgagagtatgccatacaagctcaatccaaagactgggctcatagactataatcagctggcgctgactgcacgactttttaggccccggctgattattgctgggacttccgcatacgcacggctgattgattacgcacgcatgcgcgaggtctgcgatgaggtcaaggcgcatctgcttgctgacatggctcacatctcgggcctggtggctgctaaagtgatcccctcccccttcaagcatgccgacatagtgaccacaaccactcataaaacgcttaggggggcacgtagcggactgatcttctatagaaagggcgtgaaagccgtggacccaaaaactggcagagagattccatacacattcgaggatagaataaactttgcggtgtttccttctcttcagggggggcctcataatcacgccatcgccgccgttgctgttgcgctcaaacaagcctgcacaccaatgtttagagagtactcactgcaggtactcaagaacgccagagccatggcagatgccctgttggaaaggggatactcactggtgagtggaggtacagacaatcacctggtgttggttgacctcaggcccaaaggactcgatggcgcgagggctgaacgagtactagaattggtctccatcaccgccaataagaatacttgccccggtgaccgctcagccattacgccaggcggtctccggctcggcgcgccagcactgaccagtcgtcagtttagggaggatgacttcaggcgcgtcgtcgatttcattgacgagggggtgaatatagggttagaggttaagagcaaaactgctaagcttcaggatttcaaaagtttcctgctcaaggatagcgagacgtcacagcgtctcgccaaccttcggcagagagtcgaacaattcgcgcgcgcgtttcccatgcctggtttcgacgaacattag

SEQ ID NO: 204621 - DNA, 1452 bp, synthetic construct
  misc_feature 1..1452: note = Description of Artificial Sequence: Synthetic coding sequence
  source 1..1452: mol_type = other DNA
atggccatccgggcccagcacagcaacgccgcccagacccagaccggggaggccaatcgtgggtggaccggacaggagagcctcagcgattctgatcccgagatgtgggaactgttgcagagagaaaaggatcggcagtgtagagggttggagctgattgccagcgaaaacttttgttcgcgggccgccctggaagcgctgggatcatgtctcaacaataagtacagcgagggctacccaggcaaaagatattacggcggtgcggaggtagtggatgagatcgagctcctgtgtcaacgccgagctctcgaagcatttgatctggatccagcgcaatggggagtgaacgtgcaaccatacagtggatctccagctaatcttgcggtgtacacagctcttctccagccacatgatcgcataatggggcttgatctgcccgacgggggacacctgacacatgggtatatgagcgacgtaaagcgaatcagcgcgacaagcatctttttcgagtcaatgccatataagcttaaccccaaaacgggactgatcgactataatcagctggctctaacagcgaggctcttccgaccccgacttattatagcgggtacatcagcctacgcacgtctgatcgactacgcgcggatgagggaggtgtgcgacgaagtcaaggcgcacctgctggcagacatggcacatatatccgggctagtggctgctaaagtgatccccagtccctttaaacacgctgatatcgtgaccactacaacgcacaagaccctgcgcggagccagatcagggcttatattctacagaaagggggtgaaagcagttgatcctaaaaccggacgcgaaataccttatacattcgaggatagaatcaactttgctgtatttcccagtctgcaaggaggcccccataaccatgctattgccgcagtggcagttgctctcaagcaggcctgcactcctatgttcagagagtacagtttgcaggtcctgaagaacgcgagagctatggcggacgccctgctggagcgcggctacagcctggtttctgggggcacggacaatcatctcgtcctggtggacctgagaccgaagggcctggatggggcccgggcagaacgagtcctggaacttgtctccataacagccaacaaaaacacctgcccgggtgatagaagtgccattactcccggcggcctccgactgggtgcgcctgccctgactagcaggcagtttcgagaggatgattttagaagagtcgttgacttcattgatgagggtgtcaatatagggctggaggtcaaaagtaaaaccgctaaactccaggattttaaaagcttccttctgaaagactccgaaacgtcacaaagattagctaacctccgccagcgggtggaacagtttgcacgggctttcccgatgcctggctttgatgagcactag

SEQ ID NO: 204622 - DNA, 1452 bp, synthetic construct
  misc_feature 1..1452: note = Description of Artificial Sequence: Synthetic coding sequence
  source 1..1452: mol_type = other DNA
atggccatccgggcccagcacagcaacgccgcccagacccagaccggcgaggccaatcggggatggactgggcaggagtctttaagcgatagcgatcccgagatgtgggaattactgcaaagagaaaaagatcgtcagtgccgcggccttgagctgatcgcctctgagaatttttgtagccgggccgctctggaggccctgggtagttgcctgaacaataaatatagcgaggggtaccccgggaaacggtactacggcggggcggaggtagtcgacgagatcgaactactgtgtcagcgccgcgccctggaagcttttgatttggatcccgctcaatggggcgtgaacgtgcagccttacagcgggtcccctgcaaacttggccgtctacacggctctgctccagcctcacgacagaatcatggggctcgatctcccagatgggggccacctcacacacggttatatgagcgatgtgaaaaggattagtgctacctccatcttcttcgagtcaatgccatacaaactcaacccaaagacaggacttattgattataaccagctggccctgaccgcacgcctatttagacctagactaattatagccggtacatctgcatacgccaggttgattgactatgccaggatgcgagaagtctgcgacgaagtaaaagcacacctgctcgctgacatggctcacatatctggtcttgtagcggcgaaggtgatcccaagccccttcaagcacgccgacatcgtgaccacgacaacccacaaaacgctgcggggcgcccgaagtggattgatattctaccggaagggcgttaaagcagttgatcccaagaccggtcgggagataccctacacttttgaagaccggattaatttcgccgtgttccccagcctgcaggggggaccccacaatcacgccattgctgcggtcgctgtagcgcttaagcaagcctgtactcctatgtttagagaatacagcttgcaggtcctgaagaacgcgagagccatggctgatgctttgctggaacgaggttacagcctcgtctcaggcggaactgataatcatctagtgttggttgatttgcgcccaaaaggcctggacggtgccagagccgaacgggtactcgaacttgtctctatcacggccaataaaaacacgtgtcctggcgaccgcagcgctattactccaggcggacttcgactgggcgctcccgcccttacgtctcgccagtttcgcgaagacgacttccgcagggtggtggatttcatagacgagggggtcaacattggcctcgaggtgaagtccaagactgcaaagcttcaggattttaaatccttcctcctcaaggacagtgaaacgagccagcggctggcaaacctgaggcagcgggtggagcagtttgcaagagcttttcccatgcccggctttgatgagcactag

SEQ ID NO: 204623 - DNA, 1485 bp, synthetic construct
  misc_feature 1..1485: note = Description of Artificial Sequence: Synthetic coding sequence
  source 1..1485: mol_type = other DNA
atgctgtacttcagcctgttctgggccgcccggcccctgcagcggtgcggccagctcgtgcgcatggccatccgtgcccagcattctaacgccgcacagactcagaccggtgaggcaaaccgaggctggaccgggcaggagagcctgtccgattctgatccggaaatgtgggagcttcttcaaagggagaaagacagacagtgccgagggctggagctcattgcatcagagaacttctgctcgcgggcggccctggaagctctcggatcatgcttgaataacaagtactccgaggggtacccagggaaaagatactatggaggcgctgaggtggtcgacgagatcgagctcctgtgccagcggagagctctggaagcattcgatttagacccggcacagtggggcgttaacgtgcagccttactccggaagtcctgccaacctggccgtgtatacggccctgctgcagcctcacgacagaattatgggtctggatctccccgacggcggccatctgacacacggctatatgtctgatgtaaagcggatctctgcaaccagtatattttttgaatcaatgccctataagttgaaccttgcattgactgcccgcctgtttaggcctcggttgattattgccggaacctccgcctacgctagacttattgattatgcccgcatgcgagaggtgtgcgacgaggtaaaagcacatctgctggctgacatggcgcatattagtggcctggtggctgcaaaggtgattccgtcccctttcaagcatgcagacattgtgacgaccactacccacaaaacactgcgaggcgctcggtccggactgattttctatcgtaagggcgtcaaggccgtggaccccaagaccggacgcgagattccctatactttcgaggacaggatcaatttcgccgtgttcccctcgctgcaagggggaccccacaaccatgccattgccgcagtggccgtggctttgaaacaagcatgtaccccaatgttccgtgaatactccctgcaggtgcttaagaatgcgagagcaatggctgacgccctgctcgaacggggctattcactggtttcaggggggacagacaaccatttggttctagtggatctccggccaaaggggctggacggtgcccgtgccgagcgggttctcgaattagtgtctatcactgcgaataaaaatacttgtccaggggaccgctccgctatcacacctggcgggctcaggttaggagctcctgccctgacgtcaagacagttcagggaagatgacttccgcagggtggtggacttcatcgatgagggtgtcaatatcggactggaagtgaagtcaaagacagctaagttgcaggacttcaagtcttttcttctgaaagatagcgagacttcacagagattagctaatctcaggcagagagtggagcaatttgcaagagcattccctatgccagggtttgacgaacactag

SEQ ID NO: 204624 - DNA, 1422 bp, synthetic construct
  misc_feature 1..1422: note = Description of Artificial Sequence: Synthetic coding sequence
  source 1..1422: mol_type = other DNA
atgggcgccgtgctgggcgtgttcagcctggccagctgggtgccctgcctgtgctcaggagcctcgtgtcttctctgctcttgttgtccaaactcaaaaaattccacagtcacaaggttgatttacgctttcatccttcttctgagtacagtggtgtcctacatcatgcaacggaaggagatggaaacataccttaagaagattcccggattctgtgagggcggatttaagatccatgaggccgatatcaacgccgacaaggattgtgacgtgctcgtcggctacaaagcggtctatagaatcagcttcgccatggccatttttttttttgtcttcagcctgctcatgttcaaagtcaaaacaagcaaggatctgcgcgccgccgtgcataatgggttctggtttttcaaaattgcagccctcatcggaatcatggtcggttccttttatatcccaggaggctattttagttctgtctggtttgtcgttggtatgatcggggcagctctgtttattctgatccagctagtgctgttagtggactttgctcatagctggaatgaatcatgggttaaccgtatggaagaaggaaacccccgcttatggtacgcagcactgctcagtttcacatctgccttctacattctgagtatcatttgtgtggggctactatacacctattacacaaagcctgacggttgtacggaaaataaattctttatttcaattaacctcatcttatgcgtggtcgcatctataattagtatccacccgaaaatccaggagcatcagccccgctccggcttattacagtcttctctaatcaccctgtacacaatgtatctaacatggtcggccatgagcaacgaacccgaccgcagttgcaatccaaatctaatgtcttttataacccgcataaccgccccaacccttgccccagggaatagcactgcagtagtgcctacccccacacccccctcaaaatctggctcactcctcgacagtgataattttatcggtctgttcgtgtttgtcttgtgcctgctgtacagttccattaggacctccacaaactctcaggtggacaagctcactctgagcggatccgattctgtgatattgggtgacaccaccacctcgggcgcatccgatgaagaagatggacaaccaaggagggcagtggataatgagaaggagggggttcagtactcctacagcctctttcatcttatgctctgcctagcctcactctacatcatgatgacgttgacctcctggtacagtcccgacgccaaattccagtcaatgacctctaaatggccagctgtctgggtgaagatatccagctcctgggtgtgccttcttctgtacgtatggaccttggtggcgcctttggtgctgacctctcgagacttttcatag

SEQ ID NO: 204625 - DNA, 1422 bp, synthetic construct
  misc_feature 1..1422: note = Description of Artificial Sequence: Synthetic coding sequence
  source 1..1422: mol_type = other DNA
atgggcgccgtgctgggcgtgttcagcctggccagctgggtgccctgcctctgctccggagcatcctgtctcctctgttcctgttgcccgaacagtaaaaatagcacagtgacgcgactcatctatgcgttcattttgctcttgagtacagtggtgagctatattatgcagcggaaggaaatggaaacctacctgaagaaaatcccagggttttgtgagggcgggttcaaaatccacgaagcagatatcaatgccgataaggactgtgacgtcctcgtaggttacaaagcagtgtaccgaatatctttcgctatggccatttttttttttgtgtttagcttgctcatgtttaaggtgaaaacatccaaggacctccgcgctgctgtgcacaacggtttttggtttttcaagatcgctgctcttatcggaatcatggttggatcattctacatccccggtggatattttagttctgtttggtttgtcgttgggatgataggggcagctctgttcatcctcattcagcttgtgcttctcgtcgattttgcacatagctggaacgaaagctgggtgaatcgcatggaagagggcaacccccggctatggtacgccgcactgctgtcattcactagcgccttttatattctgtccataatatgcgtggggctgctttatacatactataccaagcctgatggctgcactgagaacaagttcttcatttcaatcaacctcatcctgtgtgtggtcgcttccataatctccatccaccccaaaatccaggaacatcaaccgagatccgggttgctgcagtcaagtctgatcactctctacacaatgtatctgacatggagcgccatgtcgaacgaacccgaccgctcttgcaaccccaacttaatgtcatttatcacccgcatcacagctcctaccctagcgcccggcaattcaactgccgttgttcccactcccacacccccaagcaaatccggatcgctgctggatagcgataatttcattgggctttttgtgttcgtcctctgtctgctgtattcctctattcgaacctcaacaaatagccaggtagataagctcacgctgtcggggagcgactccgtaatactgggggacacaactacatccggcgctagcgacgaggaggatggacagccacgccgagccgtcgacaacgagaaggaaggggtccagtattcatactcattatttcacctgatgttgtgtttggcctccctatatataatgatgacattgacaagctggtacagccccgatgctaagttccagagcatgactagcaagtggccagccgtgtgggtcaagatttcttcctcatgggtatgcctgctcctgtatgtgtggaccctcgtggcgcccttggtgttgaccagcagagacttttcttag

SEQ ID NO: 204626 - DNA, 639 bp, synthetic construct
  misc_feature 1..639: note = Description of Artificial Sequence: Synthetic coding sequence
  source 1..639: mol_type = other DNA
gagcaccagccccggagcggcctgctgcagagcagcctgatcaccctctataccatgtatcttacatggagtgctatgtcgaacgaacctgaccggtcttgtaacccgaacctgatgagctttataacacggatcaccgctcctactttagcaccaggcaacagtactgcagtagtgcctacccctacccccccaagtaaatcaggcagcctcctggatagtgataatttcatcgggctgtttgtatttgtcctatgtctgttgtatagtagcatccggacctccaccaattcccaggtagacaagctcacccttagcggatccgactccgtgatcctgggtgatacgacgacctccggagccagcgacgaggaggatggccagccacggcgtgcagtggataacgaaaaggaaggggtccaatatagctattccctcttccacctgatgttgtgtctggcttccctttacataatgatgaccctgacctcatggtattcacccgacgcaaagttccagtctatgacctccaaatggcccgcagtatgggtgaagatcagctcttcttgggtctgcctgctgctgtatgtgtggacactagtcgctcctctggtattgacttcgcgtgactttagctag

SEQ ID NO: 204627 - DNA, 1323 bp, synthetic construct
  misc_feature 1..1323: note = Description of Artificial Sequence: Synthetic coding sequence
  source 1..1323: mol_type = other DNA
atgcccctgcagcggtgcctgatctacgccttcatcctgctgctgtctaccgtcgtgtcctatataatgcagcgaaaggaaatggagacataccttaagaaaatacctggtttctgtgagggcggatttaaaattcacgaagctgacatcaacgcagacaaggactgcgatgtgctggttggttacaaagccgtgtaccgtatctctttcgcaatggccatcttcttttttgtctttagcctgcttatgtttaaagtgaagacttccaaagacctccgggctgcggtccataacggtttttggttttttaagatagccgcactgattggaataatggtgggctccttctatatccccggcgggtatttcagtagtgtgtggtttgtcgtgggtatgattggcgccgcattattcattttaattcagctggttctgcttgtggattttgcccatagctggaatgagtcatgggtgaatcggatggaagagggaaaccctcgcctctggtacgcggcgcttttatcatttacttccgccttctacatcctgtctataatctgcgtgggcttgctatacacctactataccaaacccgacggatgtactgagaataagtttttcatcagcatcaaccttattctgtgtgtcgttgcttccataatctccattcaccctaagatccaggagcaccagcctcggagcgggctcctgcagagtagcctcattaccctctataccatgtatttgacttggtccgctatgtctaacgaaccagatcgaagttgcaacccaaatctcatgagtttcataactcgcatcactgctcccactctcgcccccggcaactcaaccgctgtagtcccaactccaacccctccatcaaagtcagggagtttgcttgactccgacaatttcatcggcctgtttgtgttcgtgctctgtctgttgtactcctccatcaggacgtccaccaactcccaagtggataaactaactttatcgggtagcgactcagtaattttgggagacactactacatccggcgcgtcagacgaggaagacgggcagccacgcagagctgtcgacaacgagaaggagggagtgcagtattcttacagcttgttccacctaatgctatgtctggcttcactgtacattatgatgactctgacctcgtggtacagccccgatgccaagttccagagtatgacctcaaagtggccagcggtgtgggtcaagatttcatcctcctgggtctgtctgttattgtacgtttggaccctggtggcccctctggtgctcaccagccgcgacttctcctag

SEQ ID NO: 204628 - DNA, 1257 bp, synthetic construct
  misc_feature 1..1257: note = Description of Artificial Sequence: Synthetic coding sequence
  source 1..1257: mol_type = other DNA
atgcagcggaaggagatggagacctacctgaagaagatccccggcttctgtgagggcggctttaaaatccacgaagcagatatcaacgccgacaaggactgcgacgtcctggttgggtacaaagccgtctacagaatatccttcgcaatggctatattctttttcgtgttctcattgctcatgttcaaggtgaagacctcaaaggatcttagagccgcggtgcataacggattctggttctttaaaatcgctgcccttattggcatcatggtgggtagcttttacataccgggcggatattttagcagcgtgtggttcgtcgttggaatgattggcgctgctttatttattctcattcagctggtgttactggtcgacttcgcccactcatggaacgagagttgggttaaccgtatggaggagggtaatcccaggctgtggtacgccgccctcctgtcatttacttcggcattttatatcctatcaataatttgtgtgggcctgctctatacttattatactaaacccgatggctgtaccgaaaacaagttttttatctcgataaatctcatcctgtgtgtcgtggccagcattatatcaattcatcccaaaatacaggagcatcagccccggtctgggctgctccagtcatcactaatcacactgtatacaatgtacctgacgtggtccgccatgtccaacgagccggatcgatcatgcaatcccaacttaatgtcattcattactcgtatcacagcaccaacactggctccgggcaattctactgccgtagttcccaccccaacccctccctctaagagtggttccctcctggactccgataacttcattggactgttcgtgttcgtactctgtcttctgtactcttcaattcggacgtctacaaattcccaggttgacaaactgacactgtcagggtccgattcagtgattctgggtgacactacaaccagcggagcaagcgacgaagaggatgggcagcctcggcgagccgtggataatgaaaaagaaggagttcaatatagttactctttatttcacctgatgctgtgcctcgccagcctgtatattatgatgacattaaccagctggtattccccagatgcgaaattccagtccatgactagtaagtggcccgcggtttgggtgaagattagtagttcctgggtgtgcctactgctctatgtctggaccctggtcgcaccactggtcctgacaagtcgagacttctcatag

SEQ ID NO: 204629 - DNA, 1422 bp, synthetic construct
  misc_feature 1..1422: note = Description of Artificial Sequence: Synthetic coding sequence
  source 1..1422: mol_type = other DNA
atggccaccgccaccgagcagtgggtgctggtggagatggtgcaggcactgtacgaggcccctgcataccacctgattctggaaggaattctcattttgtggattatccggctcctttttagtaagacctacaaactgcaggaaaggtctgacctgaccgtcaaggaaaaagaggagctgatcgaggagtggcagcccgagcctctggtaccccctgtgcccaaagatcacccggcacttaattacaatattgtctctggccctccctcgcataaaaccgtggttaacgggaaggagtgcattaacttcgcatccttcaactttctaggccttctggataatcccagagtgaaagcagcggctctcgcgtccctcaaaaagtacggcgtgggaacctgcggccctagaggattttatgggacatttgatgttcacctggatctggaagaccggctggccaagtttatgaaaacggaagaggccattatctattcctacggattcgccaccatcgccagcgctatcccagcctattcaaagaggggagacattgtgttcgtggaccgggcagcatgcttcgcaattcagaagggactccaagccagcagatccgacatcaagctgtttaagcataacgatatggccgacctggaaagactcctaaaagaacaggaaatagaggaccagaagaatccgcgtaaggcgcgggtcactcgtcggttcattgtcgtggaaggattgtacatgaatactgggacgatctgtccgctcccagagctagtgaagctcaagtataagtacaaggcccggatcttcctggaggagtccctttcgtttggcgttcttggcgaacacggtagaggggtgacagaacattacggcataaatatcgacgatattgatctcatcagcgctaatatggagaacgctttggcttccatcggagggttctgttgtgggcgaagttttgtcatcgaccatcagagactgtctggccagggttactgcttctctgcaagtctgcctcctctacttgcagctgcagctatagaggccctgaatattatggaagaaaatcccgggattttcgcagtgcttaaagagaagtgtgggcagatccataaggcacttcagggcattagtggacttaaggtggtgggggagagcctgagcccagcctttcaccttcagctggaggagtctaccggcagtcgggagcaagatgttagacttttgcaagagatagttgaccagtgcatgaatcgttctattgctcttacccaggccaggtacttagagaaggaagaaaaatgcctgccgcccccatcaataagagtggtggtgacggtcgagcaaactgaggaagaactcgaaagggcggccagcacaatcaaagaggtggcccaggcagtgctcttgtag

SEQ ID NO: 204630 - DNA, 432 bp, synthetic construct
  misc_feature 1..432: note = Description of Artificial Sequence: Synthetic coding sequence
  source 1..432: mol_type = other DNA
atggccaccgccaccgagcagtgggtgctggtggagatggtgcaggcgctgtatgaggcaccggcctaccatcttatcttagaagggattctgatcctctggattatccggctgctcttcagtaaaacgtacaagctgcaagaacgatcagaccttactgtcaaggagaaagaggaacttatagaggagtggcagccagagcctttagtccctccagtccctaaggaccaccccgcacttaattataatatcgtgagtggccctccatcccataaaaccgtagtcaatggaaaggagtgcatcaatttcgcctcattcaacttcctgggattgctggataatcctcgggtcaaagcagccgctctggcgagtttgaaaaaatacggagtggggacatgcggacctcggggcttttacggaacctttgagtag

SEQ ID NO: 204631 - DNA, 1017 bp, synthetic construct
  misc_feature 1..1017: note = Description of Artificial Sequence: Synthetic coding sequence
  source 1..1017: mol_type = other DNA
atggccaagtggggcgagggcgacccccggtggatcgtggaggagagagctgatgcaactaacgtgaacaactggcactggacagaacgcgacgcatcaaattggtctaccgacaaactgaaaacactcttcctggccgtgcaggtgcagaacgaggagggaaagtgtgaggtgacagaagtctccaagctagacggcgaggcttctattaacaatcggaaagggaagctgatttttttctatgagtggtccgtgaagcttaactggaccgggacatcaaagtccggcgtacaatacaagggccatgtggagatacctaacctgagtgacgaaaattcagtcgacgaggtggagatctcagtcagtcttgcaaaggacgagcccgatacgaatctcgttgctcttatgaaagaagagggtgttaaattactccgggaggcaatgggcatttacatctccaccctcaagacagagtttactcagggcatgattttaccaacgatgaatggagagagtgtcgacccagttgggcagccagcactgaagactgaagaaagaaaggctaagccagccccgtcaaagacacaagccaggcccgttggcgtaaaaatacctacatgcaaaataactctgaaagagacgttcctgacctcaccagaggagctgtacagggtgttcacaacgcaggagcttgtgcaagcgtttacgcatgctccagcaacactggaggccgaccggggaggtaagttccacatggtcgacggtaatgtgtccggagagttcacagaccttgtgcctgagaagcatatcgtgatgaaatggcggtttaagtcatggccagaagggcacttcgccacgattacattgactttcatcgataagaacggggaaaccgagctatgcatggagggtcgcgggattccagccccagaagaggagcgaaccagacagggatggcagcggtactatttcgagggaatcaagcagacctttgggtacggagcaagactcttttag

SEQ ID NO: 204632 - DNA, 990 bp, synthetic construct
  misc_feature 1..990: note = Description of Artificial Sequence: Synthetic coding sequence
  source 1..990: mol_type = other DNA
atggccaaccccggcggcggcgccgtgtgcaacggcaagctgcacaaccacaagaaacagagtaacgggtcccagtcacgaaactgcactaagaatggcatcgtgaaggaggcacagcagaacggtaagccccatttttatgacaaacttatcgtagagagtttcgaagaagcacctctgcatgttatggtgttcacgtatatggggtacggaattgggacgttgtttgggtaccttcgcgattttctgcggaattggggcattgagaaatgtaatgctgctgtggaaaggaaggaacagaaggacttcgtgcccctttatcaggacttcgaaaacttctacacgaggaatttatacatgaggatccgagacaattggaacaggccgatttgttccgccccggggcccctgtttgacctgatggagcgggtctccgatgattacaattggacatttagattcactgggagggttataaaggatgtaattaatatggggtcgtacaactttttgggactggctgccaaatacgacgagagcatgagaactattaaagatgtgttagaggtctacggaacaggggtggccagcactaggcacgagatgggtacactggacaagcacaaagagctggaggatttagtggctaagttccttaacgttgaagccgctatggtcttcggtatgggatttgcgacaaactcaatgaacatcccagcgctggttggcaagggatgtctcattttatccgatgagctgaatcacacctccctcgtgctgggcgccagactgagcggggccaccatacggatattcaaacacaataacacccagtccctcgagaagctccttcgggacgctgtcatctacgggcagccgcgcacacgtcgcgcttggaagaaaatcctgatcctggtggagggcgtgtaccgaacctcttggataatttatggcttcacacgcatcgtgctctttatgcttcacccctag

SEQ ID NO: 204633 - DNA, 1659 bp, synthetic construct
  misc_feature 1..1659: note = Description of Artificial Sequence: Synthetic coding sequence
  source 1..1659: mol_type = other DNA
atggccaaccccggcggcggcgccgtgtgcaacggcaagctgcacaatcataaaaagcagtctaatggcagccagagccgcaattgcaccaagaacggtattgtcaaagaggcccagcagaatgggaaaccccacttctatgacaagctgatagtggagagcttcgaagaagcccccttgcatgtgatggtgttcacctacatgggttatggcataggtacactgtttggttatctgagagactttttaagaaattggggtattgagaagtgcaatgccgcggtggaacgcaaggagcaaaaagacttcgttcccctgtaccaggattttgagaatttctacacaaggaacctctatatgcggatccgcgacaactggaatagaccgatatgtagcgccccagggccactctttgatttgatggagagagtgagtgacgattataattggacttttcgcttcaccgggagagttataaaggatgtgatcaacatgggatcctacaattttttgggtctggcagcaaagtatgacgaatctatgcgaacgatcaaagacgttcttgaagtgtatggaacaggggtggcctctacccgccacgagatgggcaccctggataagcacaaagagttggaggacctagttgctaagtttctcaacgtagaagctgccatggtattcggaatgggctttgccaccaattccatgaatatcccagcccttgtgggtaagggatgcttaatactgtcagacgagctaaaccatacatccctggtgctaggcgccaggttatccggggcgacgatccgcatttttaagcacaataacacccagagtctagagaagctgctccgtgacgccgttatctatggccagcctaggacccgcagggcttggaagaagatcctcatactggtggaaggggtttacagtatggagggttccattgtgcaccttccgcagatcattgcattgaaaaaaaaatacaaagcatacctgtatatcgacgaagcgcacagtattggcgctgtgggtcccaccggcaggggagtaactgagtttttcggactcgatccacacgaagtggacgttcttatgggcactttcaccaagagtttcggagcttctggtgggtacatagccggtcgaaaagacttagtggattacctccgggtccattcacactcagccgtgtatgcctcctctatgagccctcctatcgcagagcaaatcattcgctccctcaaattgattatgggcctcgacggcactactcagggcttgcagcgggtccagcagctcgcaaagaatactagatattttcgacagagactgcaggagatgggattcataatctacggtaatgagaatgcatcagtcgtgccactcctgttgtacatgccaggcaaggtagcagcgttcgcccggcacatgctggaaaagaaaatcggggtcgtggtggtgggctttcccgccactcctctggccgaagcacgcgcccgcttctgcgtgtcggcagcccacactcgtgagatgctggacaccgttctggaagcactggacgagatgggtgacctgctgcagttaaaatacagtcggcacaagaaaagcgcacgcccggagttatacgacgagacctccttcgaacttgaagattag

SEQ ID NO: 204634 - DNA, 366 bp, synthetic construct
  misc_feature 1..366: note = Description of Artificial Sequence: Synthetic coding sequence
  source 1..366: mol_type = other DNA
tgaagcccccccatcgccgagcagatcatccggagcctgaagctgatcatgggactggatggaactacccagggtttgcagcgggtgcagcagttggcaaaaaatacgcggtatttccgccagcggctgcaagaaatgggattcatcatctatggaaatgaaaacgcatccgttgtgccattgctgctctatatgcctgggaaagtcgctgcctttgcccgccacatgctggagaaaaaaattggggtcgtagtggtgggttttcctgccacccctctggctgaagccagggctcggttttgtgtgtccgccgcccatacacgtgagatgttggatacagttatatgctgtgtcatgaagatctag

SEQ ID NO: 204635 - DNA, 420 bp, synthetic construct
  misc_feature 1..420: note = Description of Artificial Sequence: Synthetic coding sequence
  source 1..420: mol_type = other DNA
atggccaaccccggcggcggcgccgtgtgcaacggcaagctgcacaaccataagaaacagtcaaatggctcgcagtctaggaactgcaccaagaacggaatcgtcaaagaggcccagcaaaacggtaagccgcacttttacgataaactgatcgtggaaagctttgaagaggcacccctgcatgttatggtgtttacgtacatgggctacgggatagggacgctgtttggatacctgagagactttctgcgtaactggggtatcgagaagtgtaatgccgctgtagaacggaaagagcagaaagatttcgtgccactttaccaggattttgaaaacttctacaccaggaacctatacatgcggatacgcgacaactggaaccgtcccatctgttccgcccctggacccttgttcgattag

SEQ ID NO: 204636 - DNA, 648 bp, synthetic construct
  misc_feature 1..648: note = Description of Artificial Sequence: Synthetic coding sequence
  source 1..648: mol_type = other DNA
aactgcaccaagaacggcatcgtgaaggaggcccagcagaacggcaaacctcatttttacgataaattaatagtagaatccttcgaagaagctccacttcacgtaatggtgttcacatacatgggatacggaattgggaccctgttcggatacctgagggattttctgaggaactggggaatagaaaaatgtaacgccgcggtggaaaggaaagagcagaaagatttcgtgccgttgtatcaggatttcgagaacttttacacccgtaatttgtacatgagaatccgggacaattggaatcgacccatctgctcagcccccggccccctttttgatctgatggagagagtttccgatgactataattggacttttagatttacaggaagagtcatcaaagacgtgattaatatgggatcctacaacttcctgggactagccgccaagtacgatgaatcaatgagaaccataaaagatgtgctcgaggtctatggcacaggtgttgcgtcaacacggcatgagatgggggagttcaccagttcgtggcagaacgcactgtgtgttggaggcgtattgcaagctgactctgtcccccaggggcctccctggtcctggaagatgggccgtcatagttcactcctggagtag

SEQ ID NO: 204637 - DNA, 360 bp, synthetic construct
  misc_feature 1..360: note = Description of Artificial Sequence: Synthetic coding sequence
  source 1..360: mol_type = other DNA
atggccctgagcgtgctgcggctggccctgctgctgctggccgtgaccttcgccggatccgcccggagcggtccaggggaacggggaccacctgagaaatcaggcttcggcagccaaactggtggggggccctgcccggccccaggcggcttgggtgacgccagcttaattccccagttcggcctgttttccaaatacaggactcctaattgcagccagtatcgattgcctggctgtccaaggcacttcaacccggtatgcgggtctgacatgagtacgtacgcaaatgaatgtacactctgcatgaagatccgggagggcggccacaatataaaaattatccgcaatggtccgtgctag

SEQ ID NO: 204638 - DNA, 405 bp, synthetic construct
  misc_feature 1..405: note = Description of Artificial Sequence: Synthetic coding sequence
  source 1..405: mol_type = other DNA
atggccctgagcgtgctgcggctggccctgctgctgctggccgtgacttttgctggctcggcacgctctggccctggtgagcgcgggcccccagagaaatccggttttggcagtcagacgggcggtgggccctgccctgcgcctggaggcctgggagacggaacacgagctcctgtgacaggagggagccccgaagatttgccagcttcactgatcccccagtttggtctgttctccaaatacagaacacccaattgttcacaataccgcctgcccgggtgcccaagacatttcaatccagtgtgtggttctgacatgagcacctacgccaatgagtgcaccttatgcatgaaaattagagagggaggtcataacatcaagatcattagaaatggtccctgttag

SEQ ID NO: 204639 - DNA, 240 bp, synthetic construct
  misc_feature 1..240: note = Description of Artificial Sequence: Synthetic coding sequence
  source 1..240: mol_type = other DNA
atgaaggtgaccggcatcttcctgctgagcgccctggccctgctgtctctcagtggtaataccggggctgattctctgggcagagaggccaaatgttacaacgagctcaacgggtgcacgaaaatctatgatcccgtttgcgggaccgatgggaatacttaccctaacgagtgcgtgttatgtttcgagaaccgaaagcggcaaacaagtattctgatccaaaaatccggcccgtgttag

SEQ ID NO: 204640 - DNA, 255 bp, synthetic construct
  misc_feature 1..255: note = Description of Artificial Sequence: Synthetic coding sequence
  source 1..255: mol_type = other DNA
atggccctgagcgtgctgcggctggccctgctgctgctggccgtgacttttgctgcgagtctgatcccacagttcggtctattctcaaagtacaggacacctaattgcagtcagtataggctgcccgggtgcccccgtcactttaatcctgtctgtgggtccgatatgagcacatatgccaacgaatgcaccctgtgcatgaaaatccgagaagggggtcacaacattaaaattatcaggaacgggccatgctag

SEQ ID NO: 204641 - DNA, 261 bp, synthetic construct
  misc_feature 1..261: note = Description of Artificial Sequence: Synthetic coding sequence
  source 1..261: mol_type = other DNA
atggccgtgcggcagtgggtgatcgccctggccctggccgccctgcttgtcgttgatcgggaggtgcctgtcgcagccggtaaactaccctttagtaggatgccgatctgtgagcacatggttgagagcccaacctgctcccagatgtcgaacctggtatgtggcacagatggcctgacctacaccaatgagtgccagctctgcctggctcggattaaaaccaaacaagacatccagatcatgaaggacggcaagtgctag

SEQ ID NO: 204642 - DNA, 330 bp, synthetic construct
  misc_feature 1..330: note = Description of Artificial Sequence: Synthetic coding sequence
  source 1..330: mol_type = other DNA
atgatcctgggcatcggcagcagcccccacctgctgtggaccctggagggcacccatatttggagtctgctgggcgatgcatctcacaccgacaggctacctgaggcgggcgctggaaaattactgagcgaggtgcctgtcgctgccggcaagttgcctttctctcggatgcctatctgcgagcacatggtcgaaagccccacctgcagccagatgagtaatctggtgtgcggtaccgatggtctgacctacaccaacgagtgccagctgtgtctagccagaataaaaaccaagcaagatattcagattatgaaggatggcaagtgttag

SEQ ID NO: 204643 - DNA, 330 bp, synthetic construct
  misc_feature 1..330: note = Description of Artificial Sequence: Synthetic coding sequence
  source 1..330: mol_type = other DNA
atgatcctgggcatcggcagcagcccccacctgctgtggaccctggaagggacccacatctggagccttcttggtgacgcctctcacactgacagattaccagaagctggtgctggcaaactcctgtccgaggtcccagtggctgccggcaagttgccattttcaagaatgcctatttgtgagcacatggttgagtctcctacatgttcacagatgtcaaacttggtgtgcggtaccgacggcctgacctataccaatgaatgtcagctatgcctagcccgcatcaagaccaagcaggacatccagatcatgaaggatgggaagtgttag

SEQ ID NO: 204644 - DNA, 3195 bp, synthetic construct
  misc_feature 1..3195: note = Description of Artificial Sequence: Synthetic coding sequence
  source 1..3195: mol_type = other DNA
atgaagatcgccaccgtgagcgtgctgctgcccctggccctgtgccttatacaagacgccgcctctaagaatgaagatcaggagatgtgtcatgaattccaggccttcatgaaaaacggaaagctgttctgcccccaagacaagaaatttttccaatcactggatggcattatgttcattaataagtgtgccacctgcaagatgatcctcgagaaggaagctaaaagtcaaaaacgtgcccggcaccttgcacgcgcaccaaaggcaaccgctcctacagagctgaattgtgacgatttcaaaaagggcgagagagatggggactttatctgtccagactattatgaggcagtctgtggtactgatggaaagacttacgacaatcgttgcgctctatgcgccgaaaacgctaagacaggaagtcagattggcgtgaaatcagagggggagtgtaaatcgtccaacccagagcaagatgtgtgtagcgccttccgccctttcgtccgcgacgggagattgggttgcaccagggagaacgacccggttctcggacccgatggtaagacacatggcaataagtgcgccatgtgtgccgaactatttcttaaggaagccgaaaatgctaagcgagagggggaaactcggattaggcgcaatgctgaaaaggatttttgtaaggagtacgagaagcaggtgcgaaacggcaggttattttgcacgagagagtcagacccagtcaggggtcctgatgggagaatgcacgggaacaaatgcgccctttgcgccgaaatttttaagcagcggttttcagaagagaactctaaaacggaccagaatttggggaaagctgaagagaaaaccaaagtgaaaagagagattgtgaaattgtgttctcagtaccagaaccaggccaagaacggcatcctgttctgcactcgggagaacgaccccatcagaggccccgacgggaagatgcatggaaatctctgcagtatgtgccaggcttacttccaggcggaaaatgaagagaaaaagaaggccgaagccagagctagaaataagcgggaaagcggaaaagccacgtcttatgccgagctttgtagtgagtatcggaagttggtgcggaacggcaaattggcctgcactagggaaaacgatccaatccagggtccggatggaaaggtccacggtaacacctgcagcatgtgcgaagtcttctttcaggcagaagaagaagagaagaagaagaaggagggcaagagcagaaataagcgccaaagcaaaagcaccgcctcttttgaggaactttgttcagagtataggaagtctcgcaaaaacggccgtctgttctgtaccagggagaatgaccctattcagggccctgatggcaaaatgcatggaaacacctgctctatgtgcgaagctttctttcagcaggaagagcgggccagggcaaaagcaaaaagggaagccgcaaaggagatctgcagtgaatttagagatcaagttcggaacggaaccttgatttgcacccgggagcacaatcccgtgaggggaccagatggcaaaatgcacgggaataagtgtgcaatgtgcgccagtgtgtttaaactagaggaagaggagaagaagaacgataaagaggagaagggaaaggtggaggctgagaaggttaagcgggaagcagtgcaggagctgtgctccgaataccggcactacgtccgaaatggtcgcttaccatgtacccgggagaacgaccccatcgagggtctggacgggaagatccatggaaacacttgttccatgtgtgaggcctttttccaacaggaggcaaaggaaaaagagagagccgaaccaagagccaaagtaaagcgggaagccgagaaggaaacatgtgatgagtttaggaggcttcttcagaacggcaagctcttttgcacccgggaaaatgatcctgtgcgaggccccgacggcaagacccatggcaacaagtgcgctatgtgcaaagccgtttttcaaaaggaaaacgaagaaagaaaacggaaggaggaggaagaccaaagaaatgccgcgggacacgggtcatctggtgggggtggaggtaatacccaggacgagtgcgccgagtaccgggagcagatgaaaaatgggaggttgtcctgcacaagggaatccgacccggtacgagacgcagacggaaagagctacaacaaccagtgtactatgtgtaaagcaaaactggagcgcgaggcagagcgcaagaatgagtattccagaagcaggtccaatggcacaggctccgaaagtggcaaagatacatgcgacgagtttcggtctcaaatgaagaacggcaagctgatatgtacacgggagtccgaccccgtccgagggccagacggcaagacacatggaaacaagtgtacgatgtgcaaagaaaaactcgaaagggaggcggctgagaaaaagaagaaagaagacgaggatagaagcaacacaggggagcggtccaacaccggggaacggtccaacgataaggaagacctctgtagggagtttaggagcatgcaaagaaatggcaagttgatctgtactcgggagaataatccagtaagagggccatacgggaagatgcatattaataagtgtgcaatgtgtcagtctatcttcgaccgtgaggcaaatgaacggaaaaaaaaagacgaggaaaagtcgtcctccaaacccagtaacaatgctaaagacgagtgttctgagtttcgcaattatattcgtaataacgaactcatctgcccgagggagaacgacccggtgcacggagccgacggcaagttttacactaataaatgttatatgtgcagagccgttttcctgactgaggcacttgagcgggctaagttacaggagaaaccgagtcacgtccgagcctcacaggaggaggattcgcctgactctttcagttccctggacagtgagatgtgcaaagattatcgcgtgcttccaagaattgggtacctctgccctaaagacctaaagccggtgtgtggggatgacggccagacctacaataacccatgtatgttgtgccatgagaatttgattaggcaaaccaacacccacatcaggagcactggcaagtgcgaagagtcttccacaccaggtacaacagccgcttccatgccaccttcggacgaatag

SEQ ID NO: 204645 - DNA, 3285 bp, synthetic construct
  misc_feature 1..3285: note = Description of Artificial Sequence: Synthetic coding sequence
  source 1..3285: mol_type = other DNA
atgaagatcgccaccgtgagcgtgctgctgcccctggccctgtgcctaattcaggacgccgcttcaaagaacgaagaccaggaaatgtgtcacgagtttcaagcattcatgaaaaatggaaagctgttctgtccccaggacaaaaaattctttcaatccctggacgggattatgttcatcaacaagtgtgcaacatgcaaaatgatactggagaaagaagctaagtcgcaaaagcgagccagacacttagcacgagccccgaaagcaacagcaccaacggaactgaattgtgatgatttcaaaaagggggagcgcgatggggatttcatttgtcctgactactatgaggcagtgtgcggaaccgacggcaagacttacgataatagatgcgcgctctgcgccgagaacgcaaagactgggagccagattggcgtaaagtcagaaggggagtgcaaaagttccaatccagaacaagacgtttgcagtgccttccgaccattcgtgcgcgatggtcgactgggttgcaccagggagaatgacccagtcctgggcccggacgggaaaacgcatgggaataagtgtgccatgtgtgccgagttgttcctgaaggaagcggagaatgccaagcgcgagggtgaaacacgtatccggcgcaatgccgaaaaggatttttgcaaagaatacgagaaacaggtccgtaatggccgactgttttgtacaagagagtctgatcccgttagggggcctgacggccgcatgcacgggaacaagtgcgcactgtgcgctgaaatctttaaacaaagattttcagaggagaattcgaagacagatcagaacctgggtaaagctgaggaaaagacgaaggtgaagcgcgaaatcgtcaaactttgtagccaataccagaaccaggccaagaatgggatcttattttgtacgagagaaaacgacccaataaggggccccgatggtaagatgcacgggaatctctgctccatgtgtcaggcttatttccaggcggaaaatgaggaaaaaaagaaggcagaggcccgcgcacgtaacaagcgcgaatcagggaaagccacgagttatgccgagctgtgctcagagtatcggaaactggtgagaaacggcaagttggcctgcacaagggagaacgaccccatccagggacctgatggcaaggtccatggaaatacatgtagtatgtgcgaggtgttcttccaggccgaagaggaagagaagaaaaagaaagaaggaaagagcaggaataaaagacaaagtaagagtacagctagcttcgaggaactttgctctgaatatcgtaaatcacgcaagaacggacgactgttttgcacccgggagaatgaccccattcagggccccgacgggaaaatgcatggcaacacctgttctatgtgcgaggcctttttccagcaagaggaacgggcccgcgctaaggcaaaacgggaagccgcaaaagaaatatgtagcgaattccgggaccaggttcggaacggtaccctgatctgcactagagagcataatcctgtcagggggcccgatggcaagatgcatggaaataaatgcgccatgtgcgcctctgtgtttaaactggaggaggaggagaaaaaaaatgacaaagaagaaaaggggaaggttgaagccgaaaaggttaaaagagaggccgtccaggagctgtgcagcgagtacagacattatgtgagaaacgggcggctcccttgcacgcgagagaacgatccaatcgaaggcctcgatggaaagatccatggcaatacctgttcgatgtgcgaggccttcttccaacaggaggccaaggagaaggaaagagccgagccgagagctaaggttaaaagggaggcagaaaaagagacttgcgacgaattcagacgccttctacagaacggtaagctgttttgcacacgagagaacgacccagtgcgaggaccagatggtaagacccacggaaataagtgcgctatgtgtaaagcggtgttccaaaaggaaaacgaagagcggaagaggaaggaagaagaggatcagcgaaacgcagcgggccacggtagtagcgggggaggggggggaaacacacaagatgaatgtgcggagtaccgcgaacagatgaagaacgggcggctctcatgtacgcgagaatctgacccagttcgagacgccgacgggaagagctacaacaatcaatgtactatgtgtaaggccaaacttgagagagaagccgaacgcaagaacgagtactctaggtccaggagcaatgggactgggtctgaaagcggtaaggacacttgtgacgagtttagatctcagatgaagaacggcaaactgatttgtactcgagagtccgacccagtacgcggccctgatggtaagacacacggtaataaatgcaccatgtgtaaagagaaattggaacgagaagccgcagaaaaaaagaagaaagaagacgaagacagaagtaacactggtgagcggtccaacaccggcgagaggagcaatgacaaggaagacctgtgtcgcgagtttcgcagtatgcaaaggaacggcaagctcatctgtacacgcgagaacaatcctgtgagggggccatacggtaaaatgcatattaacaaatgcgctatgtgccaatcaatttttgaccgagaggccaacgagcgtaaaaaaaaggatgaagagaagtcgagctctaagcccagtaacaatgccaaggatcagtgccgacaggtgcagaatgaggcggaagacgcaaagttcaggcaacctggaaggtctcttgcctctgttgctaggatgagcacagatgaatgttccgaatttcggaactacatccgcaataatgagctgatctgtccccgagaaaatgaccctgtacacggtgcagatgggaagttctacactaataagtgttatatgtgccgggcagtctttcttacagaagccttagaacgggctaaactacaggaaaagccatcccatgtgcgggcttcacaggaagaagatagtcccgattcattctctagcctggactcagagatgtgcaaagactacagagtgttgccaaggatcggctacttgtgcccgaaggaccttaaacccgtgtgcggagacgacggccaaacatataataacccgtgcatgctctgccacgagaacctcattcgtcagactaatactcatattcgatcaacggggaagtgtgaggagtcgtccacccctggcactacagctgcatccatgccaccttccgacgagtag

SEQ ID NO: 204646 - DNA, 2751 bp, synthetic construct
  misc_feature 1..2751: note = Description of Artificial Sequence: Synthetic coding sequence
  source 1..2751: mol_type = other DNA
atgaagatcgccaccgtgagcgtgctgctgcccctggccctgtgcctgatccaggatgcggctagcaaaaacgaagaccaggagatgtgccacgaattccaagcctttatgaagaacgggaaattgttttgtccacaggataaaaaattctttcaatccctcgacggcattatgtttatcaataagtgtgccacttgcaagatgattctggaaaaagaggcgaaaagccagaagagagctcgccatctggccagagcaccaaaagccaccgcccctactgaactgaactgtgatgattttaaaaagggagagcgcgatggtgatttcatctgtccggactactacgaggccgtctgtggcaccgatggcaaaacttatgacaaccggtgcgccctctgtgctgagaacgccaagactggaagccagattggggtcaagtcagagggagaatgcaagtccagtaatccggaacaggatgtgtgtagtgcattccggccctttgtccgcgacggccgactgggatgtacccgggagaacgacccagtgttggggcccgacggtaagacccacggcaacaagtgcgctatgtgtgctgagctatttcttaaagaggcagagaatgcaaagagagaaggcgagacccggatcaggagaaatgccgagaaggatttctgcaaagagtacgaaaaacaggttcgcaatggacggcttttctgtaccagagagtctgaccccgtgcgggggccggatggtcgcatgcatggcaataaatgcgctctgtgtgccgaaattttcaaacagcgcttcagtgaagagaacagcaaaaccgatcagaacctgggcaaagcagaagaaaagacgaaagtaaagcgggagattgttaagctgtgctctcaatatcaaaatcaggccaaaaatggaatcctcttctgcacaagggagaacgaccctatacgaggccctgatggaaagatgcacggcaacctctgctcgatgtgtcaagcatacttccaggccgagaacgaggagaaaaagaaagccgaggccagggccaggaataagcgggaaagtgggaaggcgacatcctatgctgaactttgctcagagtataggaaattggtgaggaacggcaaactggcctgcacacgcgaaaacgatccaatacagggcccagatggcaaagtccacggtaacacttgcagcatgtgcgaagtgttctttcaggccgaagaggaggagaagaagaagaaggagggaaagagccgcaataagcggcagagcaagagcaccgcctctttcgaggaactttgttccgagtatagaaagagccggaagaatggcagactcttctgtacccgagagaacgacccaatccaaggcccagatggcaagatgcatggtaacacctgtagcatgtgcgaggccttcttccagcaggaggagcgcgctcgcgctaaagccaagagggaggccgcgaaggagatatgcagtgagttcagagaccaggtcaggaatggcactttaatttgcacaagagagcacaaccccgtaagagggcctgacggtaagatgcatggcaacaaatgcgccatgtgcgcatcggtgttcaagctggaggaagaagaaaagaagaatgataaagaggagaaagggaaagttgaggccgagaaggtgaaacgagaggccgtccaggaattgtgctccgagtaccgacattatgtgagaaacggaaggttgccctgtacccgcgagaacgacccaatcgagggcttggatggcaagattcatgggaatacgtgttcaatgtgcgaggcgttcttccagcaggaggctaaagaaaaggagagagccgagccacgtgcgaaagtcaagcgcgaagctgagaaggagacatgtgacgagttccgccgtctattgcagaatgggaagctgttttgtacacgggaaaatgatcccgtcagggggcctgatggaaagacgcacgggaacaaatgtgcaatgtgtaaagcagtcttccagaaggagaatgaggagagaaagcgaaaagaggaagaagatcaacgaaacgctgcaggtcacggctcttccggagggggaggcggaaacacgcaggacgaatgcgctgaataccgcgagcagatgaagaacgggcgcctgtcttgcactcgggaatcagatcccgtgcgcgatgccgatggcaagagctataacaatcaatgcactatgtgcaaggctaaactggagcgggaagctgaaaggaagaacgagtacagcaggagccgctctaacggcacaggatcagagtcaggaaaggatacatgcgacgaatttcgttctcagatgaaaaatggaaaacttatctgcacccgggagtcagatccagtaagaggcccggatgggaaaacccacggaaataaatgtacgatgtgcaaagagaagctggaaagggaggctgccgagaagaaaaagaaagaagacgaggaccggtctaatacaggagagcggtcaaatactggagagcgatctaacgataaagaggatttgtgtagagaatttcgctcaatgcagaggaacggcaaactgatctgcactagagaaaacaatccagtgcgcggaccctacggcaagatgcatatcaacaagtgcgccatgtgtcagagcattttcgatagggaagctaatgagcggaagaagaaggatgaggaaaaatcaagctcaaagcctagcaataacgctaaagtaatttactag

SEQ ID NO: 204647 - DNA, 261 bp, synthetic construct
  misc_feature 1..261: note = Description of Artificial Sequence: Synthetic coding sequence
  source 1..261: mol_type = other DNA
atgcgggccaccgccatcgtgctgctgctggccctgaccctggccacaatgtttagcattgaatgcgccaaacaaacaaaacaaatggtcgattgttctcattacaaaaaacttccgccaggtcagcagagattctgtcatcacatgtatgacccaatttgcggttccgacggtaagacttataagaatgactgtttcttttgtagcaaagtaaagaaaacagacggaacactgaaatttgtgcacttcggaaaatgttag

SEQ ID NO: 204648 - DNA, 759 bp, synthetic construct
  misc_feature 1..759: note = Description of Artificial Sequence: Synthetic coding sequence
  source 1..759: mol_type = other DNA
atggcccagctgtgcggcctgcggcggagccgggccttcctggccctgttgggtagcctcttactgtctggggtgctcgccgctgatagagagaggtctattcacgacttttgcctagtatccaaggtcgtgggaagatgtcgtgctagcatgcctcggtggtggtacaacgtgactgatggctcatgccagctgttcgtgtatggaggctgcgacggaaactctaacaattacctaaccaaagaggagtgtctgaaaaaatgtgcaacggtcacagaaaatgccactggtgatcttgccacctcaagaaatgcggcagactcttccgtgcccagtgcaccacggagacaggactctgaggaccactcttctgacatgtttaattatgaagaatactgcaccgccaacgcagtcacaggcccatgtagagcatcatttcccaggtggtattttgacgttgaaaggaattcttgtaataacttcatctacggtggctgccggggcaacaaaaacagctacaggagtgaagaggcctgtatgctgcgctgctttcggcagcaagagaaccctccactgccactgggatctaaggtagtagtgctcgccggactgttcgtcatggtacttattctgtttcttggagcgagtatggtgtacttaattcgggtcgcccgtcgtaatcaggagcgcgcattgagaactgtctggtcttccggagatgataaggaacagcttgtgaagaacacttacgttctgtag

SEQ ID NO: 204649 - DNA, 588 bp, synthetic construct
  misc_feature 1..588: note = Description of Artificial Sequence: Synthetic coding sequence
  source 1..588: mol_type = other DNA
atggcccagctgtgcggcctgcggcggagccgggccttcctggccctcctcggcagtctgctcttgtccggggttcttgcagccgacagagaacgcagcatccatgaaaacgctacaggagatctggctacgagcagaaatgctgctgattcgtctgtgccatccgctccccggcgtcaggacagcgaggatcacagctccgatatgtttaattacgaggagtactgcactgctaatgcggtaaccggaccatgccgagcgagctttccaaggtggtatttcgacgtggaaaggaactcctgtaataacttcatttacggcggctgcagaggtaataaaaactcatacaggtccgaggaggcgtgtatgctgcgatgctttcgtcaacaggaaaatccacctctccccctcggcagtaaagtggtggtgctcgccggtttgtttgttatggttcttatcctctttctgggcgcctccatggtttatctcattcgcgtcgcgcggcgtaatcaggagcgggccctgcgcacagtgtggagttccggtgacgataaggagcagctggttaagaacacttacgtgctttag

SEQ ID NO: 204650 - DNA, 1299 bp, synthetic construct
  misc_feature 1..1299: note = Description of Artificial Sequence: Synthetic coding sequence
  source 1..1299: mol_type = other DNA
atgagcgacaagctgccctacaaggtggccgacatcggcctggccgcatggggccgcaaagcacttgacatagccgagaacgagatgccgggacttatgcggatgagagaacggtactcagctagcaaacctctgaaaggcgcccggatcgccggctgcctgcacatgactgtggagactgcagttttaattgagactttggtgacactgggagctgaggtgcagtggtccagctgtaatatcttctccacacaagaccacgccgcagctgcaatcgctaaagccgggattccagtttacgcctggaaaggggagaccgatgaggaatatctgtggtgtattgagcagacgttgtatttcaaggatggccccctgaatatgatcttagacgatggtggagacctcacgaacttgatccacacaaagtatccccaactgctccccggcattcgtgggatctctgaggagacaaccacgggcgtgcataatctgtacaagatgatggcaaacggtattctgaaagtccccgccattaatgtcaatgacagtgtgacgaagtctaagttcgacaatttgtacggttgtagagagtcactgattgatggtatcaagcgtgcaaccgacgtgatgatcgcaggaaaagtggccgtggtcgctgggtacggcgatgtggggaaaggctgcgctcaggcacttcggggcttcggggccagagtcattataaccgaaatagaccccatcaacgctctgcaggccgcaatggagggctatgaagtaactaccatggacgaggcttgccaggaaggtaatatatttgttacaactaccggttgtattgatatcattctgggtcgccactttgagcagatgaaggatgatgcgatagtgtgcaatataggacacttcgatgtcgaaatcgatgtgaaatggttgaacgaaaacgccgtggaaaaagtgaatattaaaccacaagtcgatcggtacagactgaagaacggcaggcgaattattcttctggccgaaggaagattggtaaacctgggctgtgcaatgggccacccaagcttcgtcatgtccaattctttcacaaatcaggttatggctcagattgagctgtggacacatcccgacaagtatcccgtcggtgtacactttctacctaaaaagctcgacgaggcggttgctgaagcacacctcggcaaattaaatgtcaagttgactaaattaaccgagaagcaggctcagtacctggggatgagctgcgacgggccatttaaaccagaccactaccggtattag

SEQ ID NO: 204651 - DNA, 1023 bp, synthetic construct
  misc_feature 1..1023: note = Description of Artificial Sequence: Synthetic coding sequence
  source 1..1023: mol_type = other DNA
atgtgcgcccagtactgcatcagcttcgccgacgtggagaaggcccatatcaatatccgcgattccattcacctcaccccagttctgacctccagtatcctcaatcagcttaccggcagaaaccttttttttaaatgtgaattattccagaaaacgggcagcttcaaaataagaggtgctcttaatgccgtccgcagtttggtgccagatgctttagagcgcaagcccaaagccgtcgtaacccacagttccggcaatcacggacaagcactgacctacgccgcaaaattggagggcattccggcttatattgtggtgcctcagactgcgcctgattgcaagaaactagctattcaagcctacggtgcaagtatagtttattgcgaaccctctgacgaatcacgcgagaacgttgccaaacgagttactgaagagaccgagggcatcatggtccacccaaaccaggagcctgctgtgattgccggccaagggacgatcgcgttggaggtgctgaatcaggtcccattggtggatgccctggttgtgcccgtcggagggggggggatgctggctggcattgcaatcacagtgaaggccctcaaaccttcagtgaaggtgtacgccgctgagcccagcaacgccgatgattgctaccagagtaagttgaagggcaagctaatgcccaacctgtaccctcccgagacaatcgcagacggtgtaaagtcgagcatcggcctgaacacttggcctatcatccgcgacctggtggacgacatatttacagtgacagaagatgaaattaaatgtgccacccagttggtctgggagcgtatgaaactgctgatcgagcccacagcaggagtgggtgttgctgccgtgctcagccaacattttcagacagtatctcccgaggtgaaaaacatttgtattgttttgtctggtggcaacgtggatctgacatctagtataacctgggtgaaacaggccgagagacccgccagttaccagagcgtgtcggtctag

SEQ ID NO: 204652 - DNA, 1638 bp, synthetic construct
  misc_feature 1..1638: note = Description of Artificial Sequence: Synthetic coding sequence
  source 1..1638: mol_type = other DNA
atggccgagcccagcggcagccccgtgcacgtgcagctgccccagcaggccgctcccgttacagccgccgcggcagcagctcctgctgccgcaaccgccgcgcctgcgcccgccgctcctgcggcgcctgctccagctccggcccccgctgcccaagcagtagggtggcccatttgccgagacgcctacgagcttcaggaagtgattggttccggtgctaccgccgtggtccaagccgctctgtgcaagcccaggcaagaacgcgtcgccatcaagcgcatcaatctggagaaatgtcagacttctatggatgagctgctgaaagagatccaagcaatgagtcagtgttctcatcctaacgtagtgacttactacacatcatttgtcgtaaaggacgagttgtggttggtgatgaaacttttgtcaggagggagcatgctcgatattattaaatacattgttaaccgaggcgaacataaaaacggtgtgctggaggaggctatcatcgcaacaattctaaaggaagtgctggaagggctcgactacctccaccgtaacggccagatacacagagatcttaaggcagggaacatcctgctgggggaggacggcagcgttcagattgccgattttggtgtaagcgcttttttggccacaggaggggacgtgacccgtaataaagtgcgcaaaacatttgtgggcaccccctgctggatggcgcccgaagtgatggaacaggtgagaggatacgatttcaaggccgatatgtggtcatttgggattaccgctatcgaattggcaaccggtgctgctccttatcacaagtatcccccaatgaaagttctgatgcttacactccagaatgatcccccaacattggagactggagtagaagacaaggaaatgatgaagaagtacgggaagagctttaggaaattgctgtcactgtgcctccaaaaagacccctcaaaacgcccgactgccgccgagctcttaaaatgtaaattcttccaaaaagccaagaaccgcgaatacctcatcgagaagttgctcacacgaacccccgacatcgctcagcgagcaaagaaggtaaggcgcgttcccggaagcagcggacacctgcacaaaacagaggacggcgactgggagtggagcgatgacgagatggacgaaaaaagtgaggaagggaaggccgccttttctcaagaaaaatctcgccgggtgaaggaagaaaacccagaaatcgccgtgagcgcctccactatacctgagcagattcagtcactgtctgtgcatgattcccagggcccccctaacgcgaacgaggactacagggaagcctcatcgtgtgctgtgaacctggtgctgcggctgaggaactcgcgaaaagaactgaatgatatccggtttgaattcacaccagggagagataccgccgacggtgtatctcaagaactctttagtgctggacttgtggatgggcacgatgtggtgatagttgctgctaacctccagaagattgtagacgatcctaaggctctgaaaactctcacctttaagctggccagtgggtgcgacggaagcgagattcctgatgaagttaaattgatcggtttcgcccagctgagcgtgtcatag

SEQ ID NO: 204653 - DNA, 2715 bp, synthetic construct
  misc_feature 1..2715: note = Description of Artificial Sequence: Synthetic coding sequence
  source 1..2715: mol_type = other DNA
atggacgccggcttcttccggggcaccagcgccgagcaggacaacaggttctcgaacaagcagaaaaagttactcaaacagttaaagttcgctgagtgcttggagaaaaaggtagatatgagtaaggtgaatcttgaagtcatcaagccatggattacaaaaagggtgacagaaatcctgggattcgaggacgatgtagtcatagagttcatattcaaccaactggaggtgaagaatccagactcaaagatgatgcagataaacctcactggctttctcaacggaaaaaacgcacgggagtttatgggcgagctgtggcccttattactgagcgctcaggagaacattgcaggcatcccatccgcatttcttgaactaaaaaaggaggaaattaagcaaaggcagatagagcaggagaaactcgccagcatgaaaaagcaggatgaggacaaagacaaaagggataaagaggaaaaggaatcaagccgggagaaaagagagagaagccgctctccgcgaaggcgaaagagtcggagcccatccccccgacgacgcagctcacctgtcagacgcgaaagaaaacgctctcattcccgctcaccgaggcatcggaccaaaagtcgctccccgtcccctgcacctgaaaagaaagagaagacccctgagctgccagaaccatccgtgaaagtcaaggagcccagtgtccaggaggccacgtccacatctgatatcctgaaagtaccaaagcctgagcctatccccgaacctaaggaaccctcgccagaaaagaattctaaaaaagaaaaagagaaagaaaaaacccgacctcgttcccgatctcgctccaagagtcgttcacgcaccagaagccggtcccctagtcatacccggccgagaagacgacacagatccaggtcaagatcatattcaccccggaggcgaccctctcctcgccggaggccttcccccaggagaagaacacctccacggaggatgccccctccccctcgacatcgtagatctcgttcacccgtgcggagacgcagacgctcctccgcatctctgtctggaagttcgtcatcatcctcttcctccaggagccggagccccccgaagaaaccccccaagagaacatccagccctccccggaagacgaggaggcttagtccttctgcttcacccccccgccggcgacaccggcccagccctccagctacccctcccccaaagacacgacactctcccacacctcagcaaagtaatcgaacccgcaaatcacgcgtgagcgtgagccccggaagaacctctggaaaggttacaaaacacaaggggactgagaagcgagaatccccttctcctgcccccaaaccacgcaaggtcgagctgagtgagagcgaggaagacaaaggtgggaagatggctgccgccgattccgtgcaacagcggaggcagtatcgccgccagaaccagcaatcctcctccgactccggtagcagcagctcttctgaggacgaaaggcccaagagaagccatgtcaaaaatggagaagtggggagaaggagacggcatagccctagtaggtcggccagtccaagtccgcgtaaacgccagaaggagaccagtcccaggggtagaagacgacgctcccccagtccccccccgactcgacgaagaagatctcccagcccagctcctcctccaaggaggcggaggaccccaacaccgccccccaggaggaggacgccctctcctcccccccgaagacgttcaccaagcccacggcggtactccccgccaatccagcgacgatattcccccagtccaccccccaagaggcgaactgccagtccgccacctcctccaaaacgaagagctagcccctccccacccccaaagcgcagggtgagtcactcaccgccacctaaacagcggtcatcaccagtgacaaagcgtcgctcaccttcccttagttcgaagcatcgtaaggggtctagcccatccaggtccacgcgcgaagcccgttccccacagcccaataaaagacacagccccagtcctcgccctagagcgcctcagacaagttcatcaccaccacccgtgagacgcggcgcaagctcctcaccccagcggagacaaagtcccagcccgtcaaccaggcccatccggagggtttcacggacccccgaacccaagaaaatcaaaaaagccgcttctccatctcctcagagcgtccgccgggtcagctcctcccgctctgtctcgggcagtcccgaacctgcggcaaagaagcctcccgcacctccatcccccgtgcagagtcaatccccgtctaccaactggtctccggctgtacctgtgaaaaaagcaaaaagccctacgccaagccctagccctccaaggaactccgatcaggaagggggaggcaagaagaagaagaaaaagaaggataagaagcacaaaaaggacaagaagcataagaagcacaagaaacataaaaaagaaaaggctgtcgccgcggccgcagctgctgccgttacccccgccgccattgcggcagctaccaccactttggcgcaggaagagccagtcgccgcgccagaacctaagaaagagactgaaagtgaggccgaggataacctggacgatctggagaaacaccttagagaaaaggccttgcgtagcatgcgcaaggcccaggtctcaccacaatcctag

SEQ ID NO: 204654 - DNA, 2742 bp, synthetic construct
  misc_feature 1..2742: note = Description of Artificial Sequence: Synthetic coding sequence
  source 1..2742: mol_type = other DNA
atggacgccggcttcttccggggcaccagcgccgagcaggacaacaggttttccaataagcaaaagaagttgctgaagcagttaaagtttgcagaatgtctggagaaaaaggtcgacatgtctaaggtcaaccttgaagtgatcaagccatggataacaaagcgcgtcacagaaatcctagggtttgaggatgacgtggtaatagagttcattttcaaccagctggaggtgaagaaccctgacagtaagatgatgcagatcaaccttaccggcttcttgaatggcaagaacgcaagagagttcatgggtgagctttggccactgctcttgagtgctcaggaaaacatcgcagggatcccaagcgcattcttggagctgaagaaggaggagataaaacagcgacaaatcgagcaagaaaaactagcctccatgaagaagcaggacgaggataaggacaaacgggataaggaggaaaaggaatcttcgcgcgagaagcgggaacgatcacgcagtccaaggagaaggaaatcacggagcccctctcctaggcggcgtagttcgcccgtcaggagagaacgaaagcggtctcattcacgatccccacggcaccgaaccaagtccagatctccctccccagcacccgaaaaaaaagagaaaactcccgagttgcccgaaccttccgttaaggtgaaagagccgtctgtccaggaagctactagcacatctgacattctgaaagtgcctaagccagaacccatacctgaacccaaggagcccagccctgagaagaatagcaagaaggagaaagagaaggaaaagactagaccgagatctcggtcacgctctaagtcccgctctaggactcgtagccggtccccttctcacacgcgtccccgtcggagacaccgttccaggtcccggcggaggccttcccccaggaggcgtccctctcccagacggcgaactccaccacgccggatgcctccaccccctagacaccgccgcagccgatcacctgtgcgccggcgacggaggagctcggcttcattgtcggggagtagctcgtctagttcctcatctcgttcacggtctccacctaaaaagccgcccaagcgcacaagctccccaccccggaagacacggcgcttgtcgccaagcgcctccccccctcggaggcgacatcgaccatccccaccagcaacccccccgcctaaaacgcgccacagcccaacacctcagcagagcaaccggaccaggaagtcgcgggtgagcgtctcccccgggaggaccagtggtaaagtgactaagcacaagggcaccgagaaacgagaatccccctctcccgccccaaagcctcgaaaagtggagctatccgagagtgaggaagacaaaggcgggaaaatggctgccgccgattcagtgcagcagagacggcagtatagaagacagaatcaacagagctcaagtgactctggttctagttcttcgtccgaggatgagcgacctaagcggagccacgtgaaaaatggagaagtcggacggagaagacggcactccccatctagatctgcgtctccgtcaccgcggaagcggcagaaagaaacatcaccaagaatgcaaatggggaagcgctggcagtcaccagtcactaagagtgggcgccggcggcgctccccaagccctccgccaacacggcggaggcgctccccctcccctgccccaccgcctcgacggcgcaggactcccactcctccgccccgaagaaggacaccctcccctccgccccggagacgaagccccagcccaaggaggtattctccacccatccagagaagatactctccttctccacctcctaagcgacggacagcgagtccaccaccgccacccaagaggagagctagcccatcccccccaccaaagaggagagtttcccatagccccccccccaaacagagatccagccctgtaacgaagagaaggtccccctcattgtcctcgaagcataggaaggggtcttccccatctcggtcgacaagggaagcacgcagtcctcagccaaataagaggcactctcccagtccacgacctcgggcccctcagactagctctagtcccccccctgtgcgaaggggggcctcgtcatctccgcagcgccgccagtctccaagtccctctactcgccctattcgccgagtgtctcgtacccctgagcctaaaaagatcaagaaagcagcttctcctagtccgcagtcagtccggagagttagcagctctcgaagcgtatctggatcgcctgagcccgctgctaaaaagcctcccgcccctccctctccagtgcaaagtcagtccccaagtacaaattggtctccagccgtgcctgtgaagaaggccaaatcaccaacaccctctccttcaccgcccagaaactcagaccaggagggcggcgggaagaagaaaaaaaaaaaaaaagacaaaaagcacaagaaagacaagaagcataagaagcataagaaacataagaaggaaaaagccgtcgccgccgcagcagccgctgcagtcaccccagccgccattgccgcagcgaccacaacactggcacaggaggaaccagtggctgccccggagcctaaaaaggagaccgagtctgaagccgaggacaatcttgatgacctggagaaacatctgagagaaaaggccctcagaagtatgaggaaagcgcaggtttccccccagtcatag

SEQ ID NO: 204655 - DNA, 2751 bp, synthetic construct
  misc_feature 1..2751: note = Description of Artificial Sequence: Synthetic coding sequence
  source 1..2751: mol_type = other DNA
atggacgccggcttcttccggggcaccagcgccgagcaggacaaccggtttagcaacaaacagaagaagctgctgaagcagctgaaattcgccgaatgtctggagaagaaggtcgacatgagtaaagtgaacctggaggtgatcaagccctggatcaccaaaagggtgactgagatactaggctttgaagacgatgtggttattgagtttattttcaatcagctagaggtcaagaaccccgatagcaaaatgatgcaaataaacctgaccggcttcttgaatggaaagaatgcccgagaatttatgggggaactgtggcctcttctcctctctgcccaggaaaacatagcaggcattccatctgcgtttctggaactgaaaaaagaggaaattaagcagcgccagatcgagcaggagaaactcgcatcaatgaagaaacaggacgaggataaggacaaaagggacaaagaagagaaggaaagtagtagggagaagcgcgaaagatctaggtccccccgtaggaggaagagcaggagcccttccccgagacgtaggagcagccctgttcggcgggagcggaaacgaagtcactcaagatccccccggcacagaacaaaatctagatccccctcccccgcccccgagaagaaagagaagactcccgaactccctgagccttccgtgaaggttaaagaaccaagcgtccaagaagccaccagtacatccgacatcttgaaagttcccaagccagagcctatacccgagccaaaagaaccttccccagagaagaattcaaagaaggaaaaagagaaagagaaaacccggccaagaagccgctcacgtagtaaaagtcgaagtcgcaccaggtcccgaagcccatcacatacccggcctaggagacgtcatcgatcacgatcacgctcttattctccacggagacgcccctcaccccggcgccgccctagtccccggagaaggactccaccgcggcgcatgccaccccctcctcggcatcgccgatcgcggtctccagtgcggcgaagacgccgtagtagtgcatctctgtccggtagcagtagctccagttctagttccaggagcagatcccccccgaagaagccaccaaaacgcacatctagccctccccgcaagacacggcgtctatcacccagcgcatcgccgccacgcagacggcacagaccttcccccccggcgacgccaccacctaagacccggcatagccccacgccgcaacagagcaatcgaacgagaaagtcaagagtgagcgtttcccctggtaggactagcgtgaccaagcataaggggaccgagaagagagaaagtccttcaccagcgcctaagccccgcaaggtcgaacttagcgagtctgaggaggacaagggggggaagatggccgctgccgatagtgtgcagcagagacgacagtatagacggcaaaatcagcagagtagcagcgatagcggatccagctcatctagcgaggacgaacgccccaaacgctcccatgtgaagaatggtgaggttggcaggaggaggagacacagccctagtaggagtgcctccccatctccccgcaaaaggcagaaggaaacatccccccgaatgcagatgggcaagaggtggcagtcacctgtaactaagagcggccgacggagaagaagtcctagtcccccccccactaggcgccgccgctcaccctcgcccgcaccacctccgaggcgacgccgaacacctacacctcctcccagaaggcggacaccttcccctcccccacggaggcgatctccttctcctaggcggtacagcccacctattcagaggcggtactcaccttcgccccctcctaagcgacggacagctagtcccccgccccctcctaaaagaagggcgagtcccagccccccccctaaaaggcgggttagccatagcccaccgcctaagcagagatcatcccccgtcaccaaacgcagatctccatccctgtcgtctaagcaccgcaagggatcctccccatcacgcagcactcgtgaagccagatctccccagccgaacaaacgccactcaccatccccgcggccccgcgccccacagacctcttcctcacccccgccagtccggaggggagcttcttccagcccacagagacgccaaagtcccagtccgtcaacccggcctataagaagggtcagtagaactcccgaaccgaagaagatcaagaaagctgcctccccctcccctcaatcagtgagacgagtgtcatcatccagatccgtgtccggaagcccagaaccagcggcaaaaaagcctcccgcccctcccagcccggtacaaagtcaaagcccctcaaccaactggtcccctgcggtccctgtgaagaaagccaaaagtcccaccccaagccctagtccccccagaaattccgatcaagaaggcgggggtaagaaaaagaagaagaagaaggacaaaaaacacaagaaggacaagaagcacaaaaagcacaagaaacataagaaagagaaggcagtcgcggcagccgcggccgccgcagtgacccccgccgctattgccgctgctacgactactctggctcaggaagagccggtggcagccccggagcctaagaaagaaaccgaatctgaggcagaggataacctggatgatttggagaagcatctgagagaaaaggcactccggagcatgaggaaagcgcaggtttccccccagtcttag

SEQ ID NO: 204656 - DNA, 957 bp, synthetic construct
  misc_feature 1..957: note = Description of Artificial Sequence: Synthetic coding sequence
  source 1..957: mol_type = other DNA
atgggcgagctgtggcccctgctgctgagcgcccaggagaacatcgcaggcatcccttctgcctttctggaacttaagaaagaagaaatcaagcagaggcagatcgaacaagaaaagttggcatctatgaaaaagcaggacgaggacaaggataaacgggacaaggaagaaaaggagtcttctcgtgagaagagagaacgcagccgctctccccgaaggaccaaaagtaggagcccctccccagctccagaaaagaaagagaagaccccagaattgcccgaaccctctgtcaaggtcaaagagccctcagtccaagaggcaacttccacgagtgatattttgaaagtccccaagcctgagcccatccctgagcccaaggagcccagcccagagaaaaactccaagaaggagaaagagaaagagaagaccagacccaggtcacgctcccgctcgaagtccaggtcccgaactcggagccgatctccttcacacactcgccctcggcgccgtcacaggagtagatctcgatcatattcacccagacgcaggcccagcccccgccgccgaccctcaccccgacggaggaccccccctaggaggatgcctcccccaccaaggcatcgaaggtctcgctcacctgtgcgtcggttttccggaatactgccccctaaggtcaactctgctgaggaggacgttcggcaacacccatgtcttggcgttgcgcatcaccctcttcaccttgtgcacggacatcatcagcgtagtttacctcgaggacatcccgctcctcttgggaaacttgtcggatatttacttcagcaggtcttgcaaggggagggaaccggccaccacttattgcagctccatcacccaaagctgggaattcctctgcatccaagtagccaaaccgtgcaggaaaaggtggtttttttatgcctacagggcgaactacagtag

SEQ ID NO: 204657 - DNA, 8259 bp, synthetic construct
  misc_feature 1..8259: note = Description of Artificial Sequence: Synthetic coding sequence
  source 1..8259: mol_type = other DNA
atgtacaacggcatcggcctgcccaccccccggggcagcggcaccaacggatatgtccaaaggaacctgagccttgtgcgagggcgaaggggcgagcggcctgattacaaaggggaggaagagcttcgtcggctggaagcagccctggtcaagagacctaacccagatattttagaccacgagcgaaaacggcgggtcgaactccggtgtttggaattggaggagatgatggaagaacaggggtacgaggagcagcagatacaggagaaagttgctacattccgattaatgttactggaaaaagatgtcaaccccggaggcaaggaagaaacacccggtcaacgcccagccgtcaccgagacacatcaattggctgaattgaacgagaaaaagaacgaacgcctaagagcagccttcgggattagcgactcttatgtcgatggcagctcttttgacccacaaagacgcgcgcgggaagctaagcagcctgctcccgagccaccaaagccttattccttggtccgggaaagctcgtcctcgcggtcacccaccccaaagcagaaaaagaaaaagaagaagaaggacaggggtagaagatctgagtcatcctctcctaggagggagcgtaagaagagtagcaagaagaaaaagcaccgctccgaaagcgagtcaaagaaacgcaagcaccgttcaccaaccccaaagtccaaaaggaaatctaaggataaaaagcggaagcgctcacggtccacaactccagccccaaagagccgccgcgcacatagaagcacatcggcggattccgcgtcaagcagcgacacctctcgctccaggtctcgctccgctgccgcaaagacccatacgacagccctggcgggccgcagcccatctcctgcgagcggaagacgcggcgagggggacgcccccttttccgagcctggcaccactagcacgcagagaccgtcctcgccggagaccgcaaccaaacagccatcttctccttatgaagataaagacaaggataaaaaggagaagtctgccacgcgtccctcgccatctcccgagaggtcaagcacaggccccgagccccccgctccgaccccactgctggctgagaggcatggaggaagcccgcagcccctcgccaccactccattgtcacaagaaccggtgaaccccccctctgaggcaagccccacacgggataggagcccacccaagtcacccgagaagctcccccaaagcagctcctctgagtccagccccccttcaccccaacccactaaggtttctaggcatgctagcagcagtccggagagccccaagcctgcccctgcccccggatcacatagagagataagctctagtccaactagcaagaaccgctctcacggccgggccaagcgcgataagtctcacagtcacacaccttctcgcagaatggggcggtccaggtctcccgccaccgctaaaagaggcaggagcaggagtaggacccctactaagagggggcatagcaggagtcggagcccacagtggaggcgcagccgctcagctcagcgctggggaagaagccgctcgccacagcggcgcggacggtcacgttcaccccagcggccaggatggtctagatcccgcaatacacaaagacgcggcaggtcacgaagtgcacggagggggcggtctcactcccgctctccggccacccgggggcggtccaggtcgcgcaccccggctcggcggggccggagtcggagccgtactccggctcgaaggaggagccggtcccggacaccaaccagaagaaggtctcggtctaggactcccgcccggagggggcgaagccgttctaggacaccagcgcggaggcgttctcgaaccagatccccggtccgccgtaggtcgcgatccaggtcacccgccagacgctcaggccggagccggtcgcgcacaccggcaaggaggggcaggtctcgtagccgcacgcctgcccgccgaggaaggtcgcgcagccggaccccagcgcgccgtagtggacgaagtcgaagcaggactcctgccagaaggggccgcagccggtcacgcactccccgccgtggccgctcacgaagccgtagtcttgtgagacgggggagatcgcactcacgaacaccccagaggcgcggacggagcggcagcagcagcgagcgcaagaacaagagtaggaccagtcagcgaaggtcccgtagtaacagctctcctgaaatgaaaaagagcagaatttctagtaggcggtcccgtagtttgtcttcaccccggagcaaggccaaatctcggctgtcgctgcgcaggagcctgtcagggagttcaccttgtcccaagcaaaagagccagacaccacctcggcgttcccgctctggcagcagtcagccgaaggctaagagtaggacaccgcctcgcaggtccaggtctagctcctctcccccaccgaagcagaagtccaagacaccgtccagacagagtcactcatcgagctcaccacacccaaaggtgaaatcgggtacaccccctagacagggctctattacatccccacaggcaaacgagcagagcgtgacgccgcagcgtcgctcatgctttgagtcatccccagatccagagctgaaaagccgaaccccaagccggcacagctgttccgggtctagtccccctagagtgaaaagctccacacctccgagacagtcaccatcgcgatcttcgtcgccacaacccaaagtgaaggcgatcatctctccaagacagcgcagtcactctgggtctagctcgcccagcccttctagagttacctctcgcaccacacccaggcgatcccgctctgttagcccatgctctaacgtggaatcccggttattgcctaggtactcccacagcgggtcaagctccccggacactaaggtcaagcccgaaacaccgccacgacaatctcattctggatcaatctctccttacccaaaagtcaaggctcagactccccccggacctagcttgtcgggcagtaaaagcccatgtccacaggagaagagcaaggacagccttgttcagtcatgtccagggtctctgagcctgtgtgctggcgttaagtctagtactcccccaggggagagttacttcggagttagcagtctacagcttaaaggccagtcacagacctcgcccgaccatcgttccgatacgtcctcacccgaagtcagacagtcccattcagagagtcctagtctgcaatccaagagtcagacctcccccaagggagggcgatcccggtccagctcgcccgtgactgagctggccagcagatctcccattcgccaagacagaggcgaatttagtgcatcaccgatgttgaaatccgggatgtcgcctgagcagagccgtttccagtctgactcctcgtcctaccctacggtggactcaaatagtttgttgggtcagtcaaggcttgagaccgccgagagtaaggagaagatggcgctccctccccaggaggacgcgacagcatccccaccaaggcaaaaggacaaattcagtcccttcccagtacaggaccggcccgaatcctcccttgtctttaaggatactctgcgaacgcctccccgggagaggagtggcgctgggagctcccctgaaacgaaagagcaaaattccgctctcccaacctccagtcaagacgaagaactgatggaggtggtcgagaagtccgaggaaccagctggccaaatcctgagtcacctgagttccgagttaaaggagatgagtacatctaattttgaatccagtcctgaagtcgaggagaggcctgctgtatctctcacactggatcagagccagagtcaggcctctctggaagctgtggaggtgccatctatggcttcatcttgggggggcccacatttcagtccagagcacaaggagctatctaatagcccattacgcgagaatagttttgggagccctctcgaattcagaaattccggtcccttaggcacagaaatgaatactgggtttagcagtgaggtgaaagaggatctgaacgggccgtttctgaaccagctggaaaccgacccttctttggatatgaaggaacaaagcacacggagctctggacatagctcgtccgaactttctccggacgcagtggagaaagccggtatgtcaagtaatcagtccatctcgagccctgtgctggacgctgtccccagaaccccgtcgagagaacgctcttcttccgcatctagtccagaaatgaaggacggtctcccccgtacgcccagccgaaggagcagatccgggtcatcaccaggtctacgggacggaagcggaacaccctcccgacacagtctatccggctcaagccccgggatgaaagatattccaaggactcccagccgggggagaagtgagtgcgactcatctcctgaacccaaagctctgccccagaccccgaggcctagatcgcggtctccaagctcaccagaactaaacaacaagtgtctgacaccccagcgtgaacgctctggatcggagtcctccgtagatcagaagactgttgcccgaactcccttggggcagcgaagcaggagcgggtctagtcaagaactggatgttaagccatcggctagtcctcaggagcgctccgagtcagattcttctcccgactccaaagcaaaaacaaggacaccgctgcggcagagatctaggtcgggctccagtccggaagtagacagtaagagtcggctctccccgaggaggagcaggagtgggagttctcccgaggtgaaggacaagcccagggccgcgccgcgggcccaatcgggcagtgatagttctcccgagcctaaagcacctgccccacgtgctctaccaagacgcagtagaagtggctcttcctcaaaaggacgcggccctagcccagagggcagtagtagcacggagtccagtccagagcatcctcccaagagtcgtactgcacgacggggatccagatcttccccagagccaaagaccaagagcagaaccccccctaggcgcaggtcctcacggagttcccctgaattaactcgcaaagcccgtctgtctaggcgctccaggtctgccagctcttcacccgaaacaaggagtcgtactcctccgcggcacaggagaagcccctccgtctcgtcacccgagccagccgagaaatcccgctctagcagacggcgtagaagcgcctcctccccgaggacaaaaacaacttcccgccgagggcggagcccttctccaaaacctcgaggattacagcgcagtaggagtcgatcccggagagagaaaacccggaccactcgccgtcgagataggagcggaagttcccagtctacttctcgccgaaggcagcggtctcggtccaggtctcgagtgacacggcgtcgccgtgggggttcaggttaccactccaggtcccctgcccgccaagagtcctccagaacctcgtctagaagacgccgggggagaagtaggactcctccaactagccgcaagcgaagcagatcgcgcacctcccctgctccctggaagcgatctcggagccgggcctcccccgccacccatcggcgtagtcggtcgcggacacccctgatctccaggaggcggtctcggtcccgcactagtccagtctcccggagacgcagccgttctagaactagcgtgacccggcggcgaagtcggtcacgtgcaagcccagtgagcagaaggaggtcccgaagtcggaccccccctgttacgcgcagacggtcccgtagtcgcaccccaactacccggcggaggagtcggtcccgcacccctcctgtgacgcggcgcaggagccgatcacggactccacctgtgacgaggcgtagatcacgcagcagaacgtcccctatcacccgcaggagatcaagaagccgaacaagccctgtgacccgtaggaggtcccgttcccgaaccagcccggtcacacggcggcgctcgcgatcccgtacttctcccgtcacaagaagaagaagcaggtcacggacgccgcccgctattaggagacgctcaaggtcgcgaactccactgctcccacgtaagcgaagccgctccaggtcacccctggccatccggcgccgtagcagatccagaacccctcgtaccgccaggggcaagaggagtctaactagatcaccccctgcgatccgccgccgctcagctagtggaagtagctcggatcggagcaggtccgctacccctcctgctacccgcaaccactccggttccaggacccccccagtggccctcaatagttctcggatgagctgcttctctcgacctagcatgtcccctaccccgttagatagatgccggtcacctgggatgctagagccattgggatcatccagaacccctatgtcagtgctgcagcaggctggaggctctatgatggatggccctggcccgagaatccccgaccaccagaggacatcagtgccagaaaaccacgctcagtccagaatcgccctggccttgaccgctatcagcctaggaaccgccagacctccgccaagtatgtcagccgcgggcctggccgccaggatgtcccaggttcccgcccctgtgccgctcatgagcctccggactgcacccgccgctaatctggccagccggattcccgccgccagcgccgctgctatgaacctggcttccgcccggactcccgccattccaaccgcagtcaacctcgccgactccaggacgcctgcagcggcagccgccatgaacctagccagccccaggaccgccgtagcacctagcgcggtgaacttggccgaccctcggaccccaactgcgccggcggtcaatctggcgggggccaggacgcccgccgccttagccgctctgtcactcaccgggtctggaaccccccccaccgctgccaactacccttccagctctcgcactcctcaggctcccgccagtgccaaccttgtaggcccccggtccgcacacgccacagcaccagttaatattgctggatcgagaaccgccgcagccctggcaccagcctccctgacgagcgccaggatggctcccgccctgagcggagctaaccttactagcccacgggtcccactttctgcatatgagagagtctccggccggaccagcccccccctgctggaccgggcgaggtctcgtacaccaccctcagcccctagtcaaagcaggatgacaagtgagcgcgcaccaagccctagctcacgcatgggccaggcaccttcccagtcactacttccaccggctcaagatcaacctcggagccccgtccccagcgcattctccgaccagagtcggtgtcttattgcacagaccacacctgtggccgggtcccagtccctaagtagcggcgccgtggctaccactacaagttccgccggtgatcacaacgggatgctgagcgtacctgctcccggcgtcccgcactccgatgtgggcgagccgcctgcatccacaggggcccagcaacccagcgccctggcagccttgcagcccgccaaagaaaggcggtcttccagttcttcttcctcttctagcagtagcagctccagtagttcttctagcagctcttcctcctctagctctggttcgtcttcctccgattccgaagggagcagcctcccggtccaaccggaagtggcccttaaaagagtacccagcccgacacctgcaccaaaggaggcagtgagggagggtcgcccccccgagcccactcctgccaagcggaaaaggcgctcctcgagctccagctcaagtagttccagtagctcaagctcgtcatcaagttctagctcatccagtagctcgtcgtcttcttccagctccagcagttcttcgagctcctcctcctcctcctccagtccaagccccgcaaagccaggcccgcaagctctgcctaagccggccagcccaaaaaaacctccacctggagagcgtcgctctcgctccccccggaaacccatcgacagcctcagagactcaagatccctgtcctatagccccgtggaacgccgaagacccagtccgcagccaagtccacgggatcaacagtcatcaagtagcgaaagaggaagcagaagggggcagagaggcgactctcggtccccatcgcacaaaaggagacgcgagaccccttcaccgaggcctatgcgtcacaggtccagccggagcccctag

SEQ ID NO: 204658 - DNA, 702 bp, synthetic construct
  misc_feature 1..702: note = Description of Artificial Sequence: Synthetic coding sequence
  source 1..702: mol_type = other DNA
atgatcagcttccccagcctgcagcggaccgagctggaggagatggaccttatactgcagcaggagggttggcagctggatctgaaacgaaatagccttggatggaaagatctccagcgctcttcccacccctcaccgtgccttcaggccgggcggcctctgccacagcccacttgcacacacaggggcttaccgaaattgcggctttccgaggagggagattaccccgcttcggcctcgacccccgaaccgaggggtcttataccgcctagtgggacgtttttacgctttaacctcgatccgttgtgctgtggccctcagcccgtcgccagcgtgagtagaggctgggttagctcacaccattgctccccagaaaattgttggttgacttggttaggcgaacttcccgcgcctttctcaggcacccccccaccaaccgcagtgcctcctggccaggggagccggagtcgttccccccgtaagccaatcgatagtttacgtgattccagatctctgagctactcccccgtcgagagaagacgccccagtccacagccatccccccgcgaccagcagagcagcagctcagagcgaggctcccgacgcggtcagcgaggagacagcagaagtccttctcacaaacgaaggcgcgaaaccccaagtcctaggcctatgcgtcaccggtcaagccgttccccgtag

SEQ ID NO: 204659 - DNA, 7005 bp, synthetic construct
  misc_feature 1..7005: note = Description of Artificial Sequence: Synthetic coding sequence
  source 1..7005: mol_type = other DNA
atgtacaacggcatcggcctgcccaccccccggggcagcggcaccaatggatacgttcagcggaacttgagcctggtgaggggacgccgaggggagcgaccggactataaaggcgaagaagagctgcgaaggttggaggctgcattagttaagcgccccaaccccgacatcctggaccatgagcgcaagcgccgggtcgagctccgatgtctggagctggaagagatgatggaagagcaaggttatgaggaacaacagattcaagagaaggtggcgaccttccggctgatgctactcgagaaggacgtgaaccctggcggaaaggaggagacccctggtcaacgcccggctgtgaccgagactcaccagctagctgagttgaacgaaaagaagaatgaacgtctgagagcagcctttggaatctccgattcctatgtcgatggctcttcttttgacccccagcgacgagccagagaagctaagcagccggcccctgagcctcccaaaccttacagcttggtgcgggaaagctcttcgtctcgatcaccgactcctaagcaaaagaagaagaagaagaaaaaagatagaggtcgcagaagcgagagctccagcccgcggcgggaaaggaaaaaatccagcaaaaaaaagaaacataggagcgagtcagagtccaaaaagcgcaagcataggagccctacacctaagagtaagcggaaaagcaaagacaagaaaaggaagagatcacgcagcaccacccccgcacccaaatctagaagggcccatcgctccacctccgcagatagcgcatccagcagcgacacgagccgttcgcgtagtcgctcagccgcagctaaaactcacacaactgcgctggccggccgttcacctagcccagcaagcggccggcgcggggagggggacgcacctttctccgaacctggtacaacctcaacacagaggccatcctctcccgaaacggctacgaagcaaccatcatcgccttacgaagataaggataaggacaagaaagagaagagtgcgaccaggcccagtccttcacctgagcgaagctctacagggccggagccccccgcccccacccccctcttagcagaacgccatgggggtagtcctcagccgcttgctacaacgcctctctctcaggagccagtcaaccctccttctgaagcatctcctacgcgcgaccgttctccccctaagtctcccgagaagctgccccagtcaagttcgtcggaatcatcgccccctagtccccagcccacaaaggtcagcagacacgcctctagttctcctgaatcaccaaagcccgcccccgctccaggatcccatcgagaaatttcaagcagtcccaccagtaagaaccgctctcacggaagggccaagagggacaaaagtcattcacacacaccatcgcggcgcatgggtcggtcccgtagccctgccacagccaagcggggtagaagtagatcccggacgcccaccaagcgagggcattcacgcagtaggtccccacagtggagacggtcaaggtcagcccaacgctggggcaggtctaggagtcctcagagaagaggaagatcaaggagcccacagcggcctgggtggtcaagaagtaggaatacacaaagaagaggacgatcaaggtctgctcgtcgtgggcggagtcattccagatctcccgctaccagaggacggagccggtctagaactcccgcgcgaagaggtcgatccagatctaggacgcccgcacgacgccgttcacgaagccgtacgccgacaagacggcgcagtaggtcccggacgcccgctcgaaggggacgctcccgatcacgaacccccgcaaggaggcgctccaggaccagatcccctgtacgcagaaggtcccgcagtcgcagtccggctcgcaggtctgggcgaagccggagtcgaacccccgccagacgcggccggtcgcgctcccggacccccgctcgtaggggcaggtctaggtcccgtacccctgccaggaggagcggccgcagccgaagcaggactccagcacgcagagggcgctctcgttcacgaacacccagacggggacgtagcaggagtaggtcacttgttcgtcggggaagaagtcacagtcggacaccccagagacgtgggagatccgggtcgagtagcgagaggaagaacaaaagcaggacttctcagagacgctcacgtagcaacagctctccagaaatgaaaaaatcacggatttcctcaaggcgttcgagatccctgtccagcccgcggtcaaaggctaaatctaggctgagtctgagaaggtctctttcaggctcctccccttgccccaaacagaagagccaaaccccaccaaggaggagtcgttccggcagtagccagcccaaggcaaagagcagaacacctccccggaggtccagatcttcatctagtcccccacccaagcagaagtccaagacaccttctaggcagagtcactcctcgtcgagtcctcatcccaaagttaagtccggaacgccaccaaggcagggctctatcactagtccccaggcaaatgagcaaagtgtgactccacagaggcgtagttgttttgagtcctcccctgatcctgagcttaagtcacgcacacccagcagacattcctgctccggcagcagccctccccgtgttaagtcaagtaccccgccacggcagagcccaagtcggtcttctagccctcagcctaaggtgaaggccattatctcacctagacagaggtcacacagtgggtctagctcccctagcccatcacgtgtgacctctagaactaccccacgcagatctagatctgtgtcaccgtgtagtaatgtggaatctcgactgctgccccggtattctcactcagggtccagctcacctgatacaaaagtcaagccagaaacacctccccgccagtcccactccggatccatcagcccttacccaaaggtgaaggcacagacaccaccaggaccatcactgtctgggagcaagagtccatgtccccaggaaaagagcaaagacagtctagtgcaatcttgccccggtagcctcagcttatgcgctggagtcaagtcatctactccacccggggaatcttactttggtgtctcttccctccagttgaaaggacagagccagacctcaccagatcatcgctcagatacatcttccccagaagtgaggcagtcccactctgaaagtcctagcctgcaaagcaaaagtcaaacatccccgaaaggcggacgctcccggtctagttccccagtgacagagttagcctcgaggtcacctataaggcaagataggggagagttcagcgcttcccccatgctgaaaagcggtatgagcccggagcagagtcgcttccaaagtgactctagtagctatccgaccgtagatagcaacagcctcttggggcaatctcgtttggagacagccgagagcaaggagaagatggccctgccacctcaggaggacgctacggcctctccgccccgccagaaggacaaattctcaccattccccgtacaggaccggccagagtcttctttggtgtttaaggataccctgcgcacgccacccagggagagatccggggcaggctcatcccctgagaccaaagagcagaatagcgccctgcccactagttcacaagacgaagagctgatggaagttgtggaaaagtctgaggaacctgccggccaaatccttagccatctgagcagtgagctgaaggagatgtccactagcaattttgagagctctcccgaggtggaggagcgtccggccgtttctttgacactggaccagtcccagtcccaggccagcctggaggctgtggaggtaccctctatggcttcctcatggggcgggccccacttcagcccggagcataaggagttgagtaactcccctctccgtgagaatagcttcggtagtcctcttgagtttaggaattccggacccttgggaaccgagatgaacacaggcttctcgtctgaggtaaaagaggaccttaatggcccattcctgaaccagctcgagaccgacccatctctggacatgaaagaacagtcgacgaggagctcaggacacagctcttccgaattatcgccggatgctgtcgagaaggccgggatgagttcaaatcagagcatctcctcccctgtgcttgacgctgtgccgcgcactccttcacgggaacgttcctccagcgcctcctcccctgagatgaaagatggccttccaagaaccccaagcaggaggtcacggagcggctccagtcccggcttgagagacgggagcggaactccatcccggcattccctgtctggcagcagtcccgggatgaaggatatccctaggacaccaagcagaggaagaagtgagtgtgatagcagtccagaacccaaagcactgccacaaacacccagaccaagatctaggtcgccttcttcccctgaattgaacaataaatgcctgacaccacaacgggaacgatcaggaagcgaaagctctgtcgaccagaaaaccgtggctcgcactcccttgggtcagcgctccagatcggggagcagccaggagctagacgtgaaacccagtgcctctccccaagagcggagcgagagtgactccagccctgacagtaaggcgaaaacccgaactcccctccggcaacggagcaggtctgggagttcccctgaagtggactcaaagagtcgcttaagtcctcgtcgaagcaggagcggctccagtcccgaggttaaggacaagccgcgggcggcgccacgtgctcaatcaggatccgacagttcgcccgagccaaaagcacctgcccctagagccttgccccgtagatctcgtagcggatctagcagcaaggggaggggcccctccccggagggaagctcgagcaccgagtcgagtcccgaacaccctccaaaatctagaactgcccgccgggggtcccgcagctctccggaaccaaagactaaatctaggaccccccctaggcggaggagcagcaggagcagccccgagctgactcggaaggcaaggctgtctaggcggagccgttctgcctcttcctctcccgagacccgaagtaggacgccccctcggcataggcggagtcccagtgtgtcctctcctgaaccggccgagaaatcacgctcttcccgcagaagacgtagcgccagttccccccgtacgaaaaccacttcgcgaagggggcggtctcccagtcccaaacctcgaggactgcagaggtcacgatctaggtcccggcgggagaagactagaaccactcggagacgtgatagaagtggcagtagtcaaagcacatcgcgccggcgccagcgcagcaggtcccggtccagagttactcgtcgtcgcaggggtggctccggatatcacagtcggtcccctgcacgccaagagtcctccagaacctcctcccggcggagaagaggccgatcccggacccctccaaccagcagaaagagaagcaggagccggacctcacccgccccatggaagaggtctagaagcagagcctcccccgcaactcaccgcagatcccggtccagaactcctctaatttcccggaggcggtcccgttctaggaccagtcctgttagccggcggcgctctcgcagcagaaccagtgtaacccgccgtcggagcagatcaagggcatcaccagtctcccggcgaagatctcgatctcgcacccccccggtaacccgccgtcgttcaagatccaggacgcccaccacaaggcgccgctctagaagtagaactccaccggttacccgacgccgcagcagaagtcggacaccacccgtgactaggcgcagatcacgctctcgaacctcccctattacacgacgccggtcgcggagcagaacatctcccgtaacacgccggcgtagtcgatctcgaacttcacccgttacacgcaggagatcacgatcacgcacttcccccgtgaccagacgcaggagtcgttcacgtacccctcctgcccaggatcaaccacggtctcctgttcctagtgccttttctgaccaatctcggtgtctgatcgcccagaccacaccggtcgcggggtcccaatctttgtcgagcggtgccgttgccacaaccaccagctccgctggagatcacaatggcatgctgagtgtccccgccccaggggtaccgcactctgacgtgggcgaaccacccgcatccacaggagctcagcagccatctgcactggccgccctccaacctgcgaaggaaaggcgctctagttcgtcatcttcatccagctcctcttcatccagtagttcctcgtcttcctccagctcatcatctagttcaggctctagcagcagcgactcggaggggtccagtctgcccgtgcagcctgaagttgcactgaagcgtgtgccctccccgactcccgcccccaaggaagctgtgcgagagggacgaccccctgagcccacacctgccaagcgaaaacggaggagttcgtccagcagcagctcttcaagttcatcctcatcctcttcttcttcgtcatcttcttcatcaagcagctcctcatcctcttcctccagttcctcatcatcatcatcttcttcctctagcagccctagtccagcaaagcctggacctcaagccttacctaaacctgccagccccaagaagcccccccctggggagaggagatcccgcagtcctaggaaaccaatcgactctctgcgcgacagtcgctccctgagctacagccctgtcgagagaagaagacctagcccccagccctctcctcgggaccagcagtctagcagctccgagcgtggatcccgacgcggtcaaagaggtgactcaaggtctccgtctcataagagacggcgtgagacaccttctccgagacccatgcgacatcgctctagcagatcaccatag

SEQ ID NO: 204660 - DNA, 936 bp, synthetic construct
  misc_feature 1..936: note = Description of Artificial Sequence: Synthetic coding sequence
  source 1..936: mol_type = other DNA
atgctgctggagaaggacgtgaaccccggcggcaaggaggagaccccagggcagcgacccgccgttacagaaacccaccagttagccgaactgaatgagaagaagaatgagcggctcagggcggcattcgggatttctgactcttacgttgacgggagctcctttgatccccaaagacgcgcaagagaagccaaacagccagccccagaaccacccaagccctattccttagtccgagaaagctccagcagccggtcccctacgccgaagcaaaagaagaagaaaaaaaaaaaggatcggggtcggaggtctgaaagttcatcaccccgtcgagagaggaagaagtcgtccaaaaagaaaaagcaccggtcagagtcggagagcaagaagcgcaaacatcgctcaccaacccccaagagcaaacgtaagtcgaaagacaaaaaaagaaagcgctcgcgaagtacaaccccagcccccaaaagccggcgtgctcacagaagcacctctgccgattctgcatcttcatccgatacctcccgtagccgatcccggtctgccgccgcaaagacccatacaactgccctcgcaggccgtagtccttctccagcctccggccgacggggtgaaggcgacgccccattttccgagcctggcacaacatccacccagcgccccagtagtcccgagaccgcaaccaagcagccatcctctccatacgaggataaagacaaggacaagaaggagaagtctgcgaccaggccttcccccagccccgaaaggagctcaactggccctgagccccccgcccctaccccgttgctcgctgagcgtcacggaggctcaccccagcccctggccacaacgccactgtcgcaggagccagtgaacccctcaccacagcttttcatgtttcttaaaggaatcttggtgttctag

SEQ ID NO: 204661 - DNA, 2871 bp, synthetic construct
  misc_feature 1..2871: note = Description of Artificial Sequence: Synthetic coding sequence
  source 1..2871: mol_type = other DNA
cggcggcggcggctgcggcgggccgaccggcggggcgaggccgccgcaccaggcccaagagatagcggcgcgagggctgccgccgcagcaagacccctgccactcgggggcggcggccgacggcggagggtcaggggctatgaggaacagcagatccaggagaaagtggcgacctttcggctgatgttgctcgaaaaggatgttaaccccggcggaaaggaggagacacccggtcagcgaccagctgtcaccgagacccatcagctcgccgagctcaatgagaagaagaacgagcgactccgggccgcattcggcataagcgattcttacgtggatggatcttccttcgacccccagagacgcgcccgggaggctaagcagccggctcctgagccccccaagccctactcactcgtgcgggaatcatcctcttcccggagtcccacaccaaagcaaaaaaaaaaaaagaaaaagaaggaccgcgggcgtcgttctgagtcatcctcacctaggcgcgagagaaagaaaagctcgaagaagaaaaagcaccgatccgagtccgaatctaaaaaaaggaagcatcgctcacccacccctaaaagcaagaggaagtccaaggacaaaaagagaaagaggagccgaagtactactcctgctcccaagagccgtcgggcccatcggagcaccagtgccgatagtgcatcttcaagcgatacttcccgatcaaggtcccgttctgcagccgctaagacccacacgaccgctctcgctggcaggtctccgtcacccgccagtggcaggcgcggcgaaggagatgccccatttagtgaacctggaacaacatcgactcagcgaccctcaagccctgaaaccgccacgaagcaaccttcatccccttatgaggataaagacaaagataagaaggagaagagcgccacacgcccctctcctagccccgagcgaagtagtaccggcccagaacctcctgcacctacacccctcctggcagaacgtcatggcggcagtccccaacctctagctactacccctctgtctcaggaacctgtgaaccctccttctgaggcgagccctactcgcgatcggtcaccacctaaaagccccgagaaactgccccaaagctcatcctctgaatcttccccccccagcccacagcctacaaaggtcagccgccatgcatcctcctctccggaatctccgaagcccgcccccgcacccggttcccatcgggaaatcagttccagccccacgtcgaaaaatcgtagtcatggtagagccaagagagataaaagtcatagtcacacccccagccggcgcatggggcgtagtcgatccccagccacagccaagcggggccggtcacggtcacggaccccaaccaaaaggggtcattccaggtcacgcagcccccagtggaggcggtccaggtctgcgcagagatggggccgctccaggagccctcagcgcagaggccggtccaggtccccccaaagacctgggtggtctcggagcaggaatacacaacggcggggccgatcccgctctgctaggaggggtagaagccactctcggtcacctgccacgaggggccggtcaaggtctagaaccccagcccggagaggccgctccagatcccgcacacccgcacgacgccggagtagatcaagaacccctaccagaagaagatctagatccagaacacctgcccggagaggcagatcccgttctagaactcctgctagaaggaggagtcggaccagatccccagtaaggcggagaagccggtcacgctccccggctcggaggagcggcagatctaggtcacgtacccctgctaggagaggaaggtccagaagcaggactcccgcacgccgaggccgatcccggtctcggacacccgctagaagaagcgggcgaagcaggtctcgaactcctgcgcgcagaggacggagcaggtcacggaccccccgtcgcggcagatcaaggtccaggtccctcgtcaggcgtggacgcagccacagccgaacaccccagcgtagaggacgcagtggatcttctagcgaacgcaagaataaatcccgcacatctcagcgccggtccagaagtaactcttcaccagagatgaagaaatctcgtatctccagccgacgctctaggtctctgagttctccgcggtccaaggcgaagagccgtctcagtctacgcaggtcgttgtcaggctcctccccctgccctaaacaaaagagccaaacccccccccgccgctccaggtcaggctccagccagcccaaagctaagtcccggacacctccccgcaggtcacgatcttcttcctcccctccccccaaacagaagagtaagactccatcccgtcagagccactccagctcgagtccccatccgaaggtcaaatcgggcactccaccgagacaaggaagtattacttccccacaggcaaacgaacaaagcgtgaccccccagcggcgctcttgtttcgaaagtagtccggaccctgagctgaagtctcgcactccatccaggcatagttgctctggttcttcccctcctcgggttaaatcctcaactcccccccggcagtcaccaagcaggagcagtagcccacagccaaaggtgaaggccattattagccccagacagcgctctcatagtggcagttcatcaccctccccttcgagggtcactagtcgcaccaccccgcgacgaagtagatccgtctcaccttgttctaacgtggagtccagactccttccaaggtactcccacagtggctcttccagtccagataccaaggttaaacccgaaacccccccgcgacagagccacagcgggtag

SEQ ID NO: 204662 - DNA, 6036 bp, synthetic construct
  misc_feature 1..6036: note = Description of Artificial Sequence: Synthetic coding sequence
  source 1..6036: mol_type = other DNA
atgaagaagagccggatcagcagccggcggagccggagcctgagcagcccacgctctaaggcaaagtctagactgagtttgcggcgttccctctcagggtccagcccatgccccaaacaaaagtcccaaactcctcctaggagaagtcgcagcgggtcctctcaaccaaaggcaaagtcgaggaccccgccacgcagaagccgcagctcttcaagccccccgccaaagcaaaaatccaaaactccatcccgacagagccactcatcttcaagtccacatcccaaagtcaagtctggtacaccgcctaggcagggctcaattacctctccacaggccaatgagcagtccgttacgccacagcgccggtcctgctttgaaagctcccccgatcccgagctgaagagcagaaccccctctcgtcacagttgttcaggctcttcgcccccaagagtgaaatcttctacaccgccgcgacagagtcctagccggtcctcttctccccaacctaaagtcaaagcgatcatctccccacgacagcggtctcacagcgggtcgagcagcccgtcccctagtcgggtcactagtcgcaccacacctaggcggagcaggagcgtgagcccgtgttcaaatgtcgagagcaggctgctccccagatactctcactccgggtcttcaagccctgacacgaaagtgaaaccagaaacaccccctcggcagtcacacagcggaagtatatcaccctatcccaaggttaaggcgcagaccccaccaggcccctccctctccggctccaagtcaccatgcccgcaagagaagtcaaaggactcactcgtgcagtcttgtccgggctctctgagtctgtgtgcaggggtcaaatcttctaccccaccaggagagagctattttggtgtgagctcactgcaactgaaaggccagagccagacgtcaccagatcatcggagcgacaccagttcacccgaagttcggcagtcccactccgagagccctagcctgcagagcaagtcacagacctcacctaagggtggccggagtcgatcatcctctcctgtcaccgaattggcctcgaggagccccataaggcaggatcggggcgagttctccgcttccccaatgctgaaatcggggatgtctcccgagcagagcaggttccaaagtgacagctcatcgtatcctacggtggattcaaacagcctactggggcaatcccggttagaaaccgccgagtccaaggagaagatggctttgcccccacaagaggatgccacagcaagcccgcccaggcagaaggataagttctctccatttcccgtgcaagacagaccggagtcatcccttgtgtttaaagacacactgcgcaccccaccgcgagaaagatccggtgccggtagctcacccgaaactaaggaacagaattccgcgttacccactagctcccaggacgaggaactcatggaagtggtcgaaaaatcagaggaaccagccggacaaatcctttctcatctgtcctcagagctgaaggaaatgtcaacaagtaacttcgaaagctcgcccgaagtggaggaacggccagccgtatctttaacactcgaccagtcccaaagtcaggcctcccttgaagctgtggaagttccttccatggcatcatcgtggggcgggccacacttctctccagagcacaaagaattatcgaactctccgctaagggaaaattcctttgggtcccctctcgagtttcgtaattcagggcccctgggaacagaaatgaacacgggcttctcctctgaggtcaaggaggacctaaacggcccatttctgaaccagctggagacagacccctctctagatatgaaggagcagtctacaagatcgtctggacacagcagcagtgagctcagccccgatgccgttgaaaaagctggcatgtctagtaatcaaagcatctcgagcccagtccttgacgcggtcccccgcacaccaagtagggaacgctcaagtagcgcctcatcccctgaaatgaaagatggccttcccaggacgccctctcgccggagccgctcaggcagctcccccgggctcagggatggcagtggaaccccctctcgccattctctgagtggatcttcccctggcatgaaggacatcccccgcacaccatccagaggcagatcagaatgcgatagctcccccgaacccaaggctctacctcagactcccaggccccggtccaggtccccctcatcgcctgaactcaacaataagtgtcttaccccccaaagggaacggtccggctctgagagttctgttgaccaaaagaccgtggcacgcactcccctcggacagagatctcgctccggcagtagccaggagttagacgttaaaccatccgctagcccccaggagcgatcggaaagtgactcatcacccgactccaaggcaaagactagaactcccttaaggcaacgcagcaggtctggtagtagccccgaggtggattctaaaagcagactgtcgcctagacggagccgctcggggagttcccccgaggttaaggataaacctcgagcagctccccgcgcccaatctggcagcgactcaagtccagagccaaaagctcctgctcctagagcactcccacggcgatcaaggtctgggtccagctcaaaggggcgtggtccgagtcccgaaggctcatcgtcaaccgaatccagtcccgagcatcctcccaaaagccggacggctagacgggggtcccggagtagtcctgagccaaaaaccaagtcaagaactccgccgcgtcggcgctctagccggtcctccccagaactgactcgcaaggcacggctgtcaaggcgctcacgttctgcctcctcctcgcccgaaaccaggtccagaacgccccctcgccataggcgaagtccttcagtgtcctcccctgagcccgctgaaaaatcaaggtccagccgtagacgtcgatccgcctcatctcctaggacaaaaacaacaagcagacgaggccggagcccatctccaaaacctcgcgggctgcagcgatcaagatccaggagccgccgcgaaaagacaaggactaccaggagaagagatcgttctgggagctctcagtcaacttcacgcaggcgacagagatcccgttctagatctagagtcacaagaagaaggaggggaggatccggataccactcccgcagtcctgctaggcaggagagcagtaggacttcatccagacgccggcgtggcaggtctcgaaccccccctacctctaggaagcgaagtaggagtcgaacttcgcctgccccttggaaacgaagtcgaagccgcgctagcccagcaacgcaccgccgctccaggagtcggacccctctcatctccagacgccgttcacgtagtaggactagtcccgtttccaggcgccgttcaagatctcgtaccagtgtaactcggcgcaggagccgttcaagagccagccccgtgtcccgcagacgcagcagatcacggacccctcccgttactcggcgacgcagccgtagccgaacacctacaacccgccggcggagtagatctcgcacgccaccggtgacacgcagaagaagccggtcccgtacccctccagttacacgtagacgcagcaggtcgcggacaagccctataaccagacggcggtcccgtagtcgaacttccccagtgacgagacggcggtcacgtagccgaaccagccccgtgaccaggagacgatcccgctctagaacctcgcccgtcacacggagacgcagcaggtctaggacaccacccgctatacgaaggaggtcacggtcgcggacacccctgctgccgcgtaagcggtcccgatcaagatctcctcttgctatccggcgtagaagtcgctccaggacaccccgaaccgccaggggaaagcggtcacttactaggtctcccccggctatacggcggcggagtgcctccgggtcttcctctgatcgaagtcgttctgcgactccgcccgcgaccagaaatcacagtgggagcagaacccctcccgtagctctgaattcaagcaggatgtcttgctttagtaggcctagtatgtccccaacgccactggataggtgcaggagtcccggaatgttggagcctctgggctccagtagaactcctatgagtgtgcttcagcaggcaggggggagcatgatggacggtcctggcccgagaatccccgaccaccagcggacctctgtgccagagaaccacgcacagtctagaatcgctctggccctcactgcaatctctctgggcacagcacgtccacctccaagcatgtctgccgctggtctcgccgcacggatgagtcaggtcccggcgcccgtgccgctgatgagtctgcgcactgcccctgcagccaatctggcatctcggatccccgctgctagcgctgccgccatgaacctagcctcagcccgaactcctgccattccaacggccgtgaatctggccgacagcaggaccccagcggcagcggccgctatgaacctggctagtccaagaaccgctgttgccccttcagccgtcaatctcgctgatccgcgcaccccaacagccccagctgtaaatctggccggagctcggacccctgccgccctggcagccctgtccttaacgggaagtgggacgccaccaaccgccgccaactatccaagctcaagtcgaaccccgcaagcccccgctagtgccaacctggtgggcccaaggtccgctcacgccactgccccagtgaatatcgccgggagtcgaactgcagctgctctggccccagcgtctctgacttccgccagaatggcacccgcgttatcgggagcaaacctgacaagtccaagggtgcctctcagcgcatatgagcgggtgagtggccgtacgagccccccactactcgaccgagccagaagccggacaccgccctccgcccccagccaatcaaggatgacgtccgagcgggctccgagccccagctccaggatgggccaagctccctctcagagtcttctgcctccggcgcaggatcagccccgatcccccgtgccaagcgccttttccgaccagtctagatgtctgatcgctcaaaccactcctgtcgctgggtcacagagcttgagctcaggagctgttgccacaaccacctcgtctgccggtgaccacaatgggatgcttagcgtacccgccccaggcgtgccgcacagtgacgtcggtgagcccccggctagcacaggcgcccaacaacctagcgcactcgccgcattgcagccagccaaagagcggcggtcctccagcagcagcagctcaagcagttcctcttcatcctcatccagcagcagtagttcatcatcatcatcctccggctcttcttcaagcgattccgagggcagttcgctgcccgtgcagcctgaggtggccctgaaaagggttccgagccctactccagctccgaaggaggctgtccgggaggggcggccacccgaacccacccctgccaaaaggaaacgtaggtcaagttcgtcgtcctcgtccagctcaagcagctcaagttcaagttcatcttcctctagcagttcttctagcagctctagcagctcatctagcagctcatcatccagcagctcgagttcttcaagcccgtccccagctaagcctggaccacaggctctgccaaagccggcttcacctaagaaaccccccccaggagagcgcagtttgctgcccgtctctccttcaccgcgacattctttaccccatgtggctagagggacatttctgaaaaggacctcagggtatttccctccccttcataagtctttcggtactccttgcgggctacaggataaggcccctccactccgcgaatggagggtgcgtctctttaccaacggaccatgtcctccctgtgtactgctgttaccagcccctacacacgcactttgcagctctcatactcaaagattagctgtgtag

SEQ ID NO: 204663 - DNA, 1836 bp, synthetic construct
  misc_feature 1..1836: note = Description of Artificial Sequence: Synthetic coding sequence
  source 1..1836: mol_type = other DNA
atggccagcgtgcagcagggcgagaagcagctgttcgagaagttctggaggggaactttcaaggcagtggcgaccccaagaccggagtctatcatcgttgcctcaatcacagcccgaaagcctctgcctcgcaccgagccccaaaataatcctgtcgttccagctcaggacggcccgtccgaaaaactcggacagcacctggccacggagccactgggaacaaattcctgggaacgcgataaaacttgccgcgagctgggagcaacacgtggccacagtgcctctcacgataaagacctgaccccaccccctagttcacgagggaagaagaagaaaaagaagagcacccgcaagaaacgcagacggtcaagttcttattctccatctcccgttaaaaaaaagaagaagaagagtagcaagaagcataaacggagacgatccttctctaaaaaacgtaggcatagctccagcagccccaaatctaaacggagagatgagaagcgtcacaagaagcagagtcggtccaggccacggaagagccatcgccatcgtcaccatcgctgtccttctcgtagccagtcaagcgagagtaggccctctagctgtgagtcccgccacagagggcgttcacctgaagaggggcagaagagcaggcgccgccattcacgacgttgcagcaaaacattatgcaaggattcacccgaggcgcagagctcaaggcccccatcacagccccttcaaatgctggggtacctctccgccaggggcgttattaccgggtctggctccgcagcagacctgttcactaagaccgccagccctctgactacctctaggggccggtcccaggagtacgatagtggaaacgatacaagcagccctcccagtactcagacatcttctgcccgctcgcgaggccaggaaaagggctctcccagtggtgggctgagcaagagtcgagaactgaatagtggcaacaccagcgactcaggcaattcgtttacaacgtcatccccacagaacaagggagccatgcttgaaaacttgtcacctacttcccgaggcagagaatctagagggttccagagcccgtgtctggaatgtgcagaagtgaagaagtcatcactcgtgccgtcaactgccagatcctccccgatgaaagggtgcagcagatcttcttcctatgcctctacgcgctctagtagtcatagctcccgatcccctaatccccgagcatccccccggtacacccagtccagaagcactagctccgaaaagaggagctacagccgcagtccatcctactcaagtaaaagcggtaagcgcagccccccgtcaagatcaagtcgcagtagacgcagcccatcctacagccggtactccccctctcgggagagggaccctaagtacagcgagaaggactctcagcagcgtgaaagagagcgtgcacggaggcggagaagatcttactcgccaatgcggaagaggcggcgtgactctccatctcacctggaagcacggcgaattacatcagcccgaaagcgccccatcccatattaccgacctagtcctagttctagcggctccctctcttcaacatccagttggtattccagttcttccagtagaagcgcctctcgcagctactctagaagccgatccaggtctaggagtaggcggaggtcccggactagaacttcatccagcagcagcagccgatctcctagcccagggtcaagatcaaggtcgaggtcccgctctcggagccgcagccgtagccgcagtcaaagtcgatcctattcgagcgcagatagctattcgtcaacccgcagatag

SEQ ID NO: 204664 - DNA, 747 bp, synthetic construct
  misc_feature 1..747: note = Description of Artificial Sequence: Synthetic coding sequence
  source 1..747: mol_type = other DNA
atgagcggcggcggcgtgatccggggccccgccggcaacaacgactgtaggatttacgtgggaaatcttccaccggacatccgcactaaggacatagaagatgtattctataaatacggggccattagagacatagacttgaagaacaggcgcggcggtcctcctttcgcctttgtggaattcgaagacccccgcgacgctgaagacgctgtgtacgggcgagatggatacgattacgacggatacagactgcgcgtggagttccctcgctccgggcgcggtaccggcagaggtggcgggggtggcggagggggaggggcgcctcgcggcagatatggacccccctcacgacggagtgagaatcgggtcgttgtcagcgggctaccaccttccggcagttggcaggacctaaaggaccacatgagagaggcgggggacgtctgttacgccgacgtgtatagagacggtaccggcgtggtcgagttcgtgaggaaggaggatatgacctacgctgtcaggaagctcgacaacacaaaattccgctcacacgaaggcgaaaccgcttacataagggtcaaggtcgacggtcctagatcaccttcttacggtagatccagaagcaggagtaggtcacggtccaggtcaagaagtagatccaattctagatcgagatcctactcaccaagacgatctcgaggctctccgaggtattctccaaggcacagcagatcaagaagccgcacatag

SEQ ID NO: 204665 - DNA, 606 bp, synthetic construct
  misc_feature 1..606: note = Description of Artificial Sequence: Synthetic coding sequence
  source 1..606: mol_type = other DNA
atgagcggcggcggcgtgatccggggccccgccggcaacaacgactgccgcatttacgtcggcaatctccctccagacatccgcaccaaggacatcgaagacgttttctataaatatggagcgattagggatatagacttaaaaaatagacggggtggtcccccttttgcgtttgtggagtttgaggaccctcgggatgctgaggacgcggtgtacgggagagacggctatgactacgacgggtatcggctgagggtggaattcccaaggtcgggccgagggactgggaggggcggcggcggcggcgggggaggcggcgcgcctcgcggacgctatggccccccttctcgccggtctgagaatcgtgtcgtcgtcagtggactgccccccagcggaagctggcaagacctgaaggaccacatgcgcgaggcgggagacgtgtgctacgcagacgtttacagggatgggaccggcgtggtcgagtttgtccgaaaagaagacatgacttacgcagtaaggaagctggataataccaaatttcgctcgcacgaggtgggttacacccggattctattcttcgaccagaattggatccagtggagctag

SEQ ID NO: 204666 - DNA, 786 bp, synthetic construct
  misc_feature 1..786: note = Description of Artificial Sequence: Synthetic coding sequence
  source 1..786: mol_type = other DNA
atgagccggtacctgcggccccccaacaccagcctgttcgtgcggaacgtggcggacgacactcgttcagaagatctccgccgagaatttggcaggtatgggcctatcgtagacgtttacgttccactcgacttctacacacgacgccctcgggggttcgcatatgtccaatttgaggatgttcgtgacgccgaagacgctcttcacaacctagatagaaaatggatctgtggcaggcagattgagatccagtttgcccagggtgatcggaaaaccccaaatcagatgaaggctaaagagggccggaacgtgtactcaagtagcaggtacgacgattatgacaggtaccgccggtctcgcagccggagctatgagagacgtagatctcgcagccggtctttcgactacaattaccgaagatcctattcacctagaaatcggcctaccggccgtccccgcagatcccgcagtcattctgacaatgaccgctttaagcacaggaaccgtagtttcagtcgttccaagagcaacagcaggtctagaagtaagagccaacccaaaaaggagatgaaggccaaatccagaagccggtctgctagtcataccaaaaccagaggcactagcaagaccgactccaaaacacattataaatctggatcccgctatgagaaggagtcccgtaagaaggaaccaccgcgatctaagtctcagagtaggtcccagtctcgctcaagatccaagtcccggtcacgctcttggacgtctccgaaaagtagcggacattag

SEQ ID NO: 204667 - DNA, 552 bp, synthetic construct
  misc_feature 1..552: note = Description of Artificial Sequence: Synthetic coding sequence
  source 1..552: mol_type = other DNA
atgagccggtacctgcggccccccaacaccagcctgttcgtgcggaatgtggctgatgatacgcgcagtgaggatctgaggagagaatttggcagatacgggccaatagtagacgtgtacgttccactagatttttacactcgtcggcctcgggggtttgcatatgtgcaatttgaggatgtgcgtgacgcagaggatgcactacataatctcgaccggaagtggatctgcggccgacaaatagagatccaatttgctcagggcgatcggaagacaccaaatcagatgaaagccaaggagggaaggaatgtctatagttcctccaggtacgacgactacgaccgatatcggcgtagccgtagccgctcctacgaacgtcgccgatctcgctcccgctcatttgactataattatcgacgaagctacagcccacgaaattcgcgccctaccggtcggccacgcagatctagatcacattctgataacgatcgtccaaattgctcatggaacacacagtattcctctgcctactacacctctagaaagatctag

SEQ ID NO: 204668 - DNA, 522 bp, synthetic construct
  misc_feature 1..522: note = Description of Artificial Sequence: Synthetic coding sequence
  source 1..522: mol_type = other DNA
atgagccggtacctgcggccccccaacaccagcctgttcgtgcggaacgtcgccgatgacacccgttcagaggatctcagaagagaatttggacggtatggtccaatcgttgacgtatacgttccactggacttttatactagacgacctaggggattcgcctatgtgcagttcgaagacgtaagagacgctgaggacgccttgcataatcttgacaggaagtggatatgcggacgccagatagagatccaattcgcacagggtgacagaaagaccccaaaccagatgaaagctaaggagggtagaaacgtttacagcagcagtcgatacgatgactacgaccgatatcgcaggagccgttcccgctcctacgagagaaggcgctcaagatcccgctccttcgactacaattacagacgcagctattctcccaggaactcccgcccaacgggacggccccgcaggagcaggtctcattccgataacgattcacaggtaagcaagaagaagaacgaacggtag

SEQ ID NO: 204669 - DNA, 519 bp, synthetic construct
  misc_feature 1..519: note = Description of Artificial Sequence: Synthetic coding sequence
  source 1..519: mol_type = other DNA
atgagccggtacctgcggccccccaacaccagcctgttcgtgcggaatgtggcggatgacaccaggagcgaagacctgaggagggaatttggacgctatgggccaatcgtggatgtgtacgtgccactcgatttctacacaagacgccccagaggctttgcctatgtgcaattcgaggacgtgcgggatgcagaggatgctctgcacaacttggacagaaagtggatctgtgggagacaaatagagatccagtttgcccagggggatcgaaaaacacctaaccagatgaaggctaaggaagggcgtaacgtttactcgagtagccgctatgacgattatgatcgctaccgtcgctcgaggtccagaagctatgagcgcagacgaagccgctccagatctttcgattataattatagacgcagctatagcccgcgaaacagaccaacgggacgacctaggcggtctcggtcacacagtgataatgattctcaggtgtctaaaaaaaagaacgagagatag

SEQ ID NO: 204670 - DNA, 498 bp, synthetic construct
  misc_feature 1..498: note = Description of Artificial Sequence: Synthetic coding sequence
  source 1..498: mol_type = other DNA
atgagccggtacctgcggccccccaacaccagcctgttcgtgcggaatgtggccgacgacacaaggagtgaggacttgcggagagagtttggccggtacgggcctatcgtagacgtttatgtacctcttgacttttacactaggaggccacgagggttcgcctatgttcaatttgaggacgtcagggatgcagaagacgcattgcacaatttggacaggaaatggatatgcggccgccaaatcgaaattcagtttgcccagggcgaccgcaaaacgcctaaccagatgaaagccaaagagggccgtaacgtttactcatcctctcgctatgatgattatgacagataccgtaggtcccggtcaagaagctatgaaagaagacgctcccggtcccgcagctttgattataattatcggaggtcatacagccctagaaaacctaattgcagctggaatacacagtacagcagtgcctattacactagtagaaagatttag

SEQ ID NO: 204671 - DNA, 549 bp, synthetic construct
  misc_feature 1..549: note = Description of Artificial Sequence: Synthetic coding sequence
  source 1..549: mol_type = other DNA
atgagccggtacctgcggccccccaacaccagcctgttcgtgcggaacgtcgcggatgacaccaggagcgaggatctaagacgggagtttggacggtacgggcctattgtcgatgtctatgttccactcgacttctacacccgcaggccccgcgggttcgcctacgtgcagttcgaggacgtgcgagatgcagaggacgccttgcataatctggatcgaaaatggatctgtggacggcaaatcgaaatacagttcgcccaaggcgacagaaagaccccaaatcaaatgaaagcaaaagagggacgcaacgtgtacagctcttcacgttatgatgattacgaccgatataggaggtcgagatcaaggtcatatgagaggaggcgcagcaggtccagatctttcgactataactatcggcgctcatattcaccaagaaatcgccccactggacgtccaaggagaagccgatcccatagcgacaacgatagaccgaactgttcttggaacactcagtactcttcggcctattatacgagccggaagatatag

SEQ ID NO: 204672 - DNA, 789 bp, synthetic construct
  misc_feature 1..789: note = Description of Artificial Sequence: Synthetic coding sequence
  source 1..789: mol_type = other DNA
atgagccggtacctgcggccccccaacaccagcctgttcgtgcggaacgtggcggacgacacaaggtccgaggacctgagacgtgaattcgggcgttacggacccatagtggatgtctacgtgcctttggatttctacaccaggcgcccaagagggtttgcctacgttcagtttgaagatgtacgggatgctgaggacgccctacacaatctagataggaagtggatttgcggaagacagatagagatccaattcgctcagggagatcgcaagactcctaaccagatgaaagccaaggagggaaggaatgtgtactccagctcccgctatgacgactacgatagatacaggcgcagcaggagtagaagctatgagcgtcgcaggagtaggtcacgcagttttgattacaactacaggagatcatactcacctaggaacagccgaccgacaggccggcctagacgctcaagatcccatagtgataacgaccgattcaagcacaggaacagatccttctccaggtcgaaatctaactcaagatcgagatctaaatctcagcccaagaaggaaatgaaagcaaagagtcgatctcgaagcgcctcccacacgaaaacccgcggaacgagtaagaccgacagtaagacgcactacaagtcgggcagtagatatgagaaggagagccgaaaaaaagagccgcctcggtccaagtcccagagcaggtcacaatcccgatcaagatccaaaagtcggagcagatcttggacatcgccaaaaagtagcgggcattag

SEQ ID NO: 204673 - DNA, 1275 bp, synthetic construct
  misc_feature 1..1275: note = Description of Artificial Sequence: Synthetic coding sequence
  source 1..1275: mol_type = other DNA
atgatcaacaaccaccggaaccaggccctgtacttcagcgagcacaagtattttcagcagactcaggtggtttatcagggcgacatcttctgggtattcctttgcgtcttttgcctccggaaggagtgcgtcctcatgcaagggtgcttctcagccggcgttatccccgacgaggctaaagctttgagtctgttggcccctgcaaacgcggtggcagggctgctgccaggcggaggtctcctgccgacccccaacccactcactcagataggtgccgttcccctggcagctctaggagcccctactctggatcctgctctggccgccctggggctgcccggagcaaatcttaatagccagtctcttgccgctgaccagttgctcaaattgatgtctaccgtggacccgaagcttaaccatgttgcagccggcctcgtgtcccccagcttgaaatcagatacctcctctaaggaaatcgaggaggctatgaaaagggtaagggaggcccagagcctgatcagcgccgcaattgagccggataaaaaagaggaaaagagacgccactcaaggtctagaagccgcagcaggcgccggaggaccccaagcagctccagacacagaaggtccagaagccggagccggcgacggagccacagcaagagccggtccagacggcggtctaaatccccgcggcggagaagatcacacagccgcgagaggggtagaagaagccgctcaaccagcaagacccgagacaaaaaaaaggaagataaagaaaaaaagaggtcaaagaccccacctaagtcatattcgaccgcgcgcagatctcgtagcgccagtagagaacgacggcggagacggagtcgctctggcacccgctcccctaagaagccccgctcgccgaagcgcaagctaagccggagcccatccccccgccggcataagaaggagaaaaaaaaagacaaagacaaggaacggtctcgcgacgaaagggaacggagcacctctaagaagaagaaatcaaaagacaaagagaaggaccgcgagcggaagtctgaatcagacaaagatgtgaagcaggttaccagggactatgacgaggaggagcaaggatacgatagtgagaaagagaagaaggaagaaaagaagccaatcgagaccggatcccccaagacaaaggaatgcagcgtcgagaaaggcaccggcgactcccttcgggaaagtaaggtgaatggggacgaccatcatgaagaagacatggatatgtctgactag

SEQ ID NO: 204674 - DNA, 1455 bp, synthetic construct
  misc_feature 1..1455: note = Description of Artificial Sequence: Synthetic coding sequence
  source 1..1455: mol_type = other DNA
atgagcaacaccaccgtggtgcccagcaccgccggccccggcccctcaggcggccccggcgggggcggtggcggaggtggtggtgggggcggcaccgaggttatccaagttaccaacgtcagtccgtccgcctcctcagagcagatgcgcaccttattcggatttcttggtaaaattgatgaactgagactgttcccaccagatgatagtccactgcccgtctcctccagggtgtgtttcgttaagtttcatgacccagattctgccgtggtggctcagcaccttaccaacaccgtcttcgtggaccgggccctcatcgtggtgccttacgccgagggggttatcccagatgaggccaaggccctctcactgctggccccagctaatgcagttgctggactgctgccaggcggaggtctgctcccgaccccaaatcctctgactcagattggggccgtacccctggctgctcttggagcgcctacgcttgacccagcattagccgcactcggattacccggcgctaacctcaattcccagtctttggctgcagaccagcttctgaaattgatgtcaaccgttgatcctaaactcaaccacgtggccgccgggctggtgtcacccagccttaaatccgatacaagctccaaggaaatcgaagaggccatgaagagggtgagagaggcccagagcttgatctctgctgccatcgaacctgacaagaaggaagaaaagcgccggcacagccggtctagatctagatctcgcagacgaagaacgcctagttctagtaggcaccgacggtcccgttctcggtctcgtagacgttctcacagcaagtctagaagccgaaggcgtagtaagtcccccaggagaagacgttctcacagtcgggagagaggacggcgtagcaggagcacatccaagactcgggacaagaagaaagaagacaaggagaagaagaggtccaagacaccccccaaatcctacagcacagcacgccgctcaagaagcgcttcacgcgagaggaggaggcgccggagtcgatctggtacaaggtcacctaagaaacctagaagccccaaacgcaaactgagccggagtccatctccgagacggcacaagaaggagaagaagaaggataaggataaagagcgcagccgcgacgagcgggaacgaagtacctcgaaaaaaaagaagagcaaagataaagaaaaggatcgggagcgaaaatccgagagcgacaaggacgtcaagcaggtgacccgggattatgatgaggaggagcagggctacgattccgaaaaagaaaagaaggaggaaaaaaagcccattgagacaggatcccctaagactaaggaatgttccgtcgagaaggggacgggcgattcattgagggaaagcaaagtcaacggcgatgatcaccatgaggaagatatggatatgagcgactag

SEQ ID NO: 204675 - DNA, 1452 bp, synthetic construct
  misc_feature 1..1452: note = Description of Artificial Sequence: Synthetic coding sequence
  source 1..1452: mol_type = other DNA
atgagcaacaccaccgtggtgcccagcaccgccggccccggccccagcggaggacctggtggaggaggaggaggcggcgggggcgggggggggaccgaagttatccaggtcaccaatgtgagtccctccgcatcctcggaacagatgaggacgctctttgggttccttggtaaaattgacgagctcaggctgtttcctcctgacgactccccactgcctgtttccagccgcgtttgtttcgtaaagttccacgatcccgacagtgctgttgtagcccagcatctgacgaacacagtgttcgttgaccgtgctcttatcgtggtgccttatgcggagggtgtcatacccgacgaggcaaaagccctgagtttgttggccccggcaaacgcagtggccggactgttgcccgggggaggactactcccgacgcctaatcccctgacgcaaattggcgctgtccctttggctgccctcggggcccccacccttgatccggcattggccgcactgggcttgcccggagcaaacttgaatagccaaagcctggcagcagaccagctgctcaaactcatgtctaccgtcgaccccaagctcaaccacgtggctgcaggcctcgttagtcccagtctcaaatcagacacaagtagcaaagagattgaggaggccatgaaacgtgttcgagaagcccaaagcctcatcagcgccgcgatagaaccggacaaaaaggaggagaaaaggcgtcattccagatctcgcagccggagtagacgtagaaggaccccatcatcatccaggcatcgccgatcgcggtcgagaagccggcggcgaagccattcgaaatctagaagtaggcgcaggtccaagtctccccgtaggcgccgtagtcattcacgcgagaggggacgacggtcccgtagcacttccaagactcgtgacaaaaagaaggaagataaggagaagaaaaggtctaaaacccctcccaagtcatactctacagccaggcgtagccgctcggcgagtagagagcgcaggcgccgacgctccaggtctgggaccaggtccccaaaaaagcctcgttctcccaagcgtaagctcagcagatccccgtctccccggcgacataaaaaagagaaaaagaaggacaaggacaaagagagatccagagacgagcgcgagagatctacaagtaagaagaagaaatctaaagacaaagagaaggacagagaaagaaagtctgagtctgacaaggatgttaaagtgacacgggattatgacgaggaagagcaggggtatgactcagagaaggaaaaaaaggaggaaaagaagccgattgagacagggagcccaaagaccaaggagtgtagcgtagagaaaggaactggagactcactcagggagagtaaggtaaacggcgacgaccatcacgaggaggacatggatatgtcagattag

SEQ ID NO: 204676 - DNA, 1170 bp, synthetic construct
  misc_feature 1..1170: note = Description of Artificial Sequence: Synthetic coding sequence
  source 1..1170: mol_type = other DNA
atgagcaacaccaccgtggtgcccagcaccgccggccccggcccctcaggcggccctggaggaggtggaggcggcggaggcggcggcggcggcactgaagtgatacaggtgactaatgtctccccaagtgcatcctccgagcagatgcgcaccctgttcggattcctcgggaaaattgatgagcttcgtctgtttcctcccgacgactcccccttgccagtgagctcaagggtttgcttcgtcaagtttcacgaccctgactccgctgtggtcgcacaacacctgacaaacactgtcttcgtagaccgcgctttaatcgtcgtcccttatgccgagggcgtgattcctgatgaggcaaaagcactgagcctgctcgctccagccaatgccgttgctggactacttcctggtggagggttactcccaacccctaacccgctcacgcagattggggctgttccccttgctgcccttggagcccccacactggatccagcactcgcagccttaggacttcccggagctaatcttaactctcaatctctcgcagcagatcaactactaaaactgatgtcaacggtggaccctaagcttaaccatgtagcagcagggctggtgtccccctcgctcaaatctgacacctctagtaaggagattgaagaagcaatgaaacgagtccgggaagcccaatcactcatctctgccgcaatcgaacccgataaaaaagaagagaaaagacggcatagcaggagccggtcacgcagcagacggcgaaggactccttcttcgagtaggcacagacgctcccgctccaggtctcgccgtcggtcccacagcaagtcgcgatcacgacgccgttccaagagtccaaggcggcgcagatcacatagtagggaacggggccgtcggtcacgttcaacaagcaagacacgagataaaaagaaggaagacaaggagaagaaacgcagcaaaacgccacctaagtcctactcaaccgctaggcgctcacgcagcgcaagcagcttacatatttgtgatagcagggagcgcaggaggcgaaggtcccggtctgggactcggtcaccaaagaagccacgcagcccaaaaaggaagctgtcccgaagtccttctccaaggagacacaaaaaagaaaaaaagaaggataaatag

SEQ ID NO: 204677 - DNA, 1455 bp, synthetic construct
  misc_feature 1..1455: note = Description of Artificial Sequence: Synthetic coding sequence
  source 1..1455: mol_type = other DNA
atgagcaacaccaccgtggtgcccagcaccgccggccccggcccctcaggtggtcccggagggggcggaggcggcggtggaggaggaggcggaacggaagttattcaggtgaccaatgtgtctccctctgcatcatccgagcagatgcgcacgctcttcggctttctgggaaagatcgacgagctccgactgtttcccccagatgatagtccgctgcccgtgagttcgcgggtgtgttttgtcaagttccatgaccccgattcagccgtcgtagcccagcaccttactaacactgtctttgtcgatcgggctctgatcgtggttccttacgccgagggtgttattcccgatgaagcgaaagccttgagtctgctcgcgcctgccaacgctgtagctggcctgttgcctgggggtgggctgctgcccactccaaacccattgacgcagattggagctgtgccactggccgccctgggcgcccctacgttggatcctgctctggcggctctgggactgcccggagcaaatttgaattctcagagtttggcagccgaccaattgctgaagcttatgagtaccgtggaccctaagctgaatcatgtcgctgctggactagtctcgccatcccttaagagcgacacatccagcaaagagatcgaggaggccatgaagcgcgtgcgagaggcacagtccctcatttctgcggcaattgagcccgacaaaaaggaggagaaaaggagacacagccgctcacgctctcggtcccgtcggcgccgaactccgtccagcagcagacaccggcgcagtcgatcccgctccagacgcagaagccatagtaaaagtagatcgcgcaggagaagcaaaagtcccagacggcggcgttcccatagtcgagagcggggcaggcggagccgatcaacatctaaaactcgggacaaaaaaaaggaggataaggagaaaaaaaggtccaagacgccccccaaatcatacagcacagccaggcggtcccgctccgcctcgagagagagacgtcgccgtcgctcaagaagtggcacaagaagccccaagaaaccacgcagtcccaaaagaaaactttctcgatcaccctccccacgccgacacaaaaaggaaaaaaaaaaggataaggacaaagagcggagcagagatgagcgggaaagatccacgtccaagaagaagaagtcaaaggacaaggaaaaagacagagaacgcaagtctgagtcagacaaggatgtgaagcaggtcactcgggattatgacgaggaagagcagggatatgactcagagaaggagaagaaggaggaaaagaaaccaattgaaaccggttccccgaaaactaaggagtgctctgtagaaaaagggactggagacagcctccgtgagtcaaaagtgaatggcgacgaccaccacgaagaggacatggatatgtccgactag

SEQ ID NO: 204678 - DNA, 387 bp, synthetic construct
  misc_feature 1..387: note = Description of Artificial Sequence: Synthetic coding sequence
  source 1..387: mol_type = other DNA
atgagcaacaccaccgtggtgcccagcaccgccggccccggcccctccggcggcccaggcgggggcggaggaggtggcggaggcgggggcggcacagaggtgattcaagttaccaacgtgtcaccttctgcctccagcgagcaaatgcggacgctctttggatttctgggaaaaatcgatgagctcagactatttccgccagacgactcccccctcccagtcagctctagagtttgcttcgtcaaatttcacgaccccgactccgctgtggttgctcagcatttaactaatacggtattcgtcgaccgggcactgattgtcgtgccctatgccgaggtaaagcagccaacacgcgtcgtagtgcacaagaccgcctttgagtcctag

SEQ ID NO: 204679 - DNA, 396 bp, synthetic construct
  misc_feature 1..396: note = Description of Artificial Sequence: Synthetic coding sequence
  source 1..396: mol_type = other DNA
atgagcaacaccaccgtggtgcccagcaccgccggccccggcccctctggcggaccaggagggggcggcggaggggggggcggcggcggcggcaccgaggtgatccaagtgacgaatgtctcccctagcgctagctcagagcaaatgcggaccttgttcggtttcctcggaaaaattgacgaattacgactttttccgcccgatgattctcctctgcccgtcagctccagagtctgctttgtaaaatttcacgatccggacagcgcagtggtcgcccaacacctgacaaacaccgtgttcgtggatagggcccttatcgtggtgccctacgctgaggtctttcacggaagtattaaggctgcagttaagaaaatactgcttacgcacgagaactag

SEQ ID NO: 204680 - DNA, 630 bp, synthetic construct
  misc_feature 1..630: note = Description of Artificial Sequence: Synthetic coding sequence
  source 1..630: mol_type = other DNA
atgaccagcctgaaggtggacaacctgacctaccggaccagccccgacaccttgcgcagggtgtttgaaaaatacgggcgagttggcgatgtgtacatcccgcgcgaccggtacactaaagaatctcgggggtttgccttcgtgaggttccacgacaagcgcgatgctgaggacgccatggacgccatggatggggctgtgctagatggaagggaacttcgtgtgcagatggctcggtacgggcgcccgcccgatagccaccactcccgaagaggcccaccaccacgccgatacggaggaggcggctatgggcggcggagcagaagcccgcgccggcggcggcgatcaaggagccggagccgtagccgtagtaggagcaggtcaagaagtaggtactccaggtcgaaaagccggtcaaggacaaggtcacgttctagatcaacaagcaagagcaggtccgctagaaggagcaagtccaaatcctcgtccgtgagtcgctcccgcagccgttctagatctcgatctaggtctaggagcccacctccggtgtcaaaaagagagtccaagtcccgctctagaagcaaaagccctccgaagtctcccgaagaagaaggggccgtgtcatcctag

SEQ ID NO: 204681 - DNA, 606 bp, synthetic construct
  misc_feature 1..606: note = Description of Artificial Sequence: Synthetic coding sequence
  source 1..606: mol_type = other DNA
atgagctacggccggcccccccccgacgtggagggcatgaccagcctgaaagtcgataacctgacctacaggacttcacctgacacattaaggcgggtcttcgagaagtacggcagagtcggcgacgtttatattcctagagatcgatacaccaaagagagcagaggatttgcttttgtgaggtttcatgataagcgggacgccgaggatgctatggatgcaatggatggtgccgtgctcgacggcagagagctaagggttcagatggcccgctgcgggggctacggccgccgcagccgaagcccgcgacggcgcaggcgttccagaagcagatcgcgaagtcggagccggagtcgttcccggagccggtattcccgttctaaatcccgttctcgcacgaggtccagaagcaggtcaacatcaaaatcgaggagcgccaggcggagcaagtccaagagcagctctgtttcgcgctcccgctcacggtcccgtagtagaagccgcagccgttctcccccccccgtttctaaacgcgagagcaagagtaggtcaaggtcgaaaagcccaccaaagtccccagaggaggagggggccgtatcttcctag

SEQ ID NO: 204682 - DNA, 666 bp, synthetic construct
  misc_feature 1..666: note = Description of Artificial Sequence: Synthetic coding sequence
  source 1..666: mol_type = other DNA
atgagctacggccggcccccccccgacgtggagggcatgaccagcctgaaggtggacaacttaacttaccggacgagtcctgatacccttcgaagagtttttgagaagtacggccgcgtaggagatgtgtacatccctcgcgacaggtacaccaaagaatccaggggctttgccttcgttcgatttcacgacaagcgcgacgccgaggatgccatggacgctatggatggcgctgtgctggatgggcgcgaactgagggtgcagatggcgaggtatgggcgccctcctgacagccaccacagtcgtagggggccccccccccggagatacgggggcggaggctacgggaggcggtccagaagcccaaggaggaggcggagatcaagaagcagaagccgatctaggtcgagatctagatcacggagccgctattctcggagtaagtcgagatcacgaacgcgatctcggtcacggtccacatcaaaaagccgcagcgcgcgccggagcaagtcgaagagctcctcagtatctagaagtcggtctcgttctcgttctcgaagcaggagcaggagccccccgcccgtctctaagagagagagcaagtcccggagcagatccaagtctcctccgaagagccctgaagaggaaggtgcggtgagctcctag

SEQ ID NO: 204683 - DNA, 540 bp, synthetic construct
  misc_feature 1..540: note = Description of Artificial Sequence: Synthetic coding sequence
  source 1..540: mol_type = other DNA
atgagctacggccggcccccccccgacgtggagggcatgaccagcctcaaagtggataacctcacctacaggaccagcccagacaccctgaggagagtgtttgagaagtacggcagggtcggcgatgtctatatacctcgcgaccggtacactaaggaatctagggggttcgccttcgtgcggttccatgataagagggatgcagaagatgcaatggacgcaatggacggggccgacccaggggttggggtggttcctggactggcagccgatctggccaccgccgccagatcccttggtcctgctctggtgttagatctggggcgacccccctcacccgacccacatgagggaccaagtccctcaccccggcggtcaccagatctggtccgcggtcccgggcccgggctgggcccaggggtgctccctcagtgcccgcgcgggaatcccaatcctggccgagatagacgggtcccaccttccctcctgaaaagaaaagaacggtgccccctcaagaaaatgcttaggagcccagtgtag

SEQ ID NO: 204684 - DNA, 669 bp, synthetic construct
  misc_feature 1..669: note = Description of Artificial Sequence: Synthetic coding sequence
  source 1..669: mol_type = other DNA
cccgagcggcggggcgtggcccccccccgggccgaggaggccggcgcgtctagcaggggcagcggcccccccctccgagccatgagctacgggcggcctccacctgacgtcgagggaatgacatcactcaaggtcgataatctcacctatcggacatcacctgataccctgaggcgtgtcttcgaaaaatacggcagggtgggcgacgtatacatacctagagatagatacaccaaggaatcacgcggattcgcctttgtgcgattccatgataaaagagacgcagaagacgcaatggacgccatggatggtgcggtgctcgacggcagggaactgcgagtccagatggctaggtatggtcgccccccagactcccaccactccagaaggggcccaccccctcggcgctacggaggtggcggatatggaaggcgcagccggtctccacgtcgtcgccgccggagtaggagtcgatcaagaagcaggtcgcgttcccgctccagaagtagatacagccgcagtaaatctcgcagtaggacacggagtcgcagcaggtccacctcaaagagtaggagcgctcgtaggagcaaatctaagtcctcaagtgtcagcagatctagaagtaggagccgcagccgctccagaagtcggtctcccccgccagtatag

SEQ ID NO: 204685 - DNA, 375 bp, synthetic construct
  misc_feature 1..375: note = Description of Artificial Sequence: Synthetic coding sequence
  source 1..375: mol_type = other DNA
atgcaccgggacagctgccccctggactgcaaggtgtacgtgggcaacctggggaataatggcaacaagactgagttggagagagcctttggatactatggccccctgcggtctgtttgggtagccagaaatccccctggattcgcctttgtagagtttgaggaccccagagacgcagccgacgcagtcagggaactggatggccgcacactgtgcggatgccgggtgagagttgagctctcaaacggagaaaagcgaagtcgcaaccgcggcccccctccatcttgggggaggaggccaagagacgattatagaagacgctccccacccccaaggaggagggttacgatcatgagtctactgacgacactctag

SEQ ID NO: 204686 - DNA, 495 bp, synthetic construct
  misc_feature 1..495: note = Description of Artificial Sequence: Synthetic coding sequence
  source 1..495: mol_type = other DNA
atgcaccgggacagctgccccctggactgcaaggtgtacgtgggcaatctgggaaacaacggaaataagactgagcttgagcgggctttcggttattacggtccccttagatccgtttgggtcgcgcgtaacccacccggattcgccttcgtggagttcgaagatcctcgggatgccgccgatgccgtgcgggagctggacggacggacactgtgtgggtgccgcgtccgcgtggaactgtctaacggagagaaacggagtcgaaatagggggcccccaccatcctgggggaggcgccctcgggatgactaccgtcgtcgttctccgccccccaggagacggagcccccgccgcaggtcattttccagaagtagatcacggtccttgtctcgagaccggcgccgtgagaggagcctctctagggaacgcaaccacaagccaagtaggtctttctcacgcagccggtccaggtccaggtccaatgaacgcaagtag

SEQ ID NO: 204687 - DNA, 1485 bp, synthetic construct
  misc_feature 1..1485: note = Description of Artificial Sequence: Synthetic coding sequence
  source 1..1485: mol_type = other DNA
atgccccgggtgtacatcggccggctgagctaccaggcccgggagcgggatgttgagcggttcttcaagggttacggcaaaatcctcgaagtggatctgaagaatggatatggattcgtggagtttgatgatctccgagatgcagatgatgcggtgtacgaactgaacggcaaggatctctgcggcgagcgcgtgattgtcgaacatgcacgtgggcccaggcgggatggatcttatggatcagggagatcgggctacggctatagaaggagcggtcgtgacaagtacggaccaccgactcggacagaatatagactgattgtcgagaacctgtccagtcgctgttcgtggcaggatctaaaagactatatgaggcaggctggcgaggttacatacgctgatgcacataaaggccggaaaaatgagggagtgatagaattcgtgagttactccgacatgaaaagagcactggaaaagctagatggcactgaggtcaatggaaggaagatccgactagtagaggataaaccgggctctaggcgtaggcgatcatacagtaggagccggtctcactctcgcagtagaagcagaagcaggcacagccgtaaaagccgttcgcgctcaggctccagcaaatccagccacagtaagtccaggtctcgttcacgaagcgggtctaggagcaggtcaaagtcaaggtcacggtctcaaagtaggagtagaagcaagaaagaaaagagtaggtctccatcaaaagagaagtcaaggagtcggagccactcagcggggaagagccgctccaaaagcaaggaccaggccgaagagaaaattcaaaataacgacaacgtgggaaaaccgaaaagtaggtctcccagccgccacaaatctaagtctaagtctcggtcccggtcccaggagagacgcgtggaggaagagaagcgggggtcagttagccggggcagatctcaggagaagtccttgaggcagagcaggagtaggtccagaagcaaaggtggctctcggagcaggtcccgttcccgcagcaagtccaaggacaaaaggaagggaaggaaaagatcccgcgaagaatccaggtcccgatctcgctcccgctccaagagcgagaggtctaggaagagggggagtaagcgcgattctaaagccgggagcagcaagaagaagaaaaaggaagacaccgaccgatcccaaagcagaagtccatctaggagcgtgagtaaggagagagagcatgcaaagtccgagtctagtcagcgcgaggggaggggcgaatctgagaacgcagggacaaaccaggagactagatcacgctcgcgtagtaacagcaagtcgaagcctaacttgccttccgagtccagaagccggagtaaatcagcgtctaaaacacggagtcgctccaagtcccgaagccgctcagcctctagaagccctagtcggagtcgctcacggagccactcaagatcctag

SEQ ID NO: 204688 - DNA, 1221 bp, synthetic construct
  misc_feature 1..1221: note = Description of Artificial Sequence: Synthetic coding sequence
  source 1..1221: mol_type = other DNA
atgccccgggtgtacatcggccggctgagctaccaggcccgggagcgtgacgtagaaagattttttaaaggctacggcaaaatcttagaagtggatctgaaaaacggatacggcttcgtggagttcgacgacctaagggacgcagacgacgctgtctacgaactgaatggcaaggatttgtgtggggaaagggtgatcgtagagcatgctcgtggccctcgcagggatggcagctacggctctggacgctccgggtatgggtaccgcagatcagggcgggataagtatggaccacccacccggaccgaatatcgccttatagtagaaaatttatcctctcgctgctcttggcaggacctgaaggactacatgcgacaagcaggtgaggtgacttacgccgacgcccataaggggagaaagaatgaaggtgtgattgagttcgtttcatattcagatatgaaaagagccctggagaagctggatgggaccgaggttaacggacgtaaaataaggttggtcgaagacaagccaggatccagaagaaggcgcagttattcccgttcaagatctcatagtcgaagccgatcccggtcccgccattctcgtaagtccaggtctcggtcaggctcttccaagtccagccactcaaaatcacgcagtaggtccagatctggctctcgtagtcgcagcaaatctcggagcagaagccagtcacggtccagatccaaaaaagagaaaagcagatcgccaagcaaggaaaaaagtcgtagcagatcacactctgcggggaaatcccgatctaaatccaaggatcaggccgaggagaagatccagaacaatgacaacgtcggaaaacctaagtcacgctcgccttctcgacataaaagcaaaagtaaatcaaggagccggagccaggagagaagagtagaagaggagaaacgtggttccgttagtcgggggcgctctcaggagaagtctcttcggcagtccagaagccggagcaggagtaagggcggatcaagatcaaggagccgatcccgctcaaaatcgaaggacaagcgaaaagggcgcaagaggtccagagaggaaagccgatctcgctccaggtcacgaagtaagtccgaaaggtcacgtaagcgtgggagtctggcttttcggcccggtctgagttatcgcgagctctctaaccttgatggctctaaggccggcatgactacctag

SEQ ID NO: 204689 - DNA, 477 bp, synthetic construct
  misc_feature 1..477: note = Description of Artificial Sequence: Synthetic coding sequence
  source 1..477: mol_type = other DNA
atgccccgggtgtacatcggccggctgagctaccaggcccgggagagagatgtggaacggttctttaagggctatggaaagatcctcgaagtcgacttgaaaaatggatacggcttcgtggagttcgacgacctcagagacgcagacgacgctgtctatgaacttaacggaaaagacttatgtggggagcgggtcatcgtggagcatgcaagagggcctaggagggacggctcctacggttctgggcgctcaggatacggatacagacgctctggtagagacaaatacggcccccccacaaggaccgagtaccgccttatcgtggagaacctctcatcccgatgttcttggcaagatctgaaggtgggactgcctctgccggagcaggagcctgagccggaaccagagagcgagcctgaacaggaaagagaaaaacaagagcctcagcagggtaaagaacctcagccccagccctag

SEQ ID NO: 204690 - DNA, 819 bp, synthetic construct
  misc_feature 1..819: note = Description of Artificial Sequence: Synthetic coding sequence
  source 1..819: mol_type = other DNA
atgagcggctgccgggtgttcatcggccggctgaaccccgccgccagggagaaggacgttgaacggtttttcaagggatacgggaggattagagatatagacttgaaaagaggctttggctttgtagagttcgaggatccacgcgacgccgacgatgccgtatacgagttggatggcaaggagctgtgttctgagagagtgacaatcgaacacgccagggccaggagcaggggtggccgcggccgtgggaggtactctgacagattttcctcccggcggcctcggaacgataggcggaacgccccgccagtgaggactgaaaacagactgattgtggagaacctttcctcgcgggtgagctggcaggacctgaaagacttcatgaggcaggcaggagaagtgacctttgctgatgcccaccgccccaaactgaatgagggcgtggtcgaattcgcctcctacggtgacctgaagaacgccattgagaaactttccggcaaggagataaatggtagaaaaattaaactgatcgagggttcgaaacgacatagtagaagtcgttcccgatcccggtctcgtaccaggtcctcttctcgcagccgatctcgtagtagatcacgtagccggaaaagctactcgcggagccgttccagatcaagaagtcgctcaagaagcaagagcaggtccgtgtcccggtcacctgtccccgaaaagtcccagaaaagggggtcatcttctcgcagcaaatcccctgccagtgtggaccgacaaaggtctcgatctagaagtcgctctcggagcgttgactcagggaattag

SEQ ID NO: 204691 - DNA, 417 bp, synthetic construct
  misc_feature 1..417: note = Description of Artificial Sequence: Synthetic coding sequence
  source 1..417: mol_type = other DNA
atgagcggctgccgggtgttcatcggccggctgaaccccgccgccagggaaaaagatgtggaaagattttttaaaggctacgggcgaatccgtgacatagacctgaaacgagggttcggctttgtggagttcgaggacccacgcgacgctgatgatgctgtctatgagctagacgggaaggaactgtgcagtgaaagagttaccatcgagcacgcccgggcacggtcacgggggggaagaggcaggggccggtactccgaccgcttcagcagccggcggcctagaaatgataggcgcaatgcgcctcccgtgagaaccgagaaccgacttatcgtagagaacctgagctctcgcgtgtcttggcagcccgtttgcgtggtggggctgatgacccggagcgcttgcgggctgagctag

SEQ ID NO: 204692 - DNA, 819 bp, synthetic construct
  misc_feature 1..819: note = Description of Artificial Sequence: Synthetic coding sequence
  source 1..819: mol_type = other DNA
atgagcggctgccgggtgttcatcggccggctgaaccccgccgcccgcgagaaggacgtggagcggttttttaaaggctacggccgaattagagacatcgacctaaaacgcggctttggcttcgttgaattcgaagacccacgtgatgccgacgacgcggtatatgagctggacggaaaagagctctgctcagagcgtgtgaccatcgagcatgcgcgggctagatctcgtgggggtcgggggcgaggtcggtatagtgaccgattctcctcccgtcgccctcgaaatgatcggcggaatgcgccccctgtgcggactgagaatcgactaatagtggagaatctgtcgtcacgcgtcagctggcaggacctcaaagacttcatgcggcaggcgggggaggtgacatttgctgatgctcatcgccctaagctcaatgaaggcgtggtcgaatttgcttcgtatggagatctgaaaaacgctatcgagaagttatcagggaaggaaatcaacggtagaaaaatcaagctcattgagggatccaagcgccacagcaggagccgctcacgtagcagatcacggactagatctagctctcggagcaggagccgctcacggagtcggtcaagaaaaagctactcccgttccagaagcaggtctcgcagtcgcagtagatctaaatcaagaagcgtgtcacggtcacccgtgccagaaaaatctcaaaagagaggctctagttcacgctctaagagccccgcttccgtggacagacagcggagtcgcagtcgttcacggtcaagatctgtcgactcgggcaattag

SEQ ID NO: 204693 - DNA, 819 bp, synthetic construct
  misc_feature 1..819: note = Description of Artificial Sequence: Synthetic coding sequence
  source 1..819: mol_type = other DNA
atgagcggctgccgggtgttcatcggccggctgaaccccgccgcccgtgagaaagacgttgagcgattcttcaaggggtacgggaggattagagacatcgatctaaaaagaggattcggctttgtcgagtttgaggacccgagggatgcggatgatgcagtttacgagctggacgggaaggagctgtgcagcgagcgagtcaccattgagcatgccagggcccgcagcagaggaggtcgaggaagggggcgctatagcgacagattctcctcccgtagaccgcggaacgaccgtcggaacgctcctccagttcgaaccgagaacaggcttatcgtggagaacctgtctagtagagtaagctggcaagatttgaaagacttcatgaggcaggcaggagaggtgacttttgcagacgcacaccgacccaagttgaacgaaggtgtagtggaatttgctagttatggcgacctcaagaacgccattgaaaagttaagtggtaaggagatcaacggaaggaagatcaagttaatcgaagggtccaaaagacattccaggagccgcagccggtctaggagtaggacacgtagcagctcgcgatcacgaagcaggagcaggagtaggagtaggaagtcctatagtcgctcaagatcccggagtcgttctcgcagcagatcgaaatcccgttcggtgtcgagatcacccgttcccgaaaagtctcagaagcgcggatcttcatcccgctctaagtcaccagcatcggttgacaggcagagatctagatccagatcccgatctagatcggtggactcaggcaattag

SEQ ID NO: 204694 - DNA, 1035 bp, synthetic construct
  misc_feature 1..1035: note = Description of Artificial Sequence: Synthetic coding sequence
  source 1..1035: mol_type = other DNA
atgccccgggtgtacatcggccggctgagctacaacgtgcgggagaaagatattcaaaggttcttttctggttacggacggttgctcgaagtggatctgaagaatggatacggcttcgtcgaattcgaggactccagggatgccgacgacgcagtttatgaattgaacgggaaggagctctgcggagagcgggtcatcgtcgagcatgctagaggtcccaggcgcgaccgggatggatacagctatggcagcaggagcggagggggaggctacagcagccgtcggacttcaggcagagataaatacggcccgcctgttaggaccgaatatagactgatcgtcgagaacctttcctctcgctgttcatggcaagacctaaaggacttcatgaggcaggccggagaggtgacctatgctgacgctcacaaggaacgaaccaacgagggtgtgatcgagttcaggagctactctgacatgaagagggctttagacaagctcgacggaacagaaataaacggtcgcaatataagattaatagaggacaaaccgcggacgagccaccgccgctcctactctggcagtaggtctcggtccagaagcagacgaagatctcgctccaggtctcgcaggagcagcaggtcccgtagccggtcaataagcaagtcccgttctcgcagcaggtcaaggtccaagggtaggtcccggtcccgttcaaagggtcgcaaatctcgctctaaatccaaatccaagcctaagagcgatcgtggcagccacagccattcgcgaagtcgaagcaaggacgagtacgaaaaatcccgaagtagaagtcgatcgagatcccctaaagagaatgggaagggagatattaaaagtaaatcaaggtcaagatcccagagtcggtctaactcccctcttcctgttccccccagcaaagccagatcagtctcccccccgcctaaacgagccacatcccgctcccgtagcagaagcaggtcaaagagccgcagcagaagccgctctagttcccgcgactag

SEQ ID NO: 204695 - DNA, 717 bp, synthetic construct
  misc_feature 1..717: note = Description of Artificial Sequence: Synthetic coding sequence
  source 1..717: mol_type = other DNA
atgagccggtacggccggtacggcggcgagaccaaggtgtacgtgggcaacctgggcacaggcgccggcaagggcgaattggagcgagctttctcatactacggtcccctacggaccgtgtggattgccagaaatccaccgggcttcgcgtttgtggagttcgaggatccaagggacgctgaagacgccgtgaggggactggacggcaaggttatctgtggcagtagagtccgggtcgaactgtcaacaggtatgccacggagaagccggttcgataggccaccggcgaggaggccgttcgatcctaatgaccgttgctacgagtgcggtgagaaggggcactatgcgtacgactgtcatcggtacagccgccgccgccgctcgcggagcagatctcggagtcatagtagatcccgggggagaagatattcccgttcacgttcccgaagtcgcgggcggcggagcaggagcgccagtccaagacggagtcggtccatttctttaagacgtagtagatctgcctcactccgaagatccagatcaggatccatcaagggcagccgatattttcaatctccctctcggtctagatctcgaagtcgctccatcagtcggccccggtccagccgttcgaaatccagaagtccctcccctaagcggtcgcggagcccatctggctcacctcggcgctccgcctcaccagaacggatggactag

SEQ ID NO: 204696 - DNA, 681 bp, synthetic construct
  misc_feature 1..681: note = Description of Artificial Sequence: Synthetic coding sequence
  source 1..681: mol_type = other DNA
atgagccggtacggccggtacggcggcgagaccaaggtgtacgtgggcaatctgggcaccggtgcggggaagggggaattggagagggccttctcttactacggaccattgcgcacagtgtggatagcgcgcaaccctcccggcttcgctttcgtcgaattcgaggatcctcgcgatgccgaggacgcagtgagaggcctggacgggaaagttatttgcggcagccgcgtgcgggtcgagctgtcaacagggatgcctcggcggtctcggttcgaccgccctccagccaggcggccgtttgaccctaatgaccgatgctacgagtgcggcgagaaaggccactatgcctatgactgtcacaggtacagtcggcgccgtcgtagtagatcacggtcacgctctcacagccgctcacggggaaggaggtattcaaggtctaggtctcggtcccgaggacggcggtcacgcagtgcctcccctagacggagccggtccataagtttgcgcagaagtagaagcgcatccttgagaaggagccggtctggctccatcaaaggcagccgatattttcagagcccgagccgaagccggagtcgctcaagatccatctcacgacccagaagtagcagaagcccatctggatctcccagaaggagcgcatctccagagcggatggattag

SEQ ID NO: 204697 - DNA, 1926 bp, synthetic construct
  misc_feature 1..1926: note = Description of Artificial Sequence: Synthetic coding sequence
  source 1..1926: mol_type = other DNA
atgaactgggccgccttcggcggcagcgagttcttcatccccgagggcatccagatagacagccgctgtcccctgagtcgaaatataacagagtggtatcactactatggaattgcagtaaaagagagcagtcaatattacgacgtcatgtactccaaaaagggggcagcctgggttagtgaaacgggaaaaaaagaggtctcaaaacagactgtggcctattcaccacggtctaaactgggcaccctcctgccagaattcccaaatgttaaggacctgaacctgccggccagcttaccagaggaaaaggtctcgactttcataatgatgtaccgcactcattgccaacgcatcctggatacggttatcagggccaactttgacgaggtccagtctttccttctgcatttttggcaaggcatgccaccgcacatgttacctgtactgggcagcagcactgtggtgaatatcgtgggcgtgtgcgattcgatactctacaaagctatctcaggggtgcttatgccaacagttctacaggcactgcctgacagcctgacacaggtgattagaaaattcgccaagcagcttgacgaatggcttaaagtggcgcttcatgacctccctgagaatttgcgaaacattaagttcgagttatcaagacgctttagccagattctgcgaaggcagactagccttaatcacctctgtcaggccagcaggacagtgatccattcagcagatattaccttccagatgctggaagattggcggaacgttgacctgaatagtatcacaaagcaaacactgtacacgatggaggacagccgcgacgaacataggaagttaataactcagttgtaccaggagtttgaccatttgctcgaggagcagagcccgattgagagttacatcgaatggctggacacaatggtggatcggtgtgtcgtcaaagtcgccgcgaagcgccaaggctcactcaaaaaggttgcccagcagtttctgctgatgtggagctgctttggtacgagagtgatcagagatatgactctccactccgctcccagctttgggagtttccacttgattcatctcatgttcgacgactatgtgctctatctgctggagtcacttcattgtcaggagcgggctaatgagttgatgcgagcaatgaagggagagggctcgacggccgaggtgagggaggaaattatcttaaccgaagcagcggcaccaaccccgagccctgtgcccagcttttctcccgcaaagtcagccaccagtgtggaagttccccccccaagtagccccgtttctaacccaagccctgaatacacaggcctgagcaccacaggcgccatgcagagttacacctggtcactgacgtacactgttaccactgccgccggaagtcctgcagagaattcgcagcagctaccctgcatgcggaatactcatgtgccctcctccagtgttactcatcgaatccctgtctacccacatagagaggaacatggttacactggctcctataattacggatcatacggaaaccaacacccacaccctatgcaatcccagtaccccgctttgccacacgatactgccatttctggaccgttgcactatgccccataccatcgcagctcagcacaatatccattcaactctcccaccagtcgcatggagccatgcttgatgtcttccactccccgcctgcaccctacacccgtgacacctaggtggccggaagtcccctccgccaatacttgctatacttctccatcagtgcacagcgcaaggtatggcaatagctcagacatgtacacaccgctgaccacaagacgtaactctgaatacgagcatatgcagcattttccaggattcgcctacattaatggcgaggcctcaacaggatgggccaaatag

SEQ ID NO: 204698 - DNA, 2907 bp, synthetic construct
  misc_feature 1..2907: note = Description of Artificial Sequence: Synthetic coding sequence
  source 1..2907: mol_type = other DNA
atggccttcgccaacttccggcggatcctgcggctgagcaccttcgaaaagagaaagtcccgggaatatgagcacgtgcgcagggatctggaccccaatgaggtctgggagattgtcggcgaactcggcgatggggcttttggaaaagtttataaagcaaagaacaaggaaacaggtgccctggctgccgccaaggtgattgagaccaagtccgaagaggagctggaggattatatagttgagatagagatcctggctacctgcgatcacccatatatcgtaaaacttctcggcgcctattatcacgacggaaagctttggataatgatcgagttttgtccggggggcgcagtggatgccattatgcttgagctagaccgcgggctgacagagccgcagattcaggtggtgtgtaggcagatgttagaagctttaaactttctgcacagcaaacgcattatccatcgcgacctgaaggcgggcaatgtgcttatgaccctggaaggcgacattagactggctgactttggcgtcagcgctaaaaatctgaagaccctgcaaaagcgggatagttttattggtaccccatactggatggcacctgaagtggtcatgtgcgagaccatgaaagataccccttacgattacaaggccgatatttggagtctgggtatcaccttaattgaaatggcacagatcgagccaccacatcacgagctcaatccaatgagggtactcttgaaaatagccaagagcgatcctcctacgctcctgaccccctcaaaatggagcgtggagtttagagactttctgaagatcgcactcgataaaaacccagagactagaccaagcgcagctcagctcttggaacaccccttcgtgtctagcatcacgtccaacaaggcccttagggaactggtggcagaggccaaagctgaggtgatggaggaaatcgaggatgggcgggacgagggtgaggaggaagatgccgtggacgcggcctctactctggagaaccatacccagaactcttcggaggtcagccccccttcgttgaacgcagataaacccctggaggaatccccctctacccccctcgctccttcacaaagccaggactccgtgaacgaaccgtgctctcagccatcaggtgatcgctcactccagactacctccccccccgtcgttgccccgggaaacgaaaatgggttggcggtgccagtccctctgcggaagagccggccagtgtcaatggacgctcggatccaggttgctcaggaaaagcaggtcgcagagcagggaggcgatctgagcccggcagccaatcggtcccagaaggcctcccaaagccgtcccaatagcagtgccctggagacactgggcggggaaaagctggcaaatggatctctagagcccccagcccaggcagcaccgggtccatcgaagagagactcggattgctcgtcactgtgtacctccgaaagtatggattacggcaccaacttgtctactgatctctcacttaataaggagatgggatctctgagcataaaggatccaaagctttataagaaaactctgaagaggacacgtaaattcgtggttgacggtgtggaggtcagcattactaccagtaagatcatcagcgaggatgagaaaaaggacgaggagatgagattcctcaggaggcaagaactgagggaactgcggctcctgcagaaggaggaacacagaaaccagacccaactgtctaataaacatgaactccagctggagcaaatgcacaaacgattcgagcaggaaattaacgccaagaagaagttcttcgacaccgagttagaaaacttggaacgccaacagaaacagcaggtagaaaagatggaacaagatcacgctgtgagaaggagggaggaagctagacggatacgccttgaacaagatcgtgactacactaggtttcaagagcagctgaagctcatgaaaaaggaggtgaagaatgaggtagagaaactgccacgtcagcagcggaaggagtcgatgaagcagaaaatggaagagcacacgcagaaaaagcagctcctggacagagactttgtggctaagcagaaagaggacctggaactggcaatgaagcggcttactactgataaccggcgtgagatatgtgataaagagagggaatgtctcatgaaaaagcaggaactgcttcgcgacagagaggccgcactatgggagatggaggagcaccaattgcaagagaggcaccagctggtaaagcagcagttaaaggaccaatatttcttacagcgccatgagctgttgcgaaagcacgagaaggaacgggagcagatgcagagatataaccagcggatgatcgaacagttgaaagtgcggcagcagcaggaaaaggcacgacttcccaagatacagagatcagaaggtaagacccgcatggccatgtacaaaaagagtctacatatcaacggtggggggtccgctgcagaacagcgggagaaaatcaaacaattcagccagcaggaggagaagcgtcagaagagcgagcgcctccagcagcaacagaaacatgaaaaccagatgcgagacatgctcgcccagtgtgagagcaatatgagcgagcttcaacaactgcagaatgaaaaatgccacctactggtggagcacgagacccaaaagttaaaggccctagacgagagtcacaaccagaatttaaaggagtggagggataagttacgcccccgaaaaaaagctctagaagaggatttaaatcaaaaaaaacgggaacaggaaatgttcttcaagttatccgaggaagcagaatgccctaacccatcaactccttccaaggctgccaaattctttccctattctagtgccgatgcttcatag

SEQ ID NO: 204699 - DNA, 2907 bp, synthetic construct
  misc_feature 1..2907: note = Description of Artificial Sequence: Synthetic coding sequence
  source 1..2907: mol_type = other DNA
atggccttcgccaacttccggcggatcctgcggctgagcaccttcgaaaaaaggaagagtcgggagtatgaacatgtgagacgcgacctcgatcctaatgaggtctgggagattgtaggcgaattaggagatggggccttcggaaaggtgtataaagcaaaaaacaaggaaactggggctctggcggctgccaaagtgatcgagacaaagagcgaagaggagctggaggattacatcgtcgaaattgagatacttgcaacgtgtgaccatccatacatcgtaaagctactgggagcatactaccatgacgggaaactttggatcatgatcgaattctgtccagggggtgcggtcgatgcaataatgctcgaactggaccgaggcctgaccgaaccgcaaattcaagtcgtgtgtcggcaaatgcttgaggctttgaacttcctgcacagcaagaggatcattcatcgggatctaaaggctggtaacgtgcttatgacgctggagggtgacatccgactggccgactttggagtgagcgcaaagaatctgaagaccttgcagaaacgggactccttcatcggtacaccctactggatggcacctgaggtggtcatgtgtgagactatgaaggacacgccatatgattacaaagcagatatttggtccctgggtatcactctcatcgaaatggcacagattgagccgcctcaccacgagcttaacccgatgagagtgctgttgaagattgcaaagtccgacccacctaccttactcacacccagcaaatggtctgtggaattccgagactttctgaaaatcgccctggataaaaaccctgaaacacgcccttctgctgctcaactgctggagcatccattcgtatccagcatcacgtccaacaaagctcttagagagctcgtcgctgaggcgaaagccgaggtaatggaggagattgaagacggcagggacgagggcgaggaggaagacgccgttgatgccgcctctactctcgagaatcacacgcaaaattcatctgaagtgtctcccccttccctgaacgcagacaaaccactggaagagtcgcccagcacaccgctcgcgccctcacaatcacaggacagtgtaaacgaaccgtgctctcagccatccggtgatcgatctctccagactacctcccctccagtggtggcccccggcaatgaaaacggccttgctgttccagtgcccctcagaaagtcccgacccgtgagcatggacgcgagaatccaagttgcccaagaaaagcaggtggcagagcagggcggggatctgagcccagctgcaaatcggtcccaaaaggcatcacagagccgtcccaacagctccgctctcgagacactggggggagaaaagctcgccaacggtagcttggagccccctgcacaggccgctccagggcccagtaagagagattctgactgcagctctctgtgcacctccgagtcaatggactatggtaccaatttgtcaaccgacctttccctgaataaagagatgggctcgctttctattaaagatcccaaattatacaaaaagacgctcaagagaactcgaaaattcgtggtagacggtgttgaggtgagcattacaacgtccaaaataatcagcgaggacgagaagaaggatgaggagatgagatttctccggagacaggaattgcgcgaattgcgcttactgcagaaggaggaacataggaatcagacacagctatccaataagcatgaacttcagttggaacagatgcataagcgctttgagcaggagatcaacgcaaagaaaaagttttttgataccgagctcgagaatctggaaagacagcagaaacaacaggtcgagaagatggaacaagaccatgccgtacggcgcagggaggaggctagaaggatccgtctggaacaggatagggattatactagattccaagaacaactcaagctgatgaagaaggaagtaaagaacgaagtcgagaagctgccccggcagcagcgtaaggaatccatgaaacaaaagatggaagaacatacacagaaaaaacagcttctcgaccgggacttcgtcgctaaacagaaggaggacctcgagttggccatgaagcgtctgaccactgacaatcggagggagatttgtgacaaggagcgagagtgcctgatgaaaaagcaggagttgctgagagatagggaggcagccctatgggaaatggaagagcaccagcttcaggaaaggcatcagctcgtcaaacagcaactgaaagaccagtattttctccagcgtcatgaactcctgcgcaaacacgagaaggagcgggagcagatgcaacggtacaaccagcggatgattgagcagctgaaagtcagacaacaacaggagaaggctcgtctcccaaaaatccagcggtctgagggtaagactaggatggcaatgtacaagaagtcacttcacattaacgggggaggatctgcggccgaacaaagggagaagattaagcagttcagtcagcaagaggagaaaagacagaagagcgagcgtctgcagcaacagcaaaagcacgagaaccagatgagagatatgctcgcacaatgcgagtctaatatgagtgaactccagcaattgcagaatgagaagtgtcacctgctcgtggaacatgagacacagaaacttaaggctctggacgaaagtcataaccagaaccttaaagaatggagagacaagcttaggcctcgtaagaaggctctcgaggaggatttaaatcaaaagaagcgcgagcaggagatgtttttcaaacttagtgaagaagccgagtgtcctaacccatccacacccagcaaggcggcaaaattcttcccttacagtagtgccgatgcctcttag

SEQ ID NO: 204700 - DNA, 3300 bp, synthetic construct
  misc_feature 1..3300: note = Description of Artificial Sequence: Synthetic coding sequence
  source 1..3300: mol_type = other DNA
cggttcggcagcgccccccagcggcccgtggccatgaccaccgcccagcgcgactccctcttatggaaacttgccggcctgctgcgcgagtcgggagacgtggtattgtctggttgttcaactttgtcccttttgactcccaccctccaacaactgaaccatgtgtttgagctgcacctgggcccttggggaccagggcagacaggcttcgtggccttacctagccatccggcggacagtcctgtaattcttcagctgcagtttttatttgacgtactgcagaaaacactgtccctaaaactagtgcacgtggcaggacccggcccaacaggtccaattaagatcttcccattcaaaagcctgcggcacttggaattgaggggggtgccactacattgcttgcacgggttacgcggcatctacagccagttggaaacactgatttgttccaggagcttgcaggcccttgaagaactgctgtcagcctgcggcggtgacttctgcagtgcactgccttggctcgcccttctgagcgccaacttctcgtacaacgctctgaccgcccttgactcctcactgcgccttctctccgcgctcagatttctgaacctgagccacaaccaagttcaagattgtcagggtttcctaatggatttatgtgagctgcaccatttggacatcagttacaaccgcttgcatctagtgcccagaatgggtccaagcggggctgcgctgggtgtactgatactccgcggcaatgagctccggtctttacatggtctcgagcaacttcgcaacctgcggcacctcgatctggcatacaacttactagaaggccaccgtgaattaagcccgctgtggctcctcgcagagctcagaaagctatacttggagggaaaccctctgtggttccaccctgagcaccgcgccgccacagcccaatacctcagtcccagggctagggatgctgctacgggctttctgctggatggcaaagtcctaagcctgaccgatttccagactcatacatcactagggctttctccaatgggacctccacttccttggcccgtaggtagcacaccagaaaccagtgggggtccggatctcagcgactccttatctagtggaggtgtggtcacccaaccgctcctccacaaggtcaagtcacgcgtccgcgtgcgccgggcgtcgatctcagaaccctcggataccgacccagagcctcggacacttaacccatctcccgctggctggttcgtccagcagcaccctgagctggagctgatgtcttcttttagggagcgtttcggacggaactggctgcaatacaggtctcacctggagcccagcggtaatcccctacctgccacgcccacaactagtgctccaagcgccccgccagcttcctcgcaggggcctgatacagcccctcgcccctctcccccacaagaggaagcgcgcgggcctcaagagtctccgcagaagatgtccgaggaagttagagccgagccacaggaagaggaggaagagaaggaagggaaggaggaaaaggaggaaggagagatggtcgagcagggagaggaagaagccggcgaggaggaagaggaggagcaagatcagaaggaggttgaggctgagctgtgccggcccttactggtatgcccactcgagggaccagaaggggtccgcggtagagagtgctttttgcgggtgacatcagcgcatttgtttgaggttgagcttcaggctgccagaactctggagcgcctggagctgcagtccctggaagccgccgaaattgagcccgaggcgcaagcccagcgctcaccccgtcctactggttctgatctgttgccaggagctccaatactcagtctcagattcagttacatctgtccagataggcaactcagacggtaccttgttctggagcccgatgcccacgccgccgtgcaggaactcttggccgtgctgactccagtcactaacgtagctagggagcaactaggagaagctcgcgatctgttgctcggcaggttccaatgcctgaggtgtgggcatgaatttaagccagaagaaccgagaatggggctcgacagtgaggaaggctggcggcctttattccagaaaacagaatccccggcggtatgcccaaactgcgggagcgaccatgtggtcctgttggcagtgtcccgaggtacccctaatcgggaacgaaaacagggagagcaaagcctagctcccagcccatcagcctcacctgtatgccatcctccagggcacggggaccacctagacagggcaaagaattcacctcctcaagcaccgagcaccagagaccacggaagttggtccctgtcgcctcccccagagaggtgtgggctacgcagcgtcgatcatcgattaaggctattcctggatgtcgaggtgttttcagacgctcaggaggaatttcagtgctgcctgaaggtgcctgttgcactcgcaggccataccggggagtttatgtgtctggtggttgtgtccgatagacggttatatcttctgaaggtcactggagagatgagggaaccacctgctagctggctccaacttaccctggccgtgcctctgcaggacttatccggtatcgagctggggctggctggacaaagtctgcgtctggaatgggccgctggggccgggcggtgtgtcctgttaccaagagacgctagacactgtcgcgctttcctcgaagaattgctagacgtgctgcagtcactcccacctgcctggcggaattgtgtctctgctacggaggaggaggttaccccacagcatcggttatggccactgctcgaaaaagattcaagtctagaggctcgacagtttttctacctgagggcttttctggttgagggcccaagcacatgtctggtgtctctactgttgaccccctcgactttgtttctcctcgacgaagatgcagcaggtagtcctgccgaaccaagccctccagccgccagtggcgaggcatcagagaaggtgccaccttcgggcccaggacccgcggtccgcgtccgcgagcagcagccactgagcagtctcagctccgtgttactctaccggtcagcacccgaagatcttcggctgctgttttacgatgaagtgtcccgtttagagtctttctgggccctacgagtggtgtgccaggagcagctgacagccttacttgcgtggatccgggaaccctgggaagagttgttctctattgggctgcggaccgtgatacaggaagccctcgccttggatagatag

SEQ ID NO: 204701 - DNA, 1938 bp, synthetic construct
  misc_feature 1..1938: note = Description of Artificial Sequence: Synthetic coding sequence
  source 1..1938: mol_type = other DNA
cggttcggcagcgccccccagcggcccgtggccatgaccaccgcccagagggattcgctcctgtggaagctggcaggcctgctccgtgaatctggcgacgtggtactcagcggctgctccaccctcagtttattaactcctacccttcagcagctcaaccatgttttcgagctccacctgggaccatgggggcctggtcaaacgggatttgtggcccttccttcccatccagcagacagcccagtgattctacagctgcaattcctgttcgacgttctgcagaaaaccctgtccttgaaactggttcacgtggctgggcccggacccaccggccctatcaagatcttcccttttaagtcccttcggcacttggagttacgcggcgtgcccctgcactgtcttcacggactccgaggaatctacagccaactggaaacccttatttgtagccggagcctgcaggctctcgaggaattgctgtcagcgtgtggcggggacttctgctcagcgttgccctggctcgcgttgctgtctgccaacttttcttataacgccctgacagcattggatagctctctcaggctgttatccgccctgcgattcctgaacttaagccacaatcaagtccaagattgccaaggctttcttatggatctgtgcgagctgcatcacttagatatctcttataatcggctgcatctagtccccagaatggggcctagtggagccgccctcggcgtgctgatcctgcggggcaacgaactgcggtccctgcatggcctcgaacagttgcgcaaccttcggcacttagacctggcctataatcttctggagggtcatagagagttgagtcctctgtggcttctggcagagctgaggaaattcctgcttgatggaaaagtgctgtccctaacagatttccagactcatacgtcactgggcctgagccctatggggcctcctttgccatggccagtgggctctaccccagagacatccggtggcccagatctctcagattccttatctagcggaggggtcgtgacacagcccctattgcacaaagtgaagagccgcgtccgagtgaggagagcttccatctccgaaccatcggacaccgaccccgagccacgtaccctgaacccaagtcccgcaggttggtttgttcagcaacatcccgaactggagctgatgtcctcttttcgcgagcggtttggccgaaactggctgcaatacagatctcaccttgaaccctctggcaacccactgccagcgacaccaaccacatcggctccatcagcgccacccgcgagtagtcagggtccggatacagctccccgcccatctcctccacaagaggaagcgcggggaccccaggaatcaccccaaaagatgtctgaggaggttcgggcagaaccgcaggaagaggaggaagaaaaggaggggaaagaggagaaagaggagggtgagatggtggaacagggagaggaggaagctggcgaggaggaggaggaggaacaggaccagaaggaagtggaagctgagctttgtagacccctgcttgtctgtcccctcgagggacccgagggagtcaggggccgtgaatgtttcttgcgcgtgacctccgctcacctctttgaggtggagctacaggccgcccggactctggagcggctggagttgcagagcctggaagcggcagaaatcgaacctgaggctcaggcccagcggtcacctagacccaccgggtcggacctgttgccaggggcccctatcctatccctgcggttctcctatatctgtccagatcgccagctgcgaagatacctcgttctggaaccagacgcacacgccgccgtgcaggtgatggcccctagagtgggcgcccaagaagcagtcggcataaagcgagccagaggaaagtggcagcaagcatag

SEQ ID NO: 204702 - DNA, 1095 bp, synthetic construct
  misc_feature 1..1095: note = Description of Artificial Sequence: Synthetic coding sequence
  source 1..1095: mol_type = other DNA
atgcagaagtggttcagcgccttcgacgacgccatcatccagcggcagtggcgggcaaaccccagccgggggggcggcggcgtttctttcactaaagaggtggatacaaacgttgccactggcgccccaccccgtcgccagcgtgtaccaggacgggcctgtccctggagggaaccaattcggggtcgccgcggcgctaggccaggcggaggggacgctggcggcactccgggcgaaaccgttcgacattgctccgcacctgaggatccaatctttcggttttcctctctccacagttatccatttcctggtacgatcaagtcccgtgacatgtcgtggaagagacatcatctgatccccgaaacattcggtgtgaaaagacgtcgcaaaaggggtccagtggaatctgatcctctgcggggagagccaggctccgcaagagcagcagtatcggagttaatgcagctctttcccaggggcctcttcgaggatgctttgccgcctatcgttctgcgctcacaagtgtatagcctggtaccggacaggacggttgctgaccgacagctaaaggaactccaagagcagggtgagatccgaatcgttcagctcggattcgacctggacgctcatgggatcatttttacagaggactacagaactcgcgtgcttaaagcatgtgacggcagaccttatgctggagcagtacagaaatttttagcctccgtgttacccgcatgcggcgatttgtcgtttcaacaggaccaaatgacgcagacctttgggtttagagactccgaaattacacacttggtcaatgccggagtcctcaccgttagagatgccggcagctggtggctcgctgtgcccggcgccgggcgatttataaagtattttgtgaaggggagacaggccgtcctgagcatggtgagaaaagccaagtaccgtgagctgcttttatctgagctgttaggacgccgtgcacctgtggtggtgcggctggggcttacctatcatgtgcacgacctgatcggcgcacagctggtggattgtatctccacgacatcaggaaccctactgcggcttcccgagacatag

SEQ ID NO: 204703 - DNA, 1107 bp, synthetic construct
  misc_feature 1..1107: note = Description of Artificial Sequence: Synthetic coding sequence
  source 1..1107: mol_type = other DNA
atgcagaagtggttcagcgccttcgacgacgccatcatccagcggcagtggcgcgctaacccatctcgcggggggggaggggtgtctttcaccaaagaggtcgacaccaatgtcgcaactggcgcccctccccggagacagagggtcccaggccgggcctgtccatggcgagagccaatccgtggccgccgaggtgcccgccctggcggcggggatgcgggcgggaccccaggcgaaacagtgagacattgctccgctcccgaggacccaatctttagattttcaagccttcactcctatcctttccctggcacaattaagagccgagatatgtcctggaagcgccatcacctgattcctgagacgttcggggtcaagcggagaaggaagagaggccccgttgagagcgaccccctccggggtgagcccggctcagcccgcgcggcggtgagtgagttgatgcagctcttcccaaggggtctcttcgaggacgcccttcctcccattgtgctacggagtcaggtgtattcacttgttccggaccggactgttgctgatcgtcagctcaaagagttacaggagcaaggagagatccgaatcgttcagctgggctttgacctggacgcccatggtatcatattcactgaagactaccgcacaagagtttgcgactgtgtgctgaaagcttgcgatggtcggccatatgcaggggctgtccagaaattcctggcatccgtgctaccagcttgcggtgacttgtcgtttcagcaagaccaaatgactcaaacctttggcttcagggattctgagattacccatctggtgaatgcaggcgtcctgacagtgcgtgatgccggctcatggtggctcgctgtgccaggggcaggaaggtttatcaaatatttcgtgaaggggaggcaagcagtgctgagcatggtcaggaaggccaaataccgtgagctacttttgagcgagttgcttggcagaagagcgccggtcgttgtgagacttgggctgacataccatgtgcatgatctgataggcgcccagctggtggattgtatttcaacaacgtcaggcaccttactcagattgccagagacctag

SEQ ID NO: 204704 - DNA, 1107 bp, synthetic construct
  misc_feature 1..1107: note = Description of Artificial Sequence: Synthetic coding sequence
  source 1..1107: mol_type = other DNA
atgcagaagtggttcagcgccttcgacgacgccatcatccagcggcagtggcgcgccaaccctagtcgcggcggaggcggagttagtttcacaaaggaggttgacaccaacgtcgcaactggggccccacccagacgacagagggtccctgggcgcgcttgtccctggagggagccaataagaggcaggcggggcgctcgaccaggcgggggcgatgccgggggaacccccggagagaccgtgaggcactgcagcgctcccgaggaccctatcttccgattcagctctctgcacagttacccatttcccgggaccattaagtcacgcgatatgtcttggaaacggcaccatttaatacctgagactttcggcgttaagcggcgacgcaagaggggccccgtcgaatccgatcccctgaggggtgagccagggtccgcccgcgccgccgtgtccgaattgatgcagctgtttcctaggggcttgttcgaggatgcactcccccccatcgtgctgcggtctcaggtgtacagtttggtgcctgatcggaccgtggcagaccgacaacttaaagagctccaagaacagggcgagatcagaatagttcagctgggattcgaccttgatgcccatggcatcatttttacagaggattacaggacccgggtctgcgactgtgtgcttaaggcctgtgacgggagaccgtatgctggcgcggtccagaagttcttagcatcagtactccctgcttgcggagacctttcattccagcaggatcagatgactcaaacgtttgggtttcgggactctgagataacccacctggttaacgcgggagtacttacggtgagggacgccggctcgtggtggctcgccgtacctggcgccgggcggttcataaaatacttcgttaaagggcgacaagcggtgctaggcatggttcggaaagcaaagtacagggagcttcttctgagcgagttgcttggcagacgtgccccggtcgttgtaaggctgggactcacgtaccacgtgcatgatttgatcggtgcccagctggtagattgcatctccactacgagtgggacactgctgcgcctgcctgagacctag

SEQ ID NO: 204705 - DNA, 1095 bp, synthetic construct
  misc_feature 1..1095: note = Description of Artificial Sequence: Synthetic coding sequence
  source 1..1095: mol_type = other DNA
atgcagaagtggttcagcgccttcgacgacgccatcatccagcggcagtggcgcgccaatccctcacgcggaggtggcggtgtatcatttacgaaggaagtggacacaaatgtggcaacaggtgcacctccccgccgccagagagttcccggccgcgcctgtccttggcgagagccaatccgcggtaggcgcggtgcccgccctggggggggcgacgcaggagggaccccgggtgaaactgtgcggcactgctccgcccctgaggaccccatcttcagatttagcagcttgcactcttacccttttcccgggacaattaaatcaagagacatgagttggaaacgccatcatctaattccagagacattcggagtcaagaggagacgcaagagaggccccgtcgagagcgatcctcttagaggagagcccgggagcgcgcgggccgcggtatcagaactcatgcaattatttccaaggggtctcttcgaagatgcacttcccccaattgtgctcagaagccaggtctattccttggtgcctgaccgtactgtggccgataggcagctgaaggaactgcaagagcagggcgaaatcaggatcgttcagctaggatttgatctagacgctcacgggataatctttaccgaagactatagaacgcgtgtgctgaaagcttgtgatgggcggccctatgccggggccgtccaaaaattcttagcaagcgttcttccagcttgcggcgacctatcattccaacaggaccagatgacacagacgtttgggttccgagattcagagattactcatttggtaaacgcaggagttctgacagttagggacgcaggctcgtggtggctcgccgtcccaggcgcgggtcgcttcatcaaatatttcgtaaaagggagacaggcagtattggggatggtgcggaaagctaaataccgcgagcttttgctttccgagctgctgggtcgccgcgcacccgtcgtcgtacgactgggcctgacgtaccatgtgcacgatctgataggagcccagcttgtggattgcatcagcaccacctcgggtaccttgctcagactaccagagacttag

SEQ ID NO: 204706 - DNA, 1095 bp, synthetic construct
  misc_feature 1..1095: note = Description of Artificial Sequence: Synthetic coding sequence
  source 1..1095: mol_type = other DNA
atgcagaagtggttcagcgccttcgacgacgccatcatccagcggcaatggagggccaacccttctcgcggcgggggcggggtgagcttcactaaggaggtagacaccaacgtcgccactggtgctcccccaaggcgccaacgggtgccaggacgcgcttgcccttggcgagaacctatccggggaaggcgtggagctcgccctgggggcggcgacgcaggcggtaccccaggcgagaccgtacgacattgcagtgctcccgaagatccaatctttaggttcagctctctacactcttatccattccccgggactatcaaaagtagggatatgagctggaagcggcaccatcttattccagagacatttggcgtcaaacgaaggcgcaaaagggggcctgtcgaatccgatcccctcaggggagagcccggatccgccagagctgctgtcagtgagctgatgcagcttttcccacgcgggctgttcgaagacgctctgccccccatcgtcctgaggagccaagtgtacagcctcgtgcccgaccggacagtggctgatagacagctgaaggaactgcaggaacagggggagattcgcatcgtccagctgggctttgacctcgacgctcatgggatcattttcaccgaggactacagaacacgtgttctcaaggcctgtgacgggcgcccttatgccggggctgtccagaaattcttagcctcggtattgccagcttgcggcgacctttcattccaacaggatcagatgacacaaacttttggtttccgggattctgaaataactcacctggtgaatgctggcgttcttacggttagagacgcagggtcctggtggctcgctgtgccgggagctggaagattcatcaagtattttgtgaaggggcggcaggccgtcctgtcgatggtgaggaaagccaaataccgcgagcttctcttaagtgaactcctcggcaggcgcgccccagtggtggttcggctcgggctcacgtaccacgtgcatgacctgatcggcgcacaattagtggactgcatttccactacttccggcacccttttgagacttccggagacctag

SEQ ID NO: 204707 - DNA, 1095 bp, synthetic construct
  misc_feature 1..1095: note = Description of Artificial Sequence: Synthetic coding sequence
  source 1..1095: mol_type = other DNA
atgcagaagtggttcagcgccttcgacgacgccatcatccagcggcagtggagggctaaccctagccgcggcggaggcggcgtctcctttacaaaggaggtagacacaaacgtggctactggggccccccccagacgccagagagtgcctggaagggcatgtccatggcgagagccaatccggggaaggcggggcgcacgccctggtgggggagatgccggcggcactccaggagagaccgtgagacattgtagcgcccctgaggaccccattttccgtttcagttcccttcactcctaccccttcccaggtacaattaagtcgcgggacatgtcttggaaacgacaccacctcatccccgagacgtttggcgtcaagcggaggcgtaagcgtgggcccgtagaaagtgaccctctcaggggcgagccaggctccgctcgcgcggccgtgagcgaattaatgcagctctttccaaggggcctgttcgaagatgccttgccccctattgtcctccggagtcaggtctacagcttggtacccgaccggactgtggcggacaggcagctgaaggaactccaggagcagggcgagatcagaatagttcagctgggtttcgacctggacgctcatggaattatttttacagaggattaccgcacgcgagtccttaaggcatgcgacggacggccctacgccggcgccgtccagaagtttttggcctccgtcctgcccgcctgcggtgatctttcttttcagcaagatcaaatgacacaaacgtttggattcagagacagtgaaattacacatctcgtcaacgctggtgttctcaccgttagagacgcggggagctggtggctggccgtgcctggggccgggaggtttataaaatacttcgttaaggggagacaggcagtgctatccatggtccgcaaagccaagtacagggagctgttactgtccgagttgctgggacgtcgagctcctgtggtcgtaagattgggactaacctatcacgtgcatgacctcataggagctcagcttgttgactgcatcagtactacatctggaactctcctgagactgcccgaaacgtag

SEQ ID NO: 204708 - DNA, 1095 bp, synthetic construct
  misc_feature 1..1095: note = Description of Artificial Sequence: Synthetic coding sequence
  source 1..1095: mol_type = other DNA
atgcagaagtggttcagcgccttcgacgacgccatcatccagcggcagtggagagctaaccctagtaggggcgggggtggcgtatccttcaccaaagaggtcgacactaacgtggccacaggcgctcctccccgcaggcagagggtgccagggagagcttgcccttggagggaaccaattcgcggccgtcggggcgccagacctggcggtggagatgccggcggtacacctggcgagaccgtcagacactgctccgcccctgaagatcctatcttccgcttcagcagcctccacagttatccattccccggcacgatcaagagtagggacatgagctggaaacgacaccacctcattccagagacctttggtgtcaaacgccggcgcaaaagaggcccagtcgaatcggaccccctacgcggggagcctggttccgcccgagcggcggtgagcgagttgatgcagctgttcccaagaggattattcgaggacgccctcccgcctatagtcctgagatcacaagtgtactccctcgtgcccgacagaacagtcgccgaccgtcagctgaaggagcttcaagagcaaggggaaattcgtatcgtccaactgggcttcgatctcgacgcgcatggtatcatattcacagaagattataggaccagagttttgaaggcgtgtgacggtaggccctacgctggcgctgtgcagaagtttttagcctcagtgttgccggcttgcggggatttatcttttcagcaagaccaaatgacacaaaccttcggcttccgggacagtgagattacccacttagtgaacgccggagtgctgacggtccgcgacgctgggagctggtggttagccgtccctggcgcaggaaggttcatcaagtatttcgtgaagggccgccaagcggtcctatctatggtgaggaaggccaagtatagagagctattgctttccgagttactgggcaggagggcgccagtggtagtccggctagggctgacctaccatgttcatgatctcatcggcgcgcagcttgttgactgtatctctaccacatctggaactctgctgcgcctgcctgagacctag

SEQ ID NO: 204709 - DNA, 1107 bp, synthetic construct
  misc_feature 1..1107: note = Description of Artificial Sequence: Synthetic coding sequence
  source 1..1107: mol_type = other DNA
atgcagaagtggttcagcgccttcgacgacgccatcatccagcggcagtggcgcgccaaccctagccggggcggcggcggggtgtcctttactaaagaggttgacaccaatgttgccactggggccccacctcgtaggcagcgggtgcctgggagagcttgcccgtggagggaacccatcagagggcggagaggcgctcgtcccggaggcggcgatgcaggtggaacccccggcgaaacagtgaggcattgttcagcacctgaggaccccatttttcggttcagcagtctgcattcatacccttttcccggcaccatcaaaagccgagatatgtcctggaaaaggcaccacttgatccccgagacgttcggcgttaaacgccgtcggaagcgcggtccggtggaaagcgatcctttgcgaggcgaaccaggcagtgctagagccgctgtctccgaactcatgcagttattcccgagggggctgttcgaagatgccctgcctcctattgtgttacgtagtcaggtgtatagtctcgtccccgaccgcactgtggctgaccgccaactcaaagagttgcaggagcagggagagatccggattgtccaactggggtttgatttggatgcgcatggcattatctttacggaggattacagaaccagggtctgcgattgcgtactaaaagcctgcgacggaaggccctatgctggcgcggtgcagaagttcctggcttctgtgttacccgcctgtggcgacctgtcatttcaacaggaccagatgactcaaacctttggatttcgagattccgagattacacatttggttaacgcgggagtgttaacagtgagagatgcaggttcttggtggctggcagtccccggcgctggacggtttattaagtattttgtaaaggggagacaagctgtcctctcaatggtgcgaaaagccaaatatagggaattgctcctttctgagctgctgggacgaagggcccctgtagtggtacgactgggactcacctaccacgttcacgatttaattggcgctcagttagtggactgcatctctacaacaagcgggaccttgctcagactgcccgaaacttag

SEQ ID NO: 204710 - DNA, 1107 bp, synthetic construct
  misc_feature 1..1107: note = Description of Artificial Sequence: Synthetic coding sequence
  source 1..1107: mol_type = other DNA
atgcagaagtggttcagcgccttcgacgacgccatcatccagcggcagtggcgcgcgaatccatctcgtggcgggggcggtgtgtcttttacaaaagaagtggacactaatgtggccacaggtgcccccccccgacgacaacgagtgcctggcagagcctgcccctggagggagcctataagggggcgccggggcgcacggcccgggggcggagatgcgggcggtacaccgggcgagacggtgaggcactgcagtgccccagaagatccgatctttagattcagttccttgcactcttatccttttcccggcacgattaagagccgcgatatgagctggaagcggcatcatttgatcccagaaaccttcggcgtcaagcggcgccggaaacgcggtcctgtagaatctgatcctctgaggggcgagccaggttcagctcgggcagcagtttcagagctgatgcagttgttcccaagaggcctgttcgaggatgccctgccccctatcgtgttgcgttcacaggtgtatagcctggtgccagaccgcacagttgcagataggcagttaaaagaattgcaggagcaaggggaaattcgcattgttcagctgggatttgatctcgatgcgcatggcatcatattcaccgaggattaccgaacacgagtatgcgactgtgtgctgaaggcgtgtgatggtcgcccctatgccggagccgtccaaaagttccttgcatcagtcctgcccgcatgcggtgatctgtctttccagcaggatcagatgacccagactttcgggtttcgtgacagtgaaattacccacctggtcaatgcaggggtgctgaccgtaagagacgcggggtcctggtggttagctgtgccaggggcgggccggttcattaaatattttgtgaagggtagacaggctgtgttgagtatggtgcgcaaggcaaaataccgggagctcttactttctgagctgctggggagacgggcgcctgtcgtggtgcggctcggtttgacctaccacgtgcacgatctgattggtgcgcagctggttgactgtattagcaccacttctggaacccttctccgccttcctgaaacttag

SEQ ID NO: 204711 - DNA, 1107 bp, synthetic construct
  misc_feature 1..1107: note = Description of Artificial Sequence: Synthetic coding sequence
  source 1..1107: mol_type = other DNA
atgcagaagtggttcagcgccttcgacgacgccatcatccagcggcagtggcgcgcgaacccatctcgtgggggcggaggcgtgtcctttacaaaagaagtggataccaacgtggccactggggctccgccacgccgccagcgggtgcccgggagagcctgtccatggagggagccaattcgaggccgccggggggcgcgacctggcggaggggatgccggcggcactcctggtgagacagttaggcattgctctgcgcctgaagacccaatttttcgcttttcctcattgcatagctatcctttcccagggaccattaaaagccgggatatgtcatggaagcggcaccaccttatccccgaaaccttcggggtcaaacgtcgccggaagcgggggcccgttgaaagtgatcccttgagaggcgagccgggatcagccagggctgccgttagcgagcttatgcagctgtttccacgcgggcttttcgaagatgccctcccacccatcgtgctgcgctcgcaagtctactctttggtacccgatcggacagtggcggatcgccagttaaaggagctgcaggaacagggcgaaatccgtatcgtgcaactcggctttgacctcgatgcccatggaataatttttactgaagactacaggacccgagtctgcgactgcgtgcttaaggcttgcgacggtcgaccctacgccggcgccgttcagaaattccttgcatcggtgttgccagcctgcggtgatctgagcttccagcaggatcagatgactcagacgtttgggttcagggattctgaaattacccatctggtgaacgctggcgtccttacagtccgcgacgccggaagctggtggctcgccgtgccaggagccgggcgatttatcaagtacttcgtaaaggggagacaggctgtcctgtccatggtcaggaaagcaaaataccgcgaacttcttctgagtgagctgcttggccgtcgggcacctgtggtggtgagactgggccttacatatcacgtgcatgacctgatcggagcccagctggtagactgtatcagcactacgagcggaaccttgctgaggttacccgaaacctag

SEQ ID NO: 204712 - DNA, 1095 bp, synthetic construct
  misc_feature 1..1095: note = Description of Artificial Sequence: Synthetic coding sequence
  source 1..1095: mol_type = other DNA
atgcagaagtggttcagcgccttcgacgacgccatcatccagcggcagtggcgggccaacccctcaagagggggagggggcgtctccttcacaaaagaggtggataccaacgtggcgaccggtgccccccctaggagacagagggtgcccggcagggcctgcccctggcgcgaacccataaggggccgcaggggagcacgacccgggggcggcgatgccggtgggaccccaggagaaactgtccgtcattgcagcgcgccggaggatcccattttccgcttcagctctctgcatagctacccctttcccggcactataaagagccgagacatgtcctggaaaaggcaccacttaattccagagaccttcggagtgaagcggagaaggaaacgtggacccgtcgaaagcgacccattgcgaggtgaacctgggtctgctagggccgccgtctcagaactgatgcaactgtttcctcggggtttgttcgaggacgcgctgcctccaatcgtgcttcggtcgcaggtctactccttggtgcctgacagaacggtcgctgaccgacagctcaaagaactgcaagaacagggagagatcagaatcgtacagttgggatttgatttggacgcccacgggatcatatttaccgaagattacagaacacgcgtgctcaaagcttgtgatggccgtccatatgccggcgccgtccagaaattcctagcctccgtgttgcctgcttgcggggacttgtccttccagcaagaccagatgacccagacttttgggtttcgggattccgaaattacacacttggtcaacgctggcgtgctgaccgtccgggatgctggcagttggtggctcgccgtgccaggcgcagggagattcatcaagtattttgtgaagggccgtcaagctgtccttagtatggtaaggaaagccaagtaccgcgaacttcttctctccgagctgctcggccgacgcgcgccagtggtcgttcggctgggcctgacttatcatgtacacgatctaataggcgctcagcttgtggactgcatatccacaacatcaggaacacttttacgattgcctgagacatag

SEQ ID NO: 204713 - DNA, 1107 bp, synthetic construct
  misc_feature 1..1107: note = Description of Artificial Sequence: Synthetic coding sequence
  source 1..1107: mol_type = other DNA
atgcagaagtggttcagcgccttcgacgacgccatcatccagcggcagtggcgcgccaacccctctcggggcggtggcggggttagtttcacaaaggaggtcgatacaaatgtagcaaccggcgcaccaccacggagacagcgagtgcctgggcgtgcatgtccttggcgcgagccaatacggggtagacggggcgcccggcccggtggcggcgacgctggagggacgccaggtgagacagtgcgccactgttcagcacccgaggaccctatctttaggttcagctctctacactcctatccattcccaggcacaattaagtctcgcgacatgtcgtggaagaggcatcatctcatccctgaaacttttggcgtgaagaggagaaggaaaagaggacctgtggagtccgatccactgaggggagagcccgggtccgctagagctgccgtctccgaactgatgcagctgtttccacgggggctgttcgaggacgcgttgcctcccatcgtcctgagaagccaggtatattcgctggtccctgatcggactgttgctgatcggcagttgaaggaacttcaagaacagggagagatccgaatcgtccagctcggctttgacctagatgctcatggcatcatattcacagaggactaccgcacccgcgtgtgtgattgcgtcctgaaggcctgcgacggccgcccctatgcaggcgcagtccaaaaatttctggccagcgtgcttcccgcatgcggagatctcagcttccagcaggatcagatgactcaaacgttcggcttccgagactctgaaataacacacctggtgaatgcaggtgtcctgaccgtgagggacgcaggatcatggtggctggctgttcccggggcaggccgcttcattaagtatttcgtgaaaggacgccaggccgtcttgtcaatggtgagaaaagcaaaatatcgagagctgttactgagcgaactactgggccgacgcgcaccggtagtcgtgcggttgggtctgacctaccatgtgcatgaccttatcggtgctcaacttgtggattgtatatctaccaccagcggcacgctcctgaggctgccggagacctag

SEQ ID NO: 204714 - DNA, 339 bp, synthetic construct
  misc_feature 1..339: note = Description of Artificial Sequence: Synthetic coding sequence
  source 1..339: mol_type = other DNA
atgcagaagtggttcagcgccttcgacgacgccatcatccagcggcagtggagagccaacccttccaggggcggcggaggtgtgtcattcaccaaagaagttgataccaatgtggccacgggggctcctcctcgacgccagagagtcccgggcagagcttgcccttggcgggagcccattcgaggacgtagaggagcccggcccggaggcggcgatgcagggggaacgcccggagagacagtacgccattgttccgcgcctgaggatcctatcttccgtttttcttctctgcactcctatccttttccaggtaccatcaaatccagagacatgagctag

SEQ ID NO: 204715 - DNA, 966 bp, synthetic construct
  misc_feature 1..966: note = Description of Artificial Sequence: Synthetic coding sequence
  source 1..966: mol_type = other DNA
atgctggtgtgcgccagccccccccccctgcccgccctgaccggcttgcgggacgataagctaacccttttgagttcttcaccaggactcggcggcactcctggggagactgtgcgccactgcagcgctccagaggatccaatcttccgatttagcagcctgcatagctatcctttccctggcacaattaagtctcgagatatgtcttggaagagacaccatcttattcctgagactttcggtgtaaaaagacggcgcaaacgcgggccggtggaaagtgatccactcagaggagaaccagggtccgctagggcggccgtcagcgagttaatgcagctctttccgcgtgggttgtttgaggatgcactgccacccattgtgctgaggagccaggtctactctctagtgcctgatcggaccgtcgccgacagacagctgaaggagctccaggaacagggcgagatcaggatcgtgcagctgggctttgacttagacgcccacgggattatttttactgaagactaccgcaccagagtcctcaaggcctgtgatgggagaccatacgcaggcgccgtccagaagttcctagcctccgtgctgcccgcctgcggcgatttgtcgtttcagcaggatcagatgactcagacatttgggttccgagattctgaaattactcacctcgtgaatgcgggagtactgactgtcagggacgccggctcctggtggttggctgtgcctggcgcgggacgatttataaaatacttcgtgaagggcaggcaagcggtgctcggtatggtgcggaaggcaaaatacagagagctcttgctctcagaacttttgggcagacgagctcctgtggtagtacgactgggcctgacctaccatgtacacgatctgattggagcccagttggtcgactgcatttctaccaccagtggcaccctcctccgactccccgagacgtag

SEQ ID NO: 204716 - DNA, 966 bp, synthetic construct
  misc_feature 1..966: note = Description of Artificial Sequence: Synthetic coding sequence
  source 1..966: mol_type = other DNA
atgctggtgtgcgccagccccccccccctgcccgccctgaccggcctgcgcgatgataaattaactctgctaagttcctcaccaggcctcggcgggacacctggcgagacagtgcgccactgcagcgcaccggaggatcccatctttaggttcagcagcttgcattcttatccctttccagggaccattaagagtagggatatgtcttggaagaggcatcatctgatcccagagactttcggcgtgaaaaggaggcgaaagcgaggacctgttgagagtgaccctctgaggggagagccgggctcggcccgtgcggcagtgtcagaactgatgcagctgttccccagaggccttttcgaagacgctctgccaccgattgtcctgcggagtcaggtatatagcctggttccagaccgtaccgtggcagaccgacaactgaaagagctgcaagaacaaggcgaaattaggattgtccaactaggttttgacctggacgcccacgggatcatttttacagaggactatagaactcgcgtactgaaagcctgtgacggacgcccatatgcaggcgccgtgcaaaagttccttgccagtgtgctgcccgcatgtggtgatctcagtttccagcaggaccagatgacacagacttttggttttagggactccgaaatcacacatctggtcaatgctggcgtcctcactgtccgcgacgccggctcctggtggctggccgtgcctggagctggccgtttcatcaagtattttgtcaaaggcaggcaagccgtgctctctatggtgcgtaaggcaaaatatagagagctcctgctgtccgaattgttaggcagaagagcccccgttgtggtgcgcttaggcctaacataccacgtgcatgaccttattggggctcaacttgtagattgcattagtacaacaagcgggaccctgctgaggctcccggagacttag

SEQ ID NO: 204717 - DNA, 966 bp, synthetic construct
  misc_feature 1..966: note = Description of Artificial Sequence: Synthetic coding sequence
  source 1..966: mol_type = other DNA
atgctggtgtgcgccagccccccccccctgcccgccctgaccggcctgcgggacgataagctgaccctgttaagctcaagccctggactggggggtacccctggggagactgtcaggcattgctcagccccagaggacccaatttttagattttccagccttcatagttacccatttccgggtaccattaagagtagagatatgtcatggaagcgccaccatctgatccctgagacctttggcgttaagagaaggcgcaagcgcgggcctgtggagagtgaccccctgagaggtgagcctgggagcgctagagctgccgtgagcgagctcatgcagctctttccaagggggttattcgaagacgccctgccacccatcgttttacgaagccaggtctacagtttggtgcctgatcgaaccgtagcagacaggcaactaaaagagctccaggagcagggagagatccgaatcgttcagctcggtttcgaccttgacgcccacggaatcatctttacggaagactatcgcactcgggtcctgaaagcctgcgatggtcgtccgtacgccggagcagtgcagaagttcctcgcatcggttctgcctgcctgcggagatctcagtttccagcaagatcagatgacgcagacttttggattccgggactccgaaataacccatctggtgaacgcaggagtcctcacagtacgcgatgccgggagttggtggctcgcagtgcccggagctgggaggttcatcaagtatttcgtcaagggccgacaggccgtgctgagcatggtgcgaaaagccaaataccgcgagctgttgttatctgaactactcggtagaagggccccagtggtggtccgactgggtctgacatatcatgtgcatgatcttatcggagcccagctagtcgactgcatctccacgactagcggcaccttattacgcctcccagaaacttag

SEQ ID NO: 204718 - DNA, 966 bp, synthetic construct
  misc_feature 1..966: note = Description of Artificial Sequence: Synthetic coding sequence
  source 1..966: mol_type = other DNA
atgctggtgtgcgccagccccccccccctgcccgccctgaccggcctgagagatgataagctgacactcctgtctagttctcccgggctgggcggcacaccaggcgaaacagttcggcactgtagtgcgccagaggaccctatcttccgattcagctctcttcattcctatccctttcctggaactattaagagtcgagacatgtcgtggaaacgccaccatcttattcccgagacgttcggcgtgaaacggcgcagaaagcgcgggcccgtggagagtgaccccctgcggggcgaacccggtagcgcccgtgcggccgtgagtgagctcatgcagctttttccccggggactgtttgaggacgctttaccccccatcgtgctgcgctctcaggtttactcattagttcccgatagaacagttgcggaccggcagctgaaggagctccaagagcagggggaaattcggatagttcaacttggtttcgacctggacgcccatgggatcatctttaccgaggattaccgcaccagggtgctgaaggcttgcgatgggcggccatatgccggagccgtgcagaagttcctcgcttcagtgctccccgcatgcggagacctgagctttcagcaggaccagatgacccagacttttgggttcagggactcggaaataacacatctcgtcaacgctggagtgctgactgttcgagatgcaggaagttggtggctggctgtgccaggagccggtcggtttataaagtattttgtgaaaggtcgccaagccgtgttgagtatggtaaggaaagctaagtacagggaactgctgctgtctgaattgttagggcggagagcccccgtagtggttcgactgggcctcacctaccatgtgcacgatcttattggagcgcaattagttgactgcattagcactacctctgggactctactccgactgcctgagacttag

SEQ ID NO: 204719 - DNA, 966 bp, synthetic construct
  misc_feature 1..966: note = Description of Artificial Sequence: Synthetic coding sequence
  source 1..966: mol_type = other DNA
atgctggtgtgcgccagccccccccccctgcccgccctgaccggcctcagagacgataagttgaccttactgagctcatctcctggcttgggtggaacacctggggagacagtccgacattgtagtgcacccgaggatcccatctttcgcttttcatccctgcattcttaccctttccctgggacgatcaagtcaagagatatgagctggaaaaggcaccatctgattccagagacattcggcgtgaagaggcggagaaagcgggggccagtcgaatcagaccctctccgaggcgaacccgggagtgcgcgggctgcagtttctgaattgatgcaactgttccctcgcggcttattcgaggacgcactaccaccaatcgtgctgaggtcccaagtgtactctttggtgcctgaccggaccgttgcagaccgccaactgaaggaactgcaggaacagggggagatcagaatcgtacagctgggattcgatctggatgcccacggcatcatattcacagaagattaccggactagggtgttgaaggcctgcgacggcaggccctacgccggggctgtgcagaaattccttgcgagcgtgttaccagcatgcggtgatctatcctttcaacaggatcagatgactcagacatttggctttagagatagcgaaataacacacctggtcaatgctggcgtattaacagtcagagatgcgggatcttggtggttggcggtgccaggtgctggccgctttattaagtacttcgtcaagggccgtcaggccgttctcagcatggtgcgaaaggccaagtaccgtgaactgctcctcagcgaactcctggggcgtcgggccccagttgtggttcgcctgggactgacctatcacgtccacgacctgatcggcgcccagttggttgactgtattagtacaacctctggaacactgttgcgccttccagaaacttag

SEQ ID NO: 204720 - DNA, 1320 bp, synthetic construct
  misc_feature 1..1320: note = Description of Artificial Sequence: Synthetic coding sequence
  source 1..1320: mol_type = other DNA
atgcagaacctgaaggccgaccccgaggagctgttcaccaagctggagaagataggcaaaggcagcttcggcgaggtttttaagggtatagacaacaggacacagaaagtggtcgccatcaagattatcgatctcgaagaagctgaagacgaaatcgaggacatacagcaggagatcacggtgctttctcagtgcgattccccatacgttactaagtactacggctcttatttgaaggacacaaagctgtggattatcatggaatacctaggcggcggctccgccctcgacctgttggagccgggaccccttgacgagacccagatagctacaattttgcgggagatcttgaagggtctcgattaccttcacagtgagaaaaaaattcacagagacataaaggctgccaatgttctgctgagtgaacatggagaggtcaaactcgccgatttcggcgtggctggccagctgaccgacacccagatcaaaaggaatacattcgtgggcacaccattctggatggccccggaagtgattaaacagagcgcctacgactcaaaggccgatatctggtctctgggcattacagctatcgagcttgcacgaggtgaaccacctcacagcgaactccaccctatgaaagtcctctttctgattcccaaaaacaaccctccaacactggaggggaattattctaaaccactgaaagagtttgtcgaagcatgcctcaacaaggagccatctttcaggccgaccgccaaggagctgctaaaacacaagttcattttacgcaatgctaaaaaaaccagctacctaaccgaactgatcgatcgctataagagatggaaggccgaacaaagccacgacgacagctcctctgaggactctgacgccgaaactgatggccaggcctcaggcggcagcgactcgggcgactggatctttacaatccgagagaaggaccctaagaacctcgaaaatggagccttgcagccttccgaccttgatcggaacaaaatgaaagacatcccaaagaggccttttagccagtgcctgtctaccatcatctcacctctgtttgcggagcttaaggaaaagtcccaggcttgcggagggaacctgggaagtatagaggaactcaggggggctatttatttggctgaggaagcttgtccaggcataagcgataccatggtggcccagctcgtccagcgccttcaaaggtccattcacggcaatcaggcacccccggactgccaccttgcacaagtgcaagctttcggaggaagcgggtgtgttctggggagccggagcgtgtag

SEQ ID NO: 204721 - DNA, 672 bp, synthetic construct
  misc_feature 1..672: note = Description of Artificial Sequence: Synthetic coding sequence
  source 1..672: mol_type = other DNA
atggcccccgaggtgatcaagcagagcgcctacgacagcaaggccgacatctggtctctcggtatcactgccattgaactcgcgcgaggggaaccaccacactccgagctacatcccatgaaagttcttttcttgattccaaaaaataatccgcccacacttgagggaaattacagtaagcccctgaaagaattcgtggaagcttgccttaacaaagagccatcttttcgccctaccgctaaagagctgctgaagcataagttcatcctccgtaacgccaaaaagacctcgtatctgactgagcttattgaccgctacaaaaggtggaaagctgagcaatcccacgacgactcctctagtgaggactccgatgccgagaccgatggccaggcgtctggaggcagtgacagcggcgactggatctttacaatcagggagaaagaccctaaaaacttagaaaacggcgcccttcagccctctgacctggatcgcaacaaactgaaggagaagtcgcaggcatgtgggggcaatcttggctcaatcgaagagctaaggggcgcaatctacttggctgaagaagcttgccccggcatttccgataccatggtcgcccagttggtacagaggctgcagcggtattccctgtccgggggaggaacatcgagtcattag

SEQ ID NO: 204722 - DNA, 1332 bp, synthetic construct
  misc_feature 1..1332: note = Description of Artificial Sequence: Synthetic coding sequence
  source 1..1332: mol_type = other DNA
atggacagccgggcccagctgtggggcctggccctgaacaagcggcgcgccacgctcccccaccctggcggaagcacaaacctgaaagcagaccctgaagagttgtttaccaagctggaaaagatcggaaagggttctttcggggaagtttttaagggaatagataaccggacacaaaaggtggtcgcgattaagattattgacctggaggaggccgaagacgagatcgaagatatacaacaggaaattactgtcctgagccagtgcgattctccctacgtaacaaaatattacggaagctacctgaaagatactaagctttggatcataatggaatacctgggcgggggctctgcacttgatctgctggagcctgggcctctggatgaaacacagattgccaccatccttagagagatcctcaaaggactcgactatctgcacagtgaaaagaagatccatcgggatattaaagctgctaacgtgctgttgagcgaacatggggaagtgaagctggctgattttggagtggcgggccaactcactgacacccagatcaaaaggaacaccttcgtgggcacaccgttttggatggcaccagaggtgataaaacagagtgcttacgatagcaaagcagatatatggtcactaggaataactgccatcgagctggcccgtggagagcctccccactccgaactgcatcctatgaaggtgctgtttctgattccaaaaaacaatccgccgactcttgagggcaactactcaaaacccctgaaggagtttgtggaggcttgcctgaataaagagccgtcttttcggccaacagcaaaagagctgttgaagcacaagtttatcctgcgcaatgccaaaaagacctcttatctcacggagctgatcgacaggtataaaagatggaaagcagaacaatcacatgacgatagttccagtgaggacagtgatgcagagaccgatggccaggcctctggtggaagcgactcaggcgattggatatttacaatccgcgagaaggatcctaaaaatctggaaaacggagcacttcagccatctgatttagacagaaataagatgaaagatattccaaagcggcctttttctcaatgcctcagcactattatctcaccactctttgccgagcttaaggaaaagagtcaagcttgcggtggcaatttagggtcaattgaagagctcaggggcgctatctacctggcagaagaagcttgtcctggaatcagcgacaccatggtggcgcagcttgtgcagaggctgcagcggtactcactgtcggggggaggcacctcttcccactag

SEQ ID NO: 204723 - DNA, 1296 bp, synthetic construct
  misc_feature 1..1296: note = Description of Artificial Sequence: Synthetic coding sequence
  source 1..1296: mol_type = other DNA
atggcccacagccccgtgcagagcggcctgcccggcatgcagaacctgaaggccgatccagaggagctctttacaaagttggaaaagatcggcaaaggtagtttcggagaggtttttaagggtatcgacaaccgcacacagaaggtggtggcaataaagatcattgatctggaagaagccgaggacgaaatagaggacattcagcaggagatcaccgtgctgtcccagtgcgactccccgtatgttaccaaatattatggatcttacctcaaagacacgaaactctggataataatggagtatctcggcggaggaagtgccctcgacctgctggaacctggccctctggatgagacccagatcgcgactattctacgcgagatcctgaaaggcctggactatctccactcagagaaaaaaatccaccgggacattaaggctgccaatgtgctgctgtccgagcacggagaggttaaacttgccgactttggggtggcaggccagctgaccgatactcagatcaagagaaacactttcgtcggcactcctttctggatggccccagaagtgatcaaacaaagcgcctatgactcaaaagctgatatctggtcattggggattacagccatcgagttagcaaggggcgaacccccacatagcgagcttcaccccatgaaggttctgtttttaattcccaaaaataaccccccgacattggagggcaattactcaaagccactgaaagaattcgtggaggcctgcctgaacaaggagccctcgtttcgtccaacggccaaagagttactgaagcacaagtttatcctcagaaatgctaaaaaaacctcatacttgactgagctgatcgatcggtacaaacgctggaaggccgagcagagccacgacgactctagttctgaagattccgacgccgaaactgatggtcaagcctctgggggatcggactcaggagattggatttttaccatccgggagaaagaccccaagaacctggagaacggcgctctccagccatcagatttagataggaacaaaatgaaggatattcccaagagaccatttagccagtgcctgagcaccatcataagcccactcttcgcagagctgaaggaaaaatctcaggcttgcggcgggaatctcgggagcatcgaggaactcaggggggcgatttacttggcagaagaagcatgtcctggcatcagcgacacgatggtggcccaactggtacagcgacttcagagatatagcctaagtggaggtggtacgtctagccactag

SEQ ID NO: 204724 - DNA, 1239 bp, synthetic construct
  misc_feature 1..1239: note = Description of Artificial Sequence: Synthetic coding sequence
  source 1..1239: mol_type = other DNA
atggcccacagccccgtgcagagcggcctgcccggcatgcagaacttgaaggccgatccagaagaattgtttaccaagttggagaagatcgggaagggcagcttcggggaggtgtttaaaggcatcgataaccgcacccagaaagtggtggctattaagatcattgacttggaagaggcggaagatgaaattgaggatatccaacaggagattactgtgctgagccaatgtgatagcccttacgtcacgaagtactatggctcttacctcaaacttgaacctgggccacttgacgagactcaaatcgccaccattttgcgcgagatcctgaaagggttagactaccttcatagtgaaaagaagatacaccgagatattaaggccgccaacgtcctcctgagtgaacatggagaggtgaagctagctgatttcggcgtggcgggccagctgacagatacgcagatcaaacgcaacaccttcgtaggtactccattttggatggcgccagaggtaattaagcaatccgcctatgatagtaaggcggatatctggtccctggggattacggcaattgaactagcgaggggtgagcctccacattcagaacttcaccctatgaaagtcctgttcctgattccaaagaataacccaccgaccctggaagggaattactctaagcccttaaaagaattcgtggaggcctgtctaaataaagaaccctcattccggcccaccgccaaagagctcctcaagcataaattcatcctgcgtaacgctaaaaagacctcgtatctgaccgagctaatcgacaggtacaaaaggtggaaagcagagcagtctcatgacgactcctccagtgaggatagcgatgctgaaaccgatggtcaggcatccggagggtccgactccggtgactggatctttaccattagagaaaaagatccaaagaaccttgaaaacggcgctttacaaccatctgaccttgataggaataagatgaaagacatccccaaacgacctttctctcagtgcttaagtactatcattagtccgctcttcgctgagttgaaagagaaatcccaggcttgcggcggcaacctgggctctatcgaggagttgcgaggcgccatctacctggctgaggaggcttgcccgggcatttcggacacaatggtggcccaactcgtgcagagacttcagcgatacagtctgtctgggggggggacgtccagccactag

SEQ ID NO: 204725 - DNA, 1029 bp, synthetic construct
  misc_feature 1..1029: note = Description of Artificial Sequence: Synthetic coding sequence
  source 1..1029: mol_type = other DNA
atggcccacagccccgtgcagagcggcctgcccggcatgcagaacctgaaggcggacccagaggaactctttaccaaactggagaaaatcggaaagggatcgtttggcgaagtgttcaaaggcatcgacaataggacccagaaagtcgtcgccattaagattatagatttggaggaagctgaagatgaaatcgaagatatccaacaggaaattacagtcttgtcccagtgcgactccccctatgtaaccaaatactatggcagctatctgaaggataccaagctctggataatcatggaatatctgggcgggggatctgcgctggacttacttgaacccgggcccctcgatgagacgcagattgcgacgatcctccgcgagatcctgaagggactggactatttacactccgaaaagaaaatccacagggatatcaaagctgccaatgtgctcctgagcgaacatggggaagttaaattagctgatttcggggtggctggtcagttaactgatacacagattaaaaggaatacgttcgtgggaactcctttttggatggctcctgaggtcatcaagcagtccgcttacgattccaaagcagacatttggtctctcggaatcaccgctattgagctcgcccgcggtgaacctccacacagtgaattgcatccgatgaaggtccttttccttatccctaaaaacaaccctcccacattggagggaaattactcgaagcctctgaaagaatttgttgaagcctgtctgaacaaggaaccttccttccggcccaccgctaaggagctgcttaagcacaagttcatcctcaggaatgctaagaagacctcttacctaacagagctgatcgataggtataagcgctggaaagccgagcaatcacacgacgattcatcttccgaggacagcgatgccgaaaccgatggacaggcttctggaggatcagactcaggggattggatctttacaataagggaatggagtagttcagccataggcttgggacagaagtag

SEQ ID NO: 204726 - DNA, 2991 bp, synthetic construct
  misc_feature 1..2991: note = Description of Artificial Sequence: Synthetic coding sequence
  source 1..2991: mol_type = other DNA
atggacgaggacacccactacgacaaggtggaggacgtggtgggcagtcacatcgaagacgccgtaaccttttgggcccaatctatcaatagaaacaaagacatcatgaagatcggatgtagcttgtctgaagtctgtccacaggcatctagtgttttgggaaacttggatcccaacaaaatttatggggggctgttttctgaggatcagtgttggtaccgttgtaaggtgctgaagatcatctcagtggaaaagtgcctggtgagatatatagactatggcaacaccgaaatattgaatcgttcagatattgtagagattccgctggagcttcagttttcttccgtcgccaaaaagtacaagctgtggggattacacataccctcagaccaggaggtgacccagttcgatcaaggaaccacattcctcggcagcctcatcttcgaaaaggagattaaaatgcggataaaggccactagcgaggacggcacagtcatcgctcaggccgaatatgggagcgtggacatcggagaggaggtgctcaaaaagggattcgctgaaaaatgtcggctggcttcaaggactgatatctgtgaagaaaagaaactggaccctggccaactagtgctccggaacctgaagtctcccatccctttgtggggccatcgcagcaaccaatctaccttcagccgtccaaagggccacctctccgaaaagatgactctggatctaaaagatgagaatgacgctggtaacctgatcacatttcctaaggagtcacttgccgttggagattttaacctgggcagcaatgtgagtctggagaagatcaaacaggatcagaaacttatcgaagaaaacgaaaaactaaagacagagaaggatgctttgctcgagagctataaagcacttgagctaaaggttgagcagatcgctcaggaactccagcaggagaaggctgcagctgtggacctaactaaccacctggagtacacactgaagacttacatcgacacacgtatgaagaacttggccgccaagatggaaatcctgaaagaaatgcggcatgtcgacatatccgtacgcttcgggaaggacctgtccgacgcaatccaagtgcttgacgagggatgctttaccacccccgccagtttgaatggccttgaaatcatctgggctgagtacagcctcgcacaggaaaatatcaaaacctgcgagtatgtgagcgaagggaatatcttgatagcgcagcgcaacgaaatgcagcaaaaattgtatatgagcgtagaagacttcatcctagaggtcgatgagtcatctctaaataagcggctcaaaaccctgcaggacctgtccgtgtctctggaagccgtgtacggccaggctaaggagggcgccaattcggatgaaattctgaagaaattttatgactggaagtgcgataagcgtgaagaatttacctctgtgcgtagcgaaacagacgcgtctttgcacaggctggtcgcctggttccagcgcaccctaaaagtgtttgatctgtctgttgagggcagtttgatctcggaagacgccatggacaacattgacgagattctggaaaaaaccgaatcttcagtgtgcaaggagctagaaatcgcactcgtggatcagggcgacgccgacaaggagatcatctcaaatacttactctcaggtgcttcagaagattcactccgaagagcggctgatcgcaacggtgcaggcgaagtataaggactccatcgagttcaagaagcagctgatcgagtacctgaacaagtcaccatccgttgaccaccttctgtcaatcaagaagacattgaaatccctgaaagcgcttttgcggtggaaattggtggagaagtcaaacctggaggagtctgatgatcctgacggttctcagatagagaagattaaggaggagatcactcaactgcggaacaacgtgttccaggaaatttatcatgagcgcgaggagtacgaaatgctcactagcttggcccagaaatggtttcccgaacttccactcctgcacccagagatcggactcctcaagtatatgaacagcggtggccttttaactatgtcactcgagcgggatcttctcgacgccgagccaatgaaagagctttcctccaaacggcctctcgtgcgcagtgaggtgaacggacaaataatcctgttaaagggttactcggtggatgtcgacacagaggcaaaagtgattgagcgagctgcaacctaccaccgcgcttggagagaggctgagggcgattctggcctgttacctctgatattcctctttctttgcaaaagcgatcctatggcgtatttgatggtgccgtattacccacgcgctaacttgaatgctgtgcaagccaacatgcctctcaacagtgaggagacgctgaaggtgatgaagggcgtggctcaaggcttacacaccctccacaaagctgatattattcatgggagcctgcatcaaaacaatgtattcgcgctcaacagggagcagggcatcgttggagatttcgacttcacaaagagtgtttcccaaagggcctccgtcaacatgatggtaggggacttgagcctgatgagcccagaactgaaaatgggcaaaccagcttcaccaggtagtgacctctatgcttatggttgcctgctcctatggctctctgtccagaaccaagagtttgagatcaataaggacggcatccctaaagtggaccagttccacctcgacgataaagttaaaagcctgctgtgttccctgatctgttacaggagctccatgaccgcagagcaggtcttaaatgctgagtgctttttgatgccaaaagaacagtcagtccccaaccctgagaaagataccgagtatactctctacaaaaaggaggaggaaattaaaacagagaatctggacaagtgcatggagaagactcgcaatggcgaggctaactttgactgttag

SEQ ID NO: 204727 - DNA, 3060 bp, synthetic construct
  misc_feature 1..3060: note = Description of Artificial Sequence: Synthetic coding sequence
  source 1..3060: mol_type = other DNA
atgtgggtgcagggccacagcagccgggccagcgccaccgagagcgtgtccttctctggtatcgtgcagatggatgaggatacccattacgacaaggtcgaggacgtggtcggttctcatatcgaggacgcggtgacattttgggctcaaagtatcaaccgcaacaaagatatcatgaaaatcggatgctccctgtcagaagtctgcccccaggcctcatctgttcttggcaacctggacccgaacaaaatctacggagggctgttcagtgaggaccagtgctggtatcgctgtaaggtgctgaagatcatatctgtggagaaatgtctggtaaggtacatcgattacggcaacacagaaatcctaaatcggagcgatatcgtggaaatcccattagaactgcagtttagctcggttgccaaaaaatacaaactttggggcctccacataccctccgaccaagaggtgacacaatttgaccagggcacaacctttttaggcagtctgatcttcgagaaagaaataaagatgcgaatcaaggctacttcagaggacggtacagttatcgcacaggcagagtacggcagcgtggatataggagaggaggtgctcaagaagggatttgccgaaaagtgccgcctcgcgtcccggaccgatatttgtgaagaaaagaagctggatccagggcagttagtgctacgtaatctgaagtcgccaatcccactgtggggtcatcgatccaaccaatcaacattcagtagacccaagggccatttaagcgaaaagatgactctggatctgaaagatgagaacgatgcaggcaatctcattacattcccaaaggagtctctcgccgtaggcgacttcaatctgggctcaaatgtctctctcgagaagatcaaacaggatcagaagttaattgaggagaacgagaaactgaaaacggaaaaagatgcactgctggagtcttacaaagcacttgagctgaaagtcgagcaaatcgcccaggaactgcagcaggagaaggctgccgccgtggatctcacaaaccacctggagtatacccttaaaacctatattgacacgcgaatgaagaatctggccgccaaaatggaaattcttaaagagatgcggcacgttgacattagtgttcggtttgggaaagatttaagtgacgccattcaggtcctcgatgaaggatgctttactaccccggcctctctcaatggcctggaaattatctgggccgaatattctctcgcacaggagaatattaagacttgcgaatatgtcagcgagggcaacatcctcatcgcccagagaaatgagatgcagcagaaactgtatatgtcggtggaagatttcatactggaggtggacgagtcatcgctgaataagcgactgaagactctccaggatctgtctgtctccttagaggcagtgtacggtcaggctaaggagggcgctaactcagacgaaattctgaaaaagttctacgactggaagtgcgataaaagagaagagttcacgagcgtgagaagcgaaactgatgcatctctgcaccgtttggtggcttggtttcagagaaccttgaaagtgtttgacttgtcggtcgaaggcagcctcataagtgaagacgccatggataatatcgacgagatcttagagaagacggaatcatctgtctgtaaagaactggaaatagccctggtcgatcagggagatgccgataaagagattattagcaacacatattctcaggtgctccagaaaattcactcagaggaacgccttatcgcaacggtgcaggcaaagtacaaagactccattgagttcaaaaaacagctcattgagtatctgaacaagagtccctctgtggaccacctgttaagcatcaaaaagactctgaaatccctgaaggcgctgctccggtggaagctggtcgagaagtcaaatcttgaagagtccgatgaccccgacggaagtcagatcgaaaagatcaaggaggagataacgcagctgagaaataacgtgttccaggagatctaccacgaacgcgaggaatacgagatgcttacgtccctcgcccagaaatggttcccggagctcccattgctccatcctgagataggactgctaaagtatatgaacagtgggggattgttaacaatgtcacttgaacgggacttactggacgctgagcctatgaaggagcttagcagcaagcgacctcttgtgcggtcagaagttaacggccagataatactcctcaagggatactccgttgatgtagataccgaggcgaaggtgattgaaagagccgccacctaccatagggcctggagagaggccgagggcgattccggtctgctgcccctcattttccttttcctttgtaagagtgaccccatggcctatcttatggtgccatattacccccgggctaatctgaatgccgttcaggccaacatgcctctcaattcagaggagaccctcaaagttatgaaaggcgttgcccaagggttgcacacactccataaggctgacattatacatgggtccctccaccagaataacgtcttcgctctgaaccgcgaacagggaatcgtgggagattttgactttactaaaagcgtctcgcagcgggcgtcggtgaatatgatggtgggagatctgtctctaatgtctccagagctgaagatgggaaagcctgcaagtcccgggtcagatctgtatgcctatggttgtctgctcctttggctgtccgtccagaatcaggaatttgagattaataaagacgggataccaaaagtcgaccagttccacctggatgacaaagtgaagagcctgctttgtagcctaatatgttatcgatcttcgatgaccgccgagcaggtgctgaatgctgagtgcttcctcatgccaaaagagcagtcagtgccgaaccccgaaaaggacactgagtacacactgtacaaaaaagaagaagagatcaagaccgagaacttagataagtgcatggagaagacacggaatggggaagccaattttgactgttag

SEQ ID NO: 204728 - DNA, 2991 bp, synthetic construct
  misc_feature 1..2991: note = Description of Artificial Sequence: Synthetic coding sequence
  source 1..2991: mol_type = other DNA
atggacgaggacacccactacgacaaggtggaggacgtggtgggctcccatatagaagacgccgttacgttctgggcccagtccatcaaccgcaacaaagacatcatgaaaatcggctgcagcctttccgaagtctgtccccaggctagctccgtcctgggaaatctggaccctaacaagatctacggtggacttttttctgaagatcagtgctggtaccgatgtaaggtccttaagatcatatctgtcgaaaaatgcctagtccgctacatcgattatgggaatacggagattcttaacaggagtgacattgtggagattccactagagctgcagttcagctcagtggccaagaaatataaactatggggcctgcatattccttctgatcaggaagtgactcagttcgaccaggggacgacctttctcggaagccttatattcgagaaagagattaagatgaggatcaaggctacttctgaggatgggacagtaatcgcccaggctgaatatggcagtgtagacatcggggaggaagtcctaaagaaagggtttgccgaaaagtgcagactggcaagccgaaccgacatctgcgaggaaaagaaattggacccaggccagttggtgctacgcaatctgaagagtccgatacccctgtggggccatcgatctaaccagagcacgtttagtcgacctaaaggacaccttagtgaaaagatgacattggacctgaaagatgagaacgacgccggcaatctgatcaccttccccaaagagagtttagcggtgggagatttcaatctaggctccaacgtttccttggaaaagataaaacaagatcagaagctaattgaagagaatgagaaacttaagacggagaaggatgcgctcttagagtcatacaaggccctcgagctgaaagtcgagcagattgctcaggagttgcagcaggagaaggccgccgctgtcgacctcactaatcaccttgaatatacattgaaaacctacatagacactagaatgaaaaatctggccgctaaaatggaaatcttaaaggagatgagacatgtggatatttccgtccgctttggcaaggatctgagcgatgcgatccaagtgctggacgaaggatgttttacaactccagccagtctcaacgggctggagatcatttgggccgagtactccttggcacaggagaatatcaaaacttgtgagtatgtctcagagggaaacatcctgatcgcccagcgcaacgaaatgcagcaaaaactgtacatgtccgtggaagatttcatcctggaggtggacgaatcttcactgaataagcggctcaagacattgcaggatttgtccgtgtcattggaggccgtttatgggcaggcaaaagagggcgccaatagcgacgagatattaaagaagttttacgattggaaatgcgataaacgggaggagtttacgtctgtccgctcagagaccgatgcatcgttgcatagactggttgcgtggtttcagcggaccctgaaagttttcgacttgtcggtggaggggagcctgatatccgaggatgctatggacaacattgacgaaattctggaaaaaacggaatccagtgtctgtaaagaacttgaaatcgccctggtggatcaaggtgatgcagacaaagaaatcatttccaatacttattctcaagtgctccagaagattcacagcgaggaaagattgattgcaaccgtgcaggcaaaatacaaggactcaattgagttcaaaaagcaacttatcgaatacttgaacaagagcccgagtgtcgatcacctgttatccatcaaaaagaccttgaagtcactgaaagctctattgcggtggaaactggtagaaaaatccaatctggaggagtcggatgacccggatggaagtcagatcgaaaagatcaaggaagaaattacacagctccgaaacaacgtgtttcaagagatttaccacgaacgggaagaatacgagatgcttaccagcttggcacaaaagtggttcccagagttgcccctactgcacccagaaatcggcctgttgaagtatatgaactcaggtgggttgctcacgatgtccctggaaagagatttattagatgccgagcctatgaaagagctgtcttcaaaaagacctctggtgaggtccgaggttaacggtcagatcatcctactgaaggggtattcggtggatgttgacaccgaagctaaggtcatagaacgggcggctacatatcacagggcttggcgggaggcagagggagactcagggctgctcccactcatctttctcttcctctgtaagtccgatcctatggcgtacttgatggtcccttactacccaagagcaaaccttaatgcagtacaggcaaatatgccgttgaattctgaagaaaccctcaaggtgatgaaaggagtggcacagggactccacactttacacaaggctgacataatccacgggagtcttcaccaaaacaacgtgttcgcactcaaccgggagcagggaatcgttggcgactttgattttaccaagtctgtttcccaacgagcttccgtgaatatgatggtgggtgatctgagtctgatgtctcctgaactgaagatgggtaagcctgccagccccgggagtgacctgtacgcctatggctgcctcttgttatggctcagtgtccagaaccaggaatttgagataaataaagacggcattccaaaagtcgatcaattccatcttgatgataaagtcaaatccttattatgtagcttgatttgctataggtctagtatgactgccgaacaggtgctgaatgcggaatgctttctgatgcccaaagagcagagcgtgcccaatcctgaaaaggacactgagtatactctgtacaagaaggaggaagagatcaaaactgagaacctggataagtgcatggagaagactcgcaatggcgaagcaaattttgattgctag

SEQ ID NO: 204729 - DNA, 285 bp, synthetic construct
  misc_feature 1..285: note = Description of Artificial Sequence: Synthetic coding sequence
  source 1..285: mol_type = other DNA
atggacgaggacacccactacgacaaggtggaggacgtggtgggcagtcacattgaagacgccgtcaccttctgggcacagtctattaaccgcaacaaagacataatgaaaatcggttgctctctttctgaagtgtgccctcaggcaagctccgttctggggaacttagacccaaataagatctacggcggtcttttcagtgaggaccaatgttggtatcggtgcaaagtactcaaaattattagtgttgaaaagtgcctggtgaggtatatagactatggatag

SEQ ID NO: 204730 - DNA, 132 bp, synthetic construct
  misc_feature 1..132: note = Description of Artificial Sequence: Synthetic coding sequence
  source 1..132: mol_type = other DNA
atggacgaggacacccactacgacaaggtggaggacgtggtgggctctcacatagaggacgccgtcaccttttgggcacagagcattaaccgtaacaaagacatcatgaagatcggatgctccttgagctag

SEQ ID NO: 204731 - DNA, 2991 bp, synthetic construct
  misc_feature 1..2991: note = Description of Artificial Sequence: Synthetic coding sequence
  source 1..2991: mol_type = other DNA
atgtgggtgcagggccacagcagccgggccagcgccaccgagagcgtctctttctcgggaatcgtgcaaatggatgaagacacccattacgacaaggtagaggacgtggtggggtcacacattgaggacgcggtgacattctgggctcagagcataaacaggaacaaggacataatgaagattggctgctctctcagcgaggtatgtcctcaggcgtctagtgtgctgggaaatttggaccctaataaaatatacggcggcttgttctcagaggatcaatgttggtatagatgtaaagtgctgaaaatcattagtgttgaaaagtgccttgtgcgatacattgattatggaaacaccgaaatactaaacaggtccgacatcgtggagatccccctggagttgcagttctcatccgtggccaagaaatataagctttggggcctacatatcccctctgaccaggaggtgacacagtttgatcagggcacgactttcctcgggagccttatctttgagaaggagattaaaatgaggatcaaagctacctcagaagacgggaccgttatagctcaggctgaatatggtagcgtagatatcggggaggaagtcctgaagaagggttttgctgagaaatgcaggcttgcttcccgtacagacatatgcgaggagaaaaagcttgaccccggacagctggttctgagaaaccttaagagtccaattccgctgtggggccaccgctcaaaccagagcaccttttcgcgaccaaagggccacctgagcgaaaagatgactttggatttgaaagacgagaatgacgccggtaatctgattacttttccgaaggaatccttggccgtgggtgattttaacttaggctccaatgtgagccttgagaagatcaagcaggaccagaaactgatcgaggaaaatgagaaactaaagactgagaaagacgccctcctggaaagctataaggctcttgagctgaaagtggagcaaatcgctcaggaactgcagcaagagaaggctgcagcagtggatctcaccaaccatctggagtacacccttaagacgtacatcgacactcggatgaaaaacttggccgccaagatggagatcttgaaggaaatgaggcacgtcgatattagcgtgcgatttggtaaagacctgagcgatgcaatccaggtgctcgacgaaggctgttttaccaccccggcctcactcaacggcctagagatcatatgggcagagtactcactggcccaagagaacattaagacctgtgagtatgtaagcgagggaaacattctcattgcacagcgtaacgagatgcagcaaaaactatacatgtccgtggaagatttcattttagaggttgacgagagcagcttaaacaagcggctgaagacgctccaggacctatccgtatcactggaggcggtgtacggccaggccaaggaaggagccaacagcgatgagatcctgaaaaaattctacgattggaaatgcgataaacgcgaggagtttactagtgtgcggagtgaaaccgacgccagtctacatcggctcgtggcttggtttcagagaactctgaaggtgttcgatctgtctgtggaaggatcactcatctcggaggatgccatggacaatatcgacgagatactcgagaagactgaaagctcagtgtgtaaagaattagagatcgccctggtggatcagggagatgctgataaagagattatcagcaatacatacagccaagtcttacagaagattcactccgaggagcggctcatcgccacagtccaagccaaatacaaagactccattgaattcaaaaagcagctgatcgagtatctgaataagtctccaagtgtggaccacttacttagcatcaaaaagacactgaaatccctcaaagctctgctgagatggaagttggtggaaaaatccaatcttgaggaatcagatgaccctgatgggtcccaaattgagaaaataaaggaagaaataactcaacttagaaataacgttttccaagagatttaccatgagcgtgaggaatatgaaatgctgacctcacttgctcagaagtggtttcccgagctgccattgctgcatcccgagattggactgctaaagtacatgaacagcggaggcctccttactatgtccttagagcgtgacctgctcgacgcagagcctatgaaggagctgtcgtccaagagacccttggtgcgaagcgaggtgaacggccaaatcattctgctgaaggggtattctgtcgatgtggatacagaagcaaaggtgattgagcgggcagcgacctaccacagagcctggcgagaggccgaaggggatagcggtctcctgcctctgatttttctgtttctctgtaagtctgaccctatggcttatcttatggtgccatactatcctagagccaatctgaatgcagtgcaggcaaacatgccacttaactccgaagaaacacttaaagtgatgaagggtgtcgcccagggtctgcacaccctgcacaaggcagacatcatccatggcagccttcaccagaacaacgtgttcgcactgaaccgggagcaaggcattgttggtgatttcgatttcaccaagagcgtcagtcagagggcatcagttaatatgatggttggggacctgagtctcatgtctcctgaattgaagatggggaaacccgccagcccagggtcggacttgtatgcctacggctgtctgctcctatgggatgacaaggtgaagtctctcctgtgtagccttatctgctaccggtctagcatgacggcagaacaggtattgaacgccgagtgcttccttatgccaaaagaacaaagtgtccctaacccggagaaggatactgaatacaccctgtacaaaaaggaagaagagataaaaacagagaaccttgataagtgcatggaaaagactaggaatggggaggcaaactttgactgctag

SEQ ID NO: 204732 - DNA, 1545 bp, synthetic construct
  misc_feature 1..1545: note = Description of Artificial Sequence: Synthetic coding sequence
  source 1..1545: mol_type = other DNA
atggccgacagcggcctggacaagaagagcaccaagtgccccgactgctcgtcagcctcacagaaggacgtgctgtgcgtctgctcatctaaaactcgcgttcctcccgtccttgttgtggagatgtcgcagacgtcatccataggctcagctgaaagtctgatctctttggagagaaaaaaggagaagaacattaatcgggacataacatctcgcaaggacctgcccagcagaacttccaacgtggaacgaaaggcttcacagcaacagtggggtcgagggaatttcacagaaggaaaggtgccgcacatccgcatcgaaaatggcgcagccatcgaagaaatttacacgtttgggaggatccttgggaaaggcagcttcggtatcgttatagaggccacggataaagagaccgaaaccaagtgggctataaagaaagtgaacaaggaaaaagccggcagctccgccgtgaagctgttagagcgagaagtgaatatcctcaaatcggtgaaacatgaacatatcatccatctggaacaggtcttcgagactcctaagaagatgtaccttgtcatggaactgtgcgaggacggtgagctgaaggagattctggacagaaaaggccacttttcagagaacgagacccgctggattatccaatcgctggcctccgccatcgcatatctccacaacaatgatattgtgcaccgcgatctgaagctggaaaatatcatggtcaaatcctccttaattgacgataataatgaaatcaatctaaatataaaagtgacggacttcggactggccgtgaaaaagcaatcccgctcagaggcaatgctccaggctacatgcggaacaccaatttacatggctcccgaggtgattagcgcccacgactactcacaacagtgtgacatctggtcgatcggggtcgtgatgtatatgttgcttcgaggtgaaccgcctttcttagcgtcctccgaagagaaactgttcgaactgatccggaagggagagctccacttcgagaacgcagtgtggaactcaatctcggactgtgcaaagtccgtgctcaaacagctgatgaaagtcgaccccgcgcatcgaattactgcaaaggagctcctcgacaaccagtggctgaccgggaacaagctgtcgagtgtgaggccaacaaacgtgctggaaatgatgaaggaatggaaaaataaccctgaatctgtggaggagaatactacagaggagaaaaataagccatctaccgaagagaagcttaagagttatcagccatggggcaacgtccccgacgcgaattacacctcagacgaggaggaggaaaagcaatccactgcttacgagaagcagttccctgccacatcaaaggacaattttgatatgtgctctagctcatttactagcagcaaattgctccccgctgaaatcaagggtgagatggaaaagactcccgtcacaccttcgcagggcactgccactaaatacccagctaagtctggtgctctctcacgtacgaaaaaaaagctttag

SEQ ID NO: 204733 - DNA, 1545 bp, synthetic construct
  misc_feature 1..1545: note = Description of Artificial Sequence: Synthetic coding sequence
  source 1..1545: mol_type = other DNA
atggccgacagcggcctggacaagaagagcaccaagtgccccgactgcagttcggcgagccagaaggatgtcttatgcgtctgctcctccaagacccgggtaccaccggtcctcgtggtcgagatgtctcagaccagctctataggaagtgcggaatctctgatcagcctcgaacggaaaaaggagaagaatataaacagagacatcaccagtcgcaaggaccttccaagccggacatccaatgtggagcggaaggcttcccagcaacagtggggaaggggcaactttaccgaagggaaagtgccccatatacgcattgagaacggtgctgctattgaagagatctacaccttcggaaggatcctagggaaaggtagctttgggatcgtgatagaagccaccgacaaggagactgagaccaaatgggccatcaagaaggtgaacaaggaaaaagcgggatcttctgctgttaagcttctggaaagagaagtgaacatactgaagtcggtcaagcacgaacacattattcatttggagcaggtgtttgaaacacccaaaaagatgtacctggttatggaactgtgcgaggatggcgaacttaaagagatccttgatagaaaagggcactttagtgagaacgagacaagatggattattcagagtttagctagcgccattgcctacctgcacaataacgacatcgttcatagagacctcaaactggaaaacataatggtgaaaagtagtctgatcgacgataataatgaaatcaatctgaatatcaaggtcacagattttggactggctgtaaaaaaacagtctcggtctgaagccatgctgcaggctacatgtggaacacctatctatatggcccctgaggtgattagcgcccacgattactcccaacaatgcgatatttggtccataggcgtcgtgatgtatatgctgttgcggggcgaacccccattcctcgcatctagcgaggaaaagctgttcgagctcattcgtaaaggcgagctgcatttcgagaatgccgtgtggaacagcatttccgactgtgcgaaaagtgtgctgaagcagctcatgaaggtggatcctgcccatcgtattacagccaaggagctcctggacaaccagtggcttactgggaacaaactcagttctgttcgccccacaaatgtccttgagatgatgaaggagtggaagaacaaccccgaaagcgttgaagaaaatactaccgaagaaaagaataaaccaagcaccgaggagaagctcaagtcttaccaaccctggggcaatgtgccggatgcgaattacaccagcgacgaagaggaggaaaagcagagtaccgcgtacgaaaagcagttccctgccacctcaaaggacaatttcgatatgtgttcttcatcatttaccagctccaagttacttcccgcagagatcaagggagagatggaaaagactcccgtcaccccctcgcaaggcacagcaactaagtatcccgccaagtcaggggccctttccagaaccaagaagaaactgtag

SEQ ID NO: 204734 - DNA, 1347 bp, synthetic construct
  misc_feature 1..1347: note = Description of Artificial Sequence: Synthetic coding sequence
  source 1..1347: mol_type = other DNA
atggccgacagcggcctggacaagaagagcaccaagtgccccgactgttctagcgctagtcagaaggacgtgttgtgcgtttgcagctcaaaaacccgagtgcctcctgttctcgtggtcgagatgtctcaaaccagctccatcggcagtgctgagtcgctgatcagtctggagagaaagaaagaaaaaaacattaacagggacataacaagccgaaaggaccttccaagcaggactagcaacgtggagcgcaaggctagtcaacagcagtggggacgtggcaacttcaccgaggggaaggtcccccacatcaggattgagaacggcgccgcaatagaagagatttatacattcgggcgaattctaggtaagggaagcttcggcatcgtgattgaggccaccgataaggagacggagaccaagtgggccataaaaaaagttaacaaagaaaaggctggatcatctgcagtaaagctgctcgagcgcgaggtaaatattctcaagtctgtcaagcatgagcacatcatccatctggagcaggtcttcgagaccccaaagaaaatgtatttggtgatggagttatgcgaagatggggagctgaaggagatcctcgacagaaagggtcatttcagcgagaacgagactagatggatcatccagtcactggcttcggcgatcgcctacttgcataacaacgacatcgtgcaccgcgatctcaaactggaaaatattatggttaaaagctcgctgatcgacgataacaatgagataaacctcaacattaaggtgaccgactttggtcttgctgtcaagaaacagagcagaagtgaagctatgttgcaagcaacttgtggaacaccgatctacatggcacccgaggtcatctctgcacacgattactcacaacagtgtgacatctggagtatcggagtggtaatgtatatgcttttgaggggagagcctccttttctggcttcctccgaggaaaagctatttgagctgattagaaaaggagagctccacttcgaaaatgccgtctggaatagcatcagcgactgtgcaaaatccgtgctcaagcaactcatgaaagtcgatccagcacatcggattacagcaaaggagctactcgataaccaatggctcacaagcacagcctacgaaaagcagttccccgcaacctcaaaggataatttcgatatgtgttcatcatcgttcacctcttctaagctgctgccggccgaaatcaagggggaaatggagaagacccctgtgacacccagtcaggggaccgccacaaagtacccggctaagagcggggccctgtcacgtacaaagaagaaactttag

SEQ ID NO: 204735 - DNA, 192 bp, synthetic construct
  misc_feature 1..192: note = Description of Artificial Sequence: Synthetic coding sequence
  source 1..192: mol_type = other DNA
atggccgacagcggcctggacaagaagagcaccaagtgccccgactgctcctccgcttcccaaaaggatgtgctgtgcgtgtgttcatcaaagactcgcgtgcctccagttctcgtggtggagatgtcacaaacttcctccattggatcggcagaatcccttatctctttggaacgcaagaaggaaaagtag

SEQ ID NO: 204736 - DNA, 1545 bp, synthetic construct
  misc_feature 1..1545: note = Description of Artificial Sequence: Synthetic coding sequence
  source 1..1545: mol_type = other DNA
atggccgacagcggcctggacaagaagagcaccaagtgccccgactgcagtagtgcatctcagaaggatgtgctgtgtgtctgttcatctaaaactagagtgcccccggtcctggttgttgagatgtcacaaacctcttcaatcggttcggccgagtcactgattagcctggagcggaaaaaagaaaagaatattaaccgggacatcacatctcgtaaagacctgccgtcgcgcactagtaacgttgaacgaaaagcatcccagcagcagtggggtcgcggaaacttcaccgaggggaaggtgcctcatattagaatcgagaacggcgccgcaattgaggagatatacacgtttggaagaatattagggaaaggctccttcggtatcgtcattgaagccactgacaaagagaccgagactaaatgggcgataaaaaaagtgaataaagagaaggcaggttcctcagccgtaaagctgttggagcgggaggtgaatatactgaagagcgtgaagcacgagcatattatccatttggaacaagtctttgaaacccccaaaaagatgtatctggtgatggaactgtgcgaagatggggaactgaaagagatacttgaccgaaaagggcatttcagtgagaatgagacaagatggattattcagagtctggcgtctgccatcgcataccttcacaacaacgacattgtacacagagatttgaagcttgaaaacataatggttaaaagcagtctgattgatgacaacaacgagatcaatttgaacattaaggtgactgactttggattggccgttaagaagcaatcaaggtcagaagcaatgctacaggccacttgtggaactcccatctatatggcacctgaggttatctccgcccacgattacagccagcagtgtgacatctggtcaataggcgttgtgatgtacatgctgctccgcggagagccccctttcctcgcctcatctgaggaaaaactcttcgaactgattcgcaaaggagaactgcacttcgagaatgcagtttggaactccatcagcgactgcgcaaagagcgtgttgaagcaactgatgaaggtcgatcccgcacatcgcattaccgccaaggaactgctggacaaccaatggttgacaggcaataaacttagctccgttcgtcctacaaatgtgctagagatgatgaaggaatggaagaataaccccgagtccgtcgaagagaatacaacagaagaaaagaacaaaccaagcacagaggaaaagctcaaaagctatcagccgtggggaaatgtgccagacgctaactacacctccgatgaggaggaggagaaacagtcaaccgcatacgagaagcagttcccagccacttctaaggacaattttgacatgtgttcctctagtttcacaagcagcaagctcctgccagcggaaattaaaggtgaaatggaaaaaacccccgtcacacctagtcaagggaccgccaccaaatatcctgccaagagcggtgcccttagcagaacaaagaagaaactgtag

SEQ ID NO: 204737 - DNA, 114 bp, synthetic construct
  misc_feature 1..114: note = Description of Artificial Sequence: Synthetic coding sequence
  source 1..114: mol_type = other DNA
atggccgacagcggcctggacaagaagagcaccaagtgccccgactgctctagcgctagccaaaaggatgtgctgtgtgtttgtagtagcaagacaagagtgccccctgtgtag

SEQ ID NO: 204738 - DNA, 516 bp, synthetic construct
  misc_feature 1..516: note = Description of Artificial Sequence: Synthetic coding sequence
  source 1..516: mol_type = other DNA
atggccgacagcggcctggacaagaagagcaccaagtgccccgactgctcctctgcctcccagaaggacgttctatgtgtgtgcagctctaagacccgcgttcccccggtgctggtggtcgagatgtcccagacctcctcaattggcagtgcggagtcgcttatttctctggaaagaaaaaaggagaagaatattaaccgagacatcaccagcagaaaggatctcccaagtaggacgtccaacgttgagcgaaaggcaagccaacagcagtggggccgtggcaattttactgaaggaaaggtgcctcacattcggattgagaatggggccgcaatcgaggagatatatactttcggccggatattgggcaaaggctcttttggcatcgtcattgaggccaccgataaggaaaccgagaccaaatgggcaataaagaaggtcaataaggaaaaggctgggagtagcgccgttaagctgctagagagagaggtgaatatcctaaagtccgtgaagtag

SEQ ID NO: 204739 - DNA, 90 bp, synthetic construct
  misc_feature 1..90: note = Description of Artificial Sequence: Synthetic coding sequence
  source 1..90: mol_type = other DNA
atggccgacagcggcctggacaagaagagcaccaagtgccccgactgtagcagcgcatcccaaaaagatgtgctgtgtgtgtgcagctag

SEQ ID NO: 204740 - DNA, 1206 bp, synthetic construct
  misc_feature 1..1206: note = Description of Artificial Sequence: Synthetic coding sequence
  source 1..1206: mol_type = other DNA
atggagaccggcaaggacggcgcccggcggggcacccagagccccgaacggaaaagaagaagccccgtgcctcgcgcaccctccaccaagttgcgcccggctgctgccgcccgcgcaatggatccagtcgcggccgaggcacccggcgaagccttccttgcaaggaggcgaccggaagggggaggtgggtctgctcgccctcgttactcactgctggcggagatcggacgaggctcttatggggtggtttatgaagctgtcgctggccggagtggagcaagagtggcagttaagaaaattagatgtgacgcacctgagaatgtggaattggccctggctgagttttgggccttaacctcactgaaaaggaggcaccagaacgtcgtacaatttgaagagtgcgttcttcagcgaaatggtctagcgcaacgtatgtctcacgggaataagagctcacagttgtacctgcgtctggtggagactagcctgaaaggggagcggattttgggatacgcagaggaaccctgctacctttggtttgtgatggagttctgtgaggggggcgacctcaaccagtatgtcctctcaagacgccctgatccagcgaccaacaagtccttcatgctccagttgacctctgccattgcattcttgcacaagaaccacatcgtgcacagggatctgaaaccagacaatattctcatcaccgaacgttccggcacgcccatattgaaggtcgccgacttcggcctgtcaaaagtctgtgcgggtctggctccaaggggaaaagaggggaatcaggataacaaaaatgtgaatgtcaataagtactggctgtcttcagcatgtgggtctgatttctatatggctccagaagtatgggaaggtcactacaccgctaaggcagacatctttgcgctcgggattataatctgggcaatgatcgaacgcataacgtttatagactcagaaacgaagaaggaactgcttggcacttatattaagcagggaacagagattgtgccagtgggcgaggcgctgctcgagaatcctaagatggagctccatatacctcagaagcgccgaacttccatgagtgagggcatcaaacaacttctgaaggacatgctggctgcaaaccctcaggacaggccagatgctttcgaactcgagactaggatggaccaggtgacttgcgctgcctag

SEQ ID NO: 204741 - DNA, 1605 bp, synthetic construct
  misc_feature 1..1605: note = Description of Artificial Sequence: Synthetic coding sequence
  source 1..1605: mol_type = other DNA
atgggccaccaggagagccccctggcccgggcccccgccggcggcgccgcctatgtgaaacgtctgtgcaaaggcctaagctggcgggagcatgtcgagtcacatgggagcctgggagcacaggcttcccctgcctccgccgctgctgccgaaggcagcgcaacccggagggcgcgagccgcaacgtctcgagccgctcggtccaggaggcaacctggacccggcgctgaccacccacaagccggtgcccccggcgggaagagagccgcccggaagtggagatgcgctggccaggtcactatacagggacctgccccgccacgcccaagagcaggaaggcgcgacgaagccggaggggcacgcgccgccccactgcttcttccccccccccccgctgccatggaaaccggcaaggacggggcccgccggggcacgcagtcccccgagcgaaagcggcgttcccccgtgccccgagcaccgtctacaaagctgcgccctgcggccgcagctagagctatggacccagtagccgcggaggcacccggggaggcgttcctggcccggcggaggccagaggggggaggcggctctgcccgtccccggtacagcctgctggctgagatcgggcgtggatcatatggagtcgtgtacgaagccgtcgccggccgttctggtgcccgggtggccgtgaagaagatccggtgtgacgcccccgagaatgtggagttagccctggctgaattctgggccctcacttcactcaagaggcgacaccagaatgtggtgcagtttgaagagtgcgtgctgcagcgtaatgggctggctcaacgcatgtcgcacggaaacaagtccagtcaactgtaccttcggctggtcgagacctccctcaagggagaaagaattttgggttatgcggaagagccatgttacctgtggttcgtgatggagttctgcgaaggaggcgatctaaaccaatacgtgctatcccggcggccagaccccgccacaaacaaatcatttatgcttcagcttactagcgccatcgctttcttgcataagaaccatatcgtgcacagggatttaaagccagataacattttgatcaccgaaaggtccggcactcccatccttaaggtggccgatttcggattgtctaaagtgtgtgcggggcttgctcctcgcggcaaggaagggaaccaggataataaaaacgtgaacgtgaataaatactggctttcgtcagcatgcggatcggatttttatatggcccctgaagtgtgggaggggcactataccgctaaggccgatatcttcgctctcggcattatcatatgggccatgatagagcggatcacgttcatcgattccgaaactaagaaggagttgcttgggacctacataaagcagggaactgaaatagtacctgttggtgaggccctcctggaaaaccctaaaatggaactgcacatcccccagaaacggcggactagtatgagcgagggcattaagcagttacttaaagacatgttagcggccaacccccaggataggccagatgcttttgagctggagaccaggatggaccaagttacctgcgccgcctag

SEQ ID NO: 204742 - DNA, 489 bp, synthetic construct
  misc_feature 1..489: note = Description of Artificial Sequence: Synthetic coding sequence
  source 1..489: mol_type = other DNA
atggaccccgtggccgccgaggcccccggcgaggccttcctggccagacggcgaccagaagggggaggcggttctgcacggccaagatactccttactggcagagattggccgcggaagctacggagtcgtatatgaggcagtggcggggcggagtggggcccgagttgccgtgaagaagatacgctgcgatgctccagaaaatgtggaactggctctggcagaattctgggctctcacctcattgaagagacgccatcagaatgtggtccagttcgaagaatgtgtgcttcagcggaatggcctggctcagcgcatgtctcatggtaataaatcttctcagctctacctgcgtctcgtggagacatcattgaagggtagatttctgggcacccattcgttgactacttctccaccagaggacgggaggggctacagatggtggccggggagactggccatcagtcggcaacttgatcccgccatgtag

SEQ ID NO: 204743 - DNA, 3948 bp, synthetic construct
  misc_feature 1..3948: note = Description of Artificial Sequence: Synthetic coding sequence
  source 1..3948: mol_type = other DNA
atggagaagtaccacgtgctggagatgatcggcgagggcagcttcgggagagtttataaggggagacggaaatattcggcacaagtcgtcgctctaaaattcattccaaaattgggacggtctgagaaggagctacgtaatctgcaaagggagatcgagataatgagaggcctaagacaccctaacattgtgcacatgctggactccttcgagacagacaaagaagtcgtggtggttaccgattacgccgaaggagagctgttccagatattggaagatgacggtaagctcccagaagatcaagtacaggctattgcagcccagctggtgagcgcactgtattacctgcattcacatcggattttgcaccgcgacatgaagccacagaacattctgctcgctaaaggtggcggcatcaagttgtgcgacttcggttttgcaagagcaatgtcgactaacactatggtgctaacgagcatcaagggcacaccactttacatgtcccccgagcttgtggaggaaagaccttacgaccatactgcagatctgtggtcagtgggttgcattctgtatgagttggcagtgggtacaccgccgttttacgccacttcgattttccagttagtaagtctcattctcaaagaccccgtaaggtggccatctactatttccccttgctttaagaattttctgcaggggctgcttacaaaggatcccagacagcgtctaagctggcccgaccttctctatcacccattcatcgctggacatgttactatcattacggagccggcagggcccgatctaggtacgcccttcacctcccggctgccgccagaactccaggttctgaaggacgagcaagcccatagactagcccccaaaggaaaccagagtcgcatcctaacacaagcctacaaaaggatggcggaggaggccatgcagaaaaagcaccagaacacgggccctgctctagagcaggaggataaaactagtaaagttgcccccggcaccgccccactgcccagactgggcgctacgcctcaagaaagtagcctgctggctggcatcctggcctccgagctgaaatcatcttgggccaaaagtggaaccggcgaggttccctctgcgcctagagagaaccgtactacacccgactgcgagcgagcttttccagaggagcgtcccgaggtcctggggcagcgctccaccgacgtggtcgatctggaaaatgaggaacccgattctgacaacgaatggcagcatctcctggaaactacggagcctgtgcccatccaactaaaggctcctttaactctgctgtgtaaccctgatttttgtcagcgcattcaatcccaattacacgaagcgggaggccagattctgaagggcattctggaaggcgcgagtcatattctccccgccttcagagtgttgagcagcctcctgtcttcatgtagcgactcggtggcgctgtactccttttgtagggaggccggactgccaggactgctactgtcgctacttcgccacagccaggagagtaacagtctgcaacaacagagttggtacggaactttccttcaggacctcatggccgtcattcaggcgtacttcgcctgcacatttaatttggagcgatctcagacatcagactccttgcaggtcttccaggaagccgccaacctctttcttgacctattgggcaagctgctcgcccagcctgatgactccgagcaaacactgcggagagacagcctgatgtgcttcaccgtcttatgtgaagctatggatgggaattcacgcgctatctcaaaagcgttctattcgagcctgcttaccacccaacaggttgtcctggatggcctcctacacgggctgacagttcctcagttgccggtgcatacccctcagggcgccccccaggtatcccagcctctcagggaacaatccgaggacatacctggcgcaataagctcggcgctagccgccatctgtactgcccccgtcggcctgcccgattgctgggatgctaaagagcaggtgtgctggcatctcgcaaaccagctgacagaggattctagtcagctgagaccatctctgattagcggacttcaacatcccattctgtgcctacatttgcttaaagtgctttactcatgctgcttggtgagcgaagggctgtgtagactcctggggcaggagccgctggccctcgagagcctcttcatgttgatccaggggaaagtaaaagttgtggattgggaagaaagcactgaggttaccctgtactttctttccttgttggtattccgccttcagaatcttccctgcggcatggaaaagctcggcagcgacgtcgctactctcttcactcattcccacgttgtaagccttgtgagcgccgccgcttgtctgcttgggcagttgggtcagcagggcgtgactttcgatctgcagccaatggagtggatggccgccgctacacacgcactgtccgcccctgcagaagtgaggctcacacccccgggttcctgcggattctatgatggcctgcttatccttctactccagctgctcacagaacaggggaaggcaagccttatcagggacatgagttcctccgagatgtggacggtgttgtggcaccgatttagcatggttttacgcctccctgaagaagcctcggcccaagaaggcgagctgtccttgtccagtcctccatctcccgagccagactggacactgatcagcccacaaggcatggccgctctcctgtccttggccatggccacatttacacaggagccccagttgtgcttaagttgcctcagtcagcacggttccatactgatgtcaatccttaagcatttgttatgtccgagctttcttaaccagctgcggcaggctccgcacggttcagagttcctgcctgtggtcgtgctgtccgtatgtcagctcttatgttttccttttgctctcgatatggatgcggatctcctgattggagtgcttgcagacttgcgggactccgaggtggccgctcatctactccaggtgtgctgttatcacctccctctgatgcaagtcgaattgccaatctcactcctcactagacttgccctgatggaccctactagtcttaaccagttcgttaatactgtgagcgccagtccccgaacaattgtgtcatttttgagcgtcgccctgctgagtgaccaacctttgctcacgtctgacctgcttagtctgctggcccatacagcacgagtactgagcccgtcgcacctgagctttatccaggaactcctggctgggagcgatgaatcctaccgacctctgcgcagcctcctagggcaccctgagaatagtgtgcgtgcccatacttaccgactgcttggacacctgctgcagcactccatggctctgagaggcgctctgcaatctcaatcaggtctgttgtccctgctcctcctgggcctgggcgataaagatccagtagtgcgctgttccgccagcttcgctgtgggcaacgcagcttaccaggctggccccctgggcccagccctagctgcagctgtaccttctatgacacaactcctaggcgacccccaagctgggatacgccgaaacgtggccagcgctttaggtaatctgggccccgaaggactgggagaggagctcttacaatgtgaggtgccccagagactcctggagatggcctgcggtgatcctcagccaaacgtgaaagaagccgctctgatcgccctcaggtccctgcagcaagaacccgggatacaccaggtcctcgtgtcacttggcgcatccgagaagttatctttactgagcttaggaaatcaatccctccctcatagctcaccccggccagcttctgctaagcactgccggaaactcatccaccttctcagaccagctcatagcatgtag

SEQ ID NO: 204744 - DNA, 3885 bp, synthetic construct
  misc_feature 1..3885: note = Description of Artificial Sequence: Synthetic coding sequence
  source 1..3885: mol_type = other DNA
atggagaagtaccacgtgctggagatgatcggcgagggcagcttcggtagagtctataaagggagaaggaagtattcagcgcaggtagtggctcttaagtttatcccaaagctcggacgtagcgaaaaagagctgagaaatctgcagcgggagatagagattatgagaggcctgaggcacccaaatattgtccacatgctggacagctttgagaccgacaaggaagtcgtggttgtgaccgactatgccgagggggaactttttcaaatactggaagacgatggcaagctgcccgaagaccaagtccaggccatagccgctcagttagtgtccgctctgtactacctgcactcccacagaatactgcatcgggatatgaagcctcagaatattctgctcgcaaaagggggaggaattaagctgtgtgatttcggattcgcaagagctatgtcaacaaatacaatggtgttgacatccataaagggtacacctctgtatatgagcccagaactagtcgaggagagaccatatgatcatacagctgacctctggtctgtagggtgtattctctatgaattggccgtcgggaccccacccttctacgcaacctcaattttccagttagtgtcactaatcctgaaagaccctgtgaggtggccttcgacgatcagtccttgttttaaaaattttcttcagggcttgctcacaaaggatcctaggcaaaggctaagttggccagatctcctgtatcaccccttcatcgctggccacgtgacgataattacagaacctgccggccctgatctgggaactccatttacatcccgccttccacctgagctccaagtgttgaaagacgaacaggcccataggctcgctcccaagggcaaccagagtagaattttgacccaggcctataaaaggatggccgaggaagccatgcagaaaaaacaccagaacactggtccggctttggagcaggaggacaagacaagtaaggtagcaccagggactgctcccctgcctagattgggagccactccacaagaaagtagcctcctggctgggatcctcgccagtgaactgaagtcctcctgggccaagagcggtacgggcgaggtgccatctgccccgcgcgaaaataggacaacaccggactgcgagcgtgcctttcctgaggaacgccccgaggtcctgggacagaggagcactgatgtggtggacttagaaaacgaggagcccgactctgacaacgagtggcagcatctcctggagactacggagccagtgcctatccaattaaaagcgccactgactctgctgtgcaatcccgatttttgccagagaatccagtcgcagctgcacgaggcaggtggccagatccttaaaggtattctggagggtgcttctcacatcttgccggctttcagagtcctgtcctcgctcctgagttcttgttcggactctgttgcgctctactctttttgtagggaggcaggcttgccaggtctgctgttgagcctgctgaggcactcccaggaatccaatagcctacaacagcagtcatggtacggtacattccttcaggacctgatggccgtaattcaggcatactttgcatgcacctttaacttggagcgaagtcagacttctgattctcttcaggttttccaagaagccgcaaatctgtttttggatctactcggaaagctgctcgcccagccagatgacagcgaacagaccctgagaagggatagtctaatgtgcttcacagtgttatgcgaagcaatggatggcaatagccgagcaatcagcaaggccttttattcctcacttttaactactcagcaggttgtgctggacgggctgcttcacggcctgactgtccctcagctgccagttcacaccccccagggcgcaccgcaggtctcgcagcctctgagggagcagtcggaggacatcccgggagccatcagcagcgcgctggcggccatctgtaccgcccccgtgggcctccccgactgttgggacgccaaggaacaggtatgttggcatcttgccaaccagctgaccgaagattctagccagctgcgcccctccctgatctcggggttgcagcatcccattctctgtttgcacctccttaaggtgctgtatagctgctgcctcgtctctgagggcctttgcagactgctaggccaagagcctttggccctcgagtctctgtttatgctgatacaggggaaagtgaaggtagtagattgggaggagagcaccgaagtgacattatactttctatcactgttggtcttccgcctgcaaaacctgccatgtggcatggagaagctggggagtgacgtggcgacactgtttacccatagtcatgttgtgtcgttagtgtcagccgcggcttgcctgctcgggcaactgggccagcagggcgtcaccttcgaccttcaaccaatggagtggatggcagccgctacacacgctctgagcgcccctgctgagctcctcaccgaacagggcaaagcctctctgatccgcgatatgtcttcatcagagatgtggacggtgctgtggcacagatttagcatggtgctacgcctacccgaggaggcttccgcccaggagggagaactctctttatccagtccgccatcacctgaaccggactggacactgatcagtccacaaggcatggcagctctgctgtcattggccatggcaacctttacacaggagccccagctgtgtctgagttgtctgagtcagcacgggagcatcctcatgagcatcttaaaacacctgctgtgcccttcctttctgaaccagttaaggcaggctccacacggttctgagtttttgcctgtagtggtcctcagcgtctgccagctcctttgtttcccgtttgccctggatatggatgcagacctactgatcggcgtcctggccgatctgcgggattcggaagtggctgcccacctgcttcaagtgtgttgttatcacttgccgctgatgcaggttgaactgcctattagcctgcttacacggcttgccctgatggatcccacttccctcaatcaattcgtaaacacggtcagtgccagcccaagaactatcgtttccttcctgagcgttgccctcttgtctgatcaaccacttttaacgtctgatttactctctctgctggctcacacagctcgcgtgctgtctccgagccatttatcatttatccaggagctgctcgctggctccgacgaatcctatcgcccactccgatccctgctgggccaccctgagaatagtgttagggctcacacgtacaggctgttgggtcatcttcttcagcacagtatggcccttcggggagcacttcagtctcagtccggccttcttagcttactattgttaggcctgggcgacaaggaccccgtggtacggtgcagtgcttcctttgccgtgggcaatgccgcgtatcaggcagggccattaggtccagccctcgccgccgccgttccatctatgacccagctcctgggggaccctcaggccgggatcagacggaacgttgcatcagcgctcggcaaccttgggcccgaggggcttggagaggagctcctgcagtgcgaggtgccccagcgactgcttgaaatggcatgtggcgatccgcagcccaacgtcaaggaggctgctctcattgcgcttagaagtctacagcaagagcccggaatacatcaagtcttggttagcctcggagcttctgagaagctgagcctgctcagcctaggaaaccagagtctgccccactcctctccccggccagcatccgccaagcactgtagaaagctcattcacctgttaaggccagctcatagtatgtag

SEQ ID NO: 204745 - DNA, 3885 bp, synthetic construct
  misc_feature 1..3885: note = Description of Artificial Sequence: Synthetic coding sequence
  source 1..3885: mol_type = other DNA
atggagaagtaccacgtgctggagatgatcggcgagggcagcttcggccgggtttataaagggagaagaaaatatagcgcccaggtcgtcgctctaaaatttataccaaaattgggtcggtccgagaaggaactcaggaaccttcaaagggaaattgagattatgaggggcttgcggcaccctaacattgtgcacatgcttgacagcttcgaaaccgacaaggaggtcgtagtcgttacagattatgccgagggggaactgttccaaattctcgaagatgatgggaaactgccagaggatcaggtgcaggcgatcgccgcacagttggtgtctgccctctactacttacactctcaccgaatcctccaccgggatatgaagccgcaaaacattcttctcgccaagggggggggaatcaaactctgcgacttcgggttcgctagagcaatgtccaccaataccatggtcctcacgtctatcaaggggaccccactgtatatgtcccccgaactagtggaagaaaggccatatgatcatacagctgacctgtggtccgtgggctgtatcctgtatgagttggcagtcggaacaccaccattttatgcgaccagcatttttcagctcgtttccctgatattaaaagatcctgtacggtggccgagcaccatttccccatgctttaaaaacttccttcagggcctcctgaccaaagacccgagacagcgcctgtcctggcctgacctattgtatcatccttttatcgctggtcatgttacaataattacagagcccgcgggcccagatcttggcaccccctttacttccaggttgcctcccgaacttcaggtgctcaaagacgaacaggcgcacaggctggcaccgaaaggcaaccaatcccgcatactcacgcaggcctacaagcggatggcagaggaagccatgcagaaaaagcaccagaatacagggcccgccctggaacaagaggataagacctccaaggtggctcctggcaccgcacccttgccgagactgggcgccaccccgcaggagagcagtctgctcgccggaatattagctagcgaactgaagtccagttgggccaagtccggaactggtgaagtgccatcagccccccgcgagaataggactacccccgactgtgagcgcgcctttccggaggaacggccggaagtgctgggtcagaggtccaccgacgttgtcgatttagaaaacgaagaacccgacagtgacaatgagtggcaacatctactggaaaccacagaacctgttccaattcagctaaaggcccctctgaccctcctatgtaaccccgatttttgtcagaggattcagtctcagcttcacgaagcgggcggacagatcttaaagggaattctggaaggagcctcacacatactgcctgcttttcgggtgctttccagtctgctaagctcttgcagtgactcagtggccttatacagtttctgtcgcgaggctggcttgcccggtctcttgctgagtctgctcagacatagccaagagagcaactccctgcagcagcaaagttggtatggtacatttctccaggacctgatggccgtcatacaggcctattttgcatgcacgtttaacctggagcgcagccagacgagcgattcactgcaagtgtttcaggaggccgccaacttgttcttggatctgctcggcaagctcctggcccagcctgacgattcagagcagaccctcaggagagatagtcttatgtgttttaccgtactgtgtgaggcaatggacggcaactcaagagccataagtaaggcgttctatagctctcttttgaccacacagcaggtcgtcctggacggtttgttacacgggctgaccgtgccacagctcccagttcacaccccccagggtgcaccccaggtgtcacagcctctgcgggaacagagtgaggatatcccaggagccatcagttcggcattagctgccatctgtactgcgccggtgggtctaccagattgctgggatgccaaggagcaggtgtgctggcatctggctaatcagctgaccgaagattcttctcagctgcggccgagcctgatatccggcctccagcaccccattctctgcctgcatctgctaaaggtgctctattcctgttgccttgtgtctgagggattatgcagactgttaggccaggagcccttggctctcgagtccttgtttatgctcatccagggtaaggtcaaggtggtagattgggaggagagtaccgaagttaccttgtacttcttgtcattgctcgtgttccgcctgcagaatttgccatgtggaatggaaaaattggggagtgacgtcgctaccctcttcactcacagccatgtggtgagcttggtcagcgccgccgcctgtctgcttgggcagttaggccaacaaggcgtgacttttgacctacagccaatggaatggatggctgcggctactcatgcgctgagcgcacccgctgagatgagctgtgagcagggaaaggcgagcctgattcgcgacatgtcatcaagcgagatgtggacggtgttgtggcatcggttttcaatggtgctgcgtctgcctgaggaggcaagcgcacaagagggagagctcagcctcagcagtccacctagccccgagcctgactggacactcattagtccccagggtatggccgctcttttatcactggctatggccacatttacacaggaaccccagctgtgcctctcctgcctcagccagcatggaagcattctcatgtcgatactgaaacatctgctttgtccctccttccttaaccagctgcgtcaggccccacacggatcagaatttttacctgtcgtcgtcttgtctgtttgccaactgttgtgctttccattcgcactggacatggatgcagatctcctcattggggtgttggcggacctgagagacagcgaggttgcagcccacctgctgcaggtctgttgttaccacctgcctctaatgcaggtcgagttacccatcagcctcctgaccagactcgctctgatggaccctacatccctgaaccaatttgtgaacacagtgtccgcctcgccccggaccatcgtttctttcctgagcgtggccctgctcagcgaccaaccattattgacttctgacttattatctcttctcgctcacaccgctcgcgtgctgagtccctcccatctgagttttatacaggagttactggcaggtagtgatgaatcctatagaccactaagatctctcctgggccacccggaaaacagtgtgagggcccatacctatcggctgctgggacacttgttgcagcattccatggctctgcgaggtgcactgcagagccagagtggactgctgagtcttctcctgctcggcctcggggataaggatcctgttgtgcgttgtagcgccagcttcgctgtgggcaacgccgcataccaggccggaccactcggccccgcacttgcggccgccgttccatcgatgacgcagttgttaggagatccccaggctggtattaggaggaatgtggcatccgcccttggaaatcttggtcctgaggggctcggcgaagagctcctgcaatgtgaagtcccacaacgtttgctcgaaatggcgtgcggcgacccccagcccaatgtgaaggaggctgccctaatcgccttacggtctcttcagcaggaacctggtattcaccaagtgttggtaagcttaggtgcttccgagaagctgtccctcttgtccctagggaaccagagcttaccgcactctagcccgcgacctgcttctgccaagcactgccgaaaactgatccacttactgcgaccagctcactccatgtag

SEQ ID NO: 204746 - DNA, 840 bp, synthetic construct
  misc_feature 1..840: note = Description of Artificial Sequence: Synthetic coding sequence
  source 1..840: mol_type = other DNA
atggagaagtaccacgtgctggagatgatcggcgagggcagcttcggcagggtgtataaaggtcgaagaaaatattctgctcaggttgttgccttgaaatttatccccaaactggggcgcagcgagaaggaattacggaatctacagcgagaaatcgagattatgcgcgggttacgccacccaaacatcgtccacatgttggactccttcgagactgacaaggaggtcgtagtggttaccgactatgcggagggggaactcttccagatcctggaggacgatggaaagttacccgaagatcaggttcaggccattgccgcccaactggtgtcagccttatattacttgcattcacaccggattctgcacagagacatgaaaccccagaacatccttctggccaaaggcgggggcataaagctctgtgattttggtttcgctcgtgcgatgtctacaaacacaatggtcctgacaagcatcaagggtactcctctgtatatgagtcctgagctagttgaggagcgtccatacgatcacactgccgatttatggtcagtaggttgcatcctgtatgagttggcggtgggcacccccccattctatgccacgtccatattccaacttgtgagccttatactgaaagatcccgtgagatggccaagtaccatctcaccttgtttcaagaactttttacaaggcctgctcactaaggaccctcggcaaagattgagctggccagacttgttataccacccattcatcgccggtcacgtgacaataattacagaaccagctggcccagacctcggcaccccattcacgtctcgacttcccccttag

SEQ ID NO: 204747 - DNA, 3948 bp, synthetic construct
  misc_feature 1..3948: note = Description of Artificial Sequence: Synthetic coding sequence
  source 1..3948: mol_type = other DNA
atggagaagtaccacgtgctggagatgatcggcgagggcagcttcggccgggtctataaaggccggcgtaagtactcagctcaggtggtcgctctgaaattcattcctaaactaggccggagcgaaaaagaattacggaacctgcagagagagattgaaatcatgcggggactcaggcacccaaacatcgtacatatgttagacagcttcgaaacagacaaagaggtagtagttgtcactgactatgccgagggggagctctttcagattctggaggacgacggaaaacttccagaggatcaggtccaggcaatcgccgcccaattagttagtgcactgtattacctccatagtcatcgaatactacatagagacatgaagccacagaacatcctactggcaaaaggaggtggcataaaactctgtgatttcgggtttgcacgggcaatgagcaccaacaccatggttctaacatcaatcaagggcactccattatacatgagtcccgaacttgtagaggagcgcccatacgatcatactgccgatctgtggagtgttggttgcattctgtatgagctcgctgtcggaactcccccattttacgcgactagcattttccagctggttagtctgatcctgaaagatcctgtgcgttggccgagcaccataagtccctgctttaaaaacttcctgcagggactgctcacaaaggatcccagacagcgcctttcttggccggacctattgtaccatccgttcatcgccggccatgtgacaatcatcacagaacccgcagggccagacctcggaacacccttcacttcgagactgccacccgagttacaagtgttgaaagacgaacaggcccacagactagctcccaagggcaaccaatctagaatcctgactcaggcttacaagaggatggccgaggaggccatgcagaagaaacaccagaatacaggcccagcactcgagcaggaagacaaaacttcaaaggtcgcccccgggactgctcccctcccaagattgggggcaactccccaggagtcctccctgttggccgggatcttagcctccgagctgaagagctcctgggctaaatccgggactggagaagtgccatccgctccccgggagaatcgcaccactccagactgcgagagggctttccctgaagagaggccggaggttcttggccagcgctccaccgatgtcgtcgacctggaaaacgaggagccagattctgacaacgaatggcaacatcttctagaaacgaccgagcctgtgcctattcagctaaaggcccccctgacactactctgcaatccagatttctgccagcggatacaaagccagctgcatgaggctggcggccaaatactcaaagggattctcgaaggagcttctcacatcctgccggctttcagggtcctctcttcgttgctcagtagctgttcggatagcgtggccctttattcgttctgtcgtgaggccggactcccagggctgctactgagtttactgcgccactcccaggagagcaatagcctgcagcagcagagttggtacggcactttcttgcaagatctaatggccgtgattcaagcatattttgcctgcaccttcaacttggagcgatcacagactagcgactcactgcaggtgtttcaagaagctgccaatctatttctcgacctgcttgggaagctcctggcacagccagacgactctgagcagaccctgcggcgagatagcctcatgtgctttacagtgctatgcgaggccatggacggtaactccagagcgattagtaaggcgttttacagtagcttgctgacgactcagcaggttgttttggacgggctgttacatggtttgacagtgcctcagttacctgtgcacacgccgcaaggcgcccctcaagtcagtcagcccctccgcgaacaatccgaagacattcctggggccattagctccgcactcgctgctatctgcactgcccccgtggggttacccgattgttgggatgcaaaagagcaggtgtgctggcaccttgctaaccagctgaccgaagatagttcccagcttaggcctagtctgatttctgggcttcagcatccgattctgtgcctacacttgcttaaggtactatactcatgctgtctggtgagcgaaggactgtgtaggctgctgggtcaggagcccttggccctggagtccctgttcatgcttatccagggaaaagttaaagttgtggattgggaggagtcgactgaagtgacactgtacttcctatctttgctggtgttccggcttcagaatctgccctgcggaatggaaaagctcggcagtgatgtagctacactatttacacactcccacgtcgtctcattagtgagtgccgccgcctgcctacttggccagctgggacagcaaggcgtgacttttgacttacaacccatggaatggatggcggcagcaactcacgctctttccgccccagctgaggttcgtctgactcctcccgggagctgtggcttctacgacggtttgttgattttgctgttacagctcctgaccgaacaggggaaagcctcactcatcagggacatgagctccagtgagatgtggacagtactgtggcacagattctctatggtgcttcgcctcccggaggaagcatcagcgcaagagggcgagctcagcttgtctagtccaccttcccctgaaccagactggactctgattagcccccaggggatggctgccctgctctcgcttgctatggcaaccttcacacaggaaccccagctatgtctctcctgcctgtcacaacacggctctattctgatgtccattctgaagcacctactgtgccccagctttttaaatcagctcagacaggcaccccacgggagcgagtttttgcccgttgtagttttaagtgtttgccaattgctgtgttttccctttgccttagatatggatgctgatcttttgattggtgtcttggcagatctccgcgattccgaagtggcggcccatctgctgcaggtttgctgttaccacctccctctcatgcaagtcgaactgcctatctccctactgactaggctcgccctcatggatcctacgagtctgaatcaatttgttaacaccgtatctgcaagccccagaactatcgtgagcttcctgagcgttgccctgctcagcgaccaacctcttctgacctccgacctgctgtccctgctcgcccacacggctcgcgtgctatcgcccagtcacctgtctttcatccaggaactcttggccggctcggatgaatcctaccggccattgcggtcactccttggccatcctgagaatagcgtgcgggcacacacatatagactcctgggccacctgctgcaacattcaatggcattacggggagctctgcaatcgcaatccggcttactgtcactcctcctgctgggcctcggggataaggatcccgtagtaagatgttcagcgtcattcgcagttggaaatgccgcctaccaggcagggccattggggcctgccctcgctgccgcagtgccttccatgacccaacttctgggcgatccacaggccgggattagaaggaacgtggcctctgccttgggaaacctagggcctgagggcctaggagaggagctcctccaatgtgaggtaccacagcgcctacttgaaatggcatgtggcgatccacagcccaatgtgaaggaggcagcactgattgccctgaggtcgcttcagcaggagcccggcattcaccaagtgcttgttagcctcggtgcaagcgagaagttgtcgcttctgagcctgggtaaccaaagcctcccacatagcagtcctagaccagcgtccgccaagcattgtcgcaagctgatccatctgctccgacctgcacatagtatgtag

SEQ ID NO: 204748 - DNA, 1056 bp, synthetic construct
  misc_feature 1..1056: note = Description of Artificial Sequence: Synthetic coding sequence
  source 1..1056: mol_type = other DNA
atgcggttcaccttccccctgatggccatcgtgctggagatcgccatgatcgtgctgttcggcctgttcgtggaatatgaaacagatcagactgtactcgagcaactcaacatcactaagcctaccgatatgggcatcttctttgaactgtaccctctattccaggatgtgcacgtaatgatctttgtcgggtttggattcctaatgaccttcctgaagaagtacggtttttcatcagttgggatcaatttgctggtggcagcacttgggctgcaatggggtacaatagtacaggggatattgcagagtcagggacaaaaattcaatatcgggatcaaaaacatgatcaacgctgacttctctgcagctaccgtccttatcagctttggcgcagttctgggcaagacatccccgacacagatgctgatcatgacgatcctcgagatcgtgttctttgctcataatgaatacctagtctccgagatttttaaagcctctgacataggggctagtatgacaattcatgcttttggcgcatacttcggcctagccgtagccgggatcctgtataggtccggcctacgaaaaggacatgaaaacgaagagagtgcatattattccgacctcttcgccatgataggtaccctcttcctttggatgttttggccttctttcaacagcgccattgcagaacccggagacaagcagtgccgcgcaatagtgaatacctatttttctctcgccgcatgcgtgctcaccgcattcgctttctcctcactagtggagcatagaggcaagctaaatatggtgcacattcagaacgctaccctggctgggggcgtcgcagtcggcacttgcgctgacatggccatccatccatttgggtctatgattattgggtctatcgccgggatggtatctgtgctgggctataagtttctgacagtttatggacatgcaggatcatgtactgggtttctgtataggaattcttcatgctggcgcagtgatgaccggtttaatagcaaggtcgcctctctgggaacagccatctag

SEQ ID NO: 204749 - DNA, 1389 bp, synthetic construct
  misc_feature 1..1389: note = Description of Artificial Sequence: Synthetic coding sequence
  source 1..1389: mol_type = other DNA
atggagaccgtgcagctgcggaaccccccccggcggcagctgaagaaactcgatgaggacagcctcacaaagcaacctgaggaggtgtttgatgtcctcgagaaactgggcgaaggctcatacggttccgtgtataaagctatccacaaggaaactggtcagatcgtggcgataaagcaggtgccggttgaaagcgacctgcaggaaataatcaaagagatttccatcatgcagcaatgcgactcaccacatgtcgtcaagtactacggcagctatttcaagaataccgatctctggatcgtcatggagtattgcggcgctgggagtgtgtcagatatcataaggctccgcaacaagactctgacagaagacgagatcgctactatccttcagtctacactgaaaggacttgagtaccttcacttcatgcgaaagatccatcgggacatcaaagcaggtaacatactgctcaacacggagggacatgcgaagctagctgactttggagtggccggccagctgacagacaccatggctaaacgaaataccgtgatcggaacacccttctggatggctccggaggtgattcaggaaataggctataactgtgtggccgacatctggtctcttggtataactgctatcgaaatggccgaggggaaacctccatacgccgatattcatcccatgagagccattttcatgattcccactaaccctcctcccacgttccgcaaaccagagctgtggtcagacaacttcacagactttgtgaagcagtgtcttgtgaagtcacccgaacagcgggctactgcaactcaacttctgcagcatcccttcgttagaagcgctaaaggcgtttccatactgagggatctgatcaatgaggctatggacgtcaagctgaagcgacaggaatcacaacagcgcgaggttgaccaggatgacgaagagaattcggaagaagatgagatggattcgggcacaatggtgcgcgctgttggcgacgaaatgggcactgtgagagtggcgtccaccatgaccgacggagccaacactatgatcgaacacgacgacacgctcccctcccagcttggaacgatggtcatcaatgctgaagacgaggaagaggaaggcaccatgaaacgccgcgacgagactatgcagcccgcgaagccttcctttctggaatacttcgagcagaaagagaaggaaaatcagatcaattcttttggtaaatccgtgccaggtcccctcaaaaattcttctgattggaaaatcccccaagatggagactatgaattcaaaacaagccaggagcagcagtctggtaaggatatttgtattcagaattgccaggggaatctactatgtcggtacgcgttctag

SEQ ID NO: 204750 - DNA, 1464 bp, synthetic construct
  misc_feature 1..1464: note = Description of Artificial Sequence: Synthetic coding sequence
  source 1..1464: mol_type = other DNA
atggagaccgtgcagctgcggaaccccccccggcggcagctgaagaagctcgatgaagattcattgacaaaacagcccgaagaggtattcgacgtgctggagaagcttggcgagggatcttatggatccgtgtataaggccattcacaaagagactggccagatcgtggccattaaacaggtaccagtggagtcagatcttcaggaaatcattaaagaaatttccatcatgcagcaatgcgatagccctcatgtcgtcaaatattatggctcttatttcaaaaatacagatctctggatcgtcatggaatactgcggggccgggtccgtgtccgacattataagattaagaaataaaacattgactgaggacgagatcgccactatactgcagtctacccttaagggcctagagtacctgcacttcatgaggaaaattcaccgagacatcaaggccggcaacatcttactgaatacagaagggcatgctaaactggccgacttcggcgtggctggtcagctaaccgataccatggccaaaagaaacacagtaatagggacaccattctggatggctccagaggtgattcaggagattggatacaactgcgtcgctgatatttggtccctgggcattacagccatcgaaatggctgagggaaagcccccttatgctgacatccatcctatgcgcgcgatatttatgatccctactaacccccctcccacgtttagaaaacctgagctgtggtccgataattttacagacttcgtcaagcaatgcctcgtgaagagtccagagcagagggcaaccgctacgcaacttctgcagcacccctttgttcggtccgctaaaggggtaagtatcttaagggacctgatcaacgaagctatggacgtaaagcttaagcggcaggagtcacagcagagggaagtggaccaggacgatgaggagaattctgaagaagatgagatggactccggaaccatggttcgggcggtgggagatgaaatggggaccgtacgcgtggcaagcacaatgacagatggcgccaacactatgatcgagcatgatgacaccttaccgagccagctgggtaccatggttattaatgccgaagatgaagaggaagagggaaccatgaagaggagagatgaaacaatgcagccggctaaacctagctttctggaatacttcgaacaaaaggagaaagagaaccagatcaatagtttcggaaagtccgtccccggcccactcaaaaactcaagcgattggaagatcccccaagacggcgattacgaatttcttaaaagctggactgtcgaagatctgcagaaacgtctccttgccctggaccccatgatggagcaagaaatagaagaaatccggcagaaatatcagagtaagaggcagccaatcctcgatgcgatcgaagcaaagaaacgcagacagcagaacttctag

SEQ ID NO: 204751 - DNA, 1389 bp, synthetic construct
  misc_feature 1..1389: note = Description of Artificial Sequence: Synthetic coding sequence
  source 1..1389: mol_type = other DNA
atggagaccgtgcagctgcggaaccccccccggcggcagctgaagaagcttgacgaggactccttgaccaaacagccggaggaagtgttcgacgttttggaaaagctcggtgaggggtcttacggcagcgtgtacaaggcgattcacaaagaaacaggacagatcgtagcaataaagcaggttcctgtggagtcggacctccaggaaatcattaaggaaatatccattatgcagcaatgcgactcccctcacgtggttaagtattacggcagttactttaaaaacactgacttgtggatagttatggagtactgcggtgccgggtcggttagcgacatcattcgcctacgaaacaaaaccctgacggaggacgagatcgccaccatcctccagtcgaccctcaaaggcttggagtacctccatttcatgagaaagattcaccgtgacattaaggccggaaatatcctcttgaatactgaaggacacgcaaagttggccgatttcggcgtggccgggcagctcaccgacacgatggcaaaaaggaatactgttatcggtaccccgttctggatggccccggaggtcattcaggaaattggttacaactgcgtcgcagatatctggtcactcggaataacagccatcgaaatggctgagggaaagcctccctacgcggacatccaccctatgagagctattttcatgataccaactaatccccccccaacgttcagaaagcctgaattatggagcgacaactttacggacttcgtgaaacaatgtctagtgaaatccccagaacaacgtgcaactgcaacccaactgctccaacatcctttcgtgcgatcagctaagggggtttcgattctgcgtgatttgatcaacgaggcgatggacgtgaagctgaaacggcaagagtcacagcagagggaagtagaccaggacgacgaagaaaactcagaagaggatgaaatggacagcgggactatggtcagagcagtgggcgatgaaatggggaccgtgcgggttgcaagcaccatgactgacggcgccaatactatgatcgaacacgacgacaccctgccaagccagcttggcaccatggtgatcaacgccgaagatgaggaagaggaagggacaatgaaacgcagggacgagaccatgcagcctgctaagccctcatttctggaatatttcgagcagaaagagaaggaaaaccagataaactcgttcgggaaatccgtccctggccctctgaaaaattcttctgactggaagatccctcaagacggcgactacgaatttaagacctcacaggagcaacaatctggtaaggacatctgtatacagaattgtcagggcaatctgctatgcaggtacgctttttag

SEQ ID NO: 204752 - DNA, 1299 bp, synthetic construct
  misc_feature 1..1299: note = Description of Artificial Sequence: Synthetic coding sequence
  source 1..1299: mol_type = other DNA
atggagaccgtgcagctgcggaaccccccccggcggcagctgaagaaactagacgaagatagcttaaccaaacagccagaggaagttttcgacgtcctggagaaactcggagagggatcctacggcagtgtgtataaagcaattcacaaggaaacaggccagatagttgccattaagcaggtccccgtagagtctgacctgcaggagatcatcaaggaaattagcatcatgcaacagtgcgacagtccccacgtggtgaagtattatggctcatatttcaaaaacactgacctgtggattgtgatggagtattgtggtgccggaagtgtgagtgatattatccgtctacggaacaagacggataccatggcgaaacgtaacacagtgatcgggactcctttttggatggcccctgaggtaatccaggagatcggatacaattgcgtggcagatatctggagcctggggatcacggctatcgaaatggccgagggcaagcccccttacgccgatatccatcctatgagggccatcttcatgattccaaccaatccacctcctacattcagaaagcccgagctttggagcgataactttacagacttcgtgaagcagtgcctcgtgaagagcccagaacagcgagccaccgctacgcagcttcttcagcacccttttgtccggtcagctaaaggggtgagtatcctccgggacctcatcaatgaggccatggacgtaaaattgaagcgacaggagtcgcagcagagagaagtcgaccaggatgacgaggaaaactcagaggaggatgagatggacagtggaacgatggttagagccgtaggcgatgagatgggcaccgtgcgcgtggcgtctacgatgaccgatggagctaatactatgatagagcacgatgataccttaccctcccaactgggcacaatggttattaacgccgaagatgaggaagaggaagggaccatgaagcgtcgcgacgagaccatgcagcctgctaagccgtctttcttggaatacttcgagcagaaggagaaggagaaccagatcaattcatttggcaagagcgtgccaggccctctcaaaaactcttctgactggaaaatccctcaggatggggattacgaatttctgaaaagctggactgtggaggacctgcagaagcgcctcctggctctggatccgatgatggagcaggaaatagaggaaatcaggcagaagtaccagtctaagagacagcccatcttggacgctattgaagctaaaaagagacgtcaacagaatttttag

SEQ ID NO: 204753 - DNA, 1254 bp, synthetic construct
  misc_feature 1..1254: note = Description of Artificial Sequence: Synthetic coding sequence
  source 1..1254: mol_type = other DNA
atgaagcggcgggccagcgaccggggcgccggcgagaccagcgcccgagcgaaagctctgggaagtggaatcagtggtaataacgcgaagagggccggtccctttatcttaggccccagactggggaatagccccgtgccttctatagtacagtgcctggcgcgcaaggatggcactgacgatttctaccagctgaagattctgacccttgaggagcggggcgaccaaggtatcgagagtcaggaggaacgccaaggaaaaatgctgctccataccgaatattcgctgttgtcattgctccacacacaagacggggtggtccatcaccatgggttattccaggataggacgtgtgaaatcgtggaggacaccgagtcttcaagaatggtcaaaaagatgaaaaaacgcatttgcctggtcctagattgcctgtgtgcccatgacttcagcgacaaaaccgccgatttgattaacctgcaacattacgtgatcaaggaaaagagactgtctgaaagggagaccgttgtgatcttctatgatgtggttagggtcgtggaagcactgcaccagaaaaacatagttcaccgggatttgaaacttgggaatatggtactcaacaaacgaacccatcgtattacaatcaccaacttttgcctcggcaaacacctggtcagcgagggcgatctgctaaaggaccaacggggaagccccgcctacatctcaccggatgtcctgtcagggaggccatacagaggcaaaccctccgacatgtgggctcttggtgttgttctgttcactatgttatatgggcaatttcccttctatgactctataccccaagagctttttagaaagataaaggcagctgagtacacaatccccgaagatggacgggtctcagaaaataccgtttgcctgattagaaagctcctcgtgctggacccccagcaacggttagcagctgcggacgtgctggaagccctcagcgccatcatcgcgagctggcagagcctgagttccttgtctggccccctacaggtggtgcccgacatcgacgaccagatgtcaaatgcagattcctcacaagaggtatcttggggagggcagatgggtcactatccagccccaagggaccggcttcttggcgcagggagggcgagagccgaagtggccgcaaccagacgaccgcagagtttccttggcctgttgccccagccatggggggggaagggtcgcctccagtcctctgcctag

SEQ ID NO: 204754 - DNA, 1308 bp, synthetic construct
  misc_feature 1..1308: note = Description of Artificial Sequence: Synthetic coding sequence
  source 1..1308: mol_type = other DNA
atgaagcggcgggccagcgaccggggcgccggcgagaccagcgccagagccaaagctcttggttcgggcattagtgggaataatgccaagcgcgccggtcccttcattttgggaccaaggctgggaaacagtcccgtgccatccattgttcagtgcctcgccagaaaagacggcacggatgacttttaccagctgaagatcctgactttagaagagcggggagatcaggggatcgagagtcaggaagaacgccagggcaagatgctacttcatacagaatactcattgctgagcttattacatacccaggatggggtggtacatcatcacgggctattccaggatcggacttgtgagatagtggaggacactgaatccagccgcatggtgaagaagatgaagaagagaatttgtcttgtactggattgcctgtgcgcccatgatttctctgataagacagccgacctaatcaacctacaacactacgttatcaaggaaaagcggctaagcgaaagagagactgtcgtgatattttatgacgttgtgagagtcgttgaggccctgcaccagaagaatattgttcatcgcgatttaaagctcggaaacatggtgctgaacaagcgcacacacaggattaccattaccaatttctgtcttgggaagcacttagtctctgaaggagacctcctgaaagaccagcgcggatcacctgcctacatctctcccgacgtcctcagcggccggccatacaggggtaaaccatctgacatgtgggcgcttggggtggtcctcttcacaatgctgtatggtcagtttcctttttatgactctattccacaggagctcttcaggaaaatcaaagctgctgaatatactattccagaggacggccgcgttagtgaaaacaccgtttgcctcattcgcaagctactagtgctcgatccccagcagagattggccgcggctgatgtgctggaagcactgtcagccattattgctagttggcagagcttgagctccctgtcaggtcctttacaagttgtgccggatatagacgaccagatgtcaaacgcggactcctcgcaagaggctaaagtgactgaagagtgtagccagtacgagttcgagaactatatgcggcagcagttgctgttagctgaagagaagtcttcaatccacgacgcacggtcatgggtgcctaagagacagtttggatccgcccctcccgtccgtagactcggacacgacgcccagccaatgacctctcttgatacggcaattctcgcccaacggtacctaagaaaatag

SEQ ID NO: 204755 - DNA, 1323 bp, synthetic construct
  misc_feature 1..1323: note = Description of Artificial Sequence: Synthetic coding sequence
  source 1..1323: mol_type = other DNA
atgaagcggcgggccagcgaccggggcgccggcgagaccagcgccagggcaaaagcgctgggtagtgggatctctggcaacaacgccaaaagagcgggaccatttattctggctttatgcgcagtcggaccaagacttggaaacagtccggtgccctcgatcgtccagtgcctagccagaaaggacgggaccgacgacttttaccaacttaaaattttgacgctcgaagagagaggggatcagggcattgaaagccaggaggagcgccagggaaagatgctgttgcatacggagtactctttgttgagtctgcttcatacccaagatggggttgtgcaccaccatggtttgttccaggaccgtacttgtgaaatcgttgaggacactgagagctccaggatggtcaaaaagatgaaaaaaagaatctgcctggttctcgactgtctgtgtgcccatgattttagcgataagactgccgatctcatcaacctgcagcattatgtgatcaaggagaaacggctcagcgaacgcgaaactgtggtcattttttacgatgttgtaagagtggttgaggcacttcatcagaagaatattgtgcacagggacttgaagcttgggaacatggtgctgaacaagcggacccaccgcattaccatcactaacttttgtctggggaaacacctggtcagcgaaggcgatctgctaaaggatcagcggggatcccccgcctacatctctccggacgtactaagcggacggccctatcggggtaagccgtccgacatgtgggcattaggcgttgtgctttttaccatgctgtacgggcagttcccattttacgattctatccctcaggagctgttcaggaaaatcaaggccgcagaatacaccattcctgaggacggtagagtctctgaaaatactgtttgcttaatcaggaaactcctcgttctggacccccagcaacgcttggcagcagccgatgttctggaggccctgagcgctattatcgcatcctggcagtcattgagctctctaagcggccctcttcaggtggtgcctgatatcgacgaccagatgagcaatgcagactcatctcaggaggcgaaggttaccgaggagtgcagtcaatatgagttcgagaattatatgaggcagcagctgctgctggcagaggagaagagtagcatccatgatgctcggtcttgggtgccaaagcggcagtttggaagcgctccaccagtgagaagacttggacatgatgcgcagcctatgacatcattggacaccgctatcctggcgcagcgctatctcagaaaatag

SEQ ID NO: 204756 - DNA, 1308 bp, synthetic construct
  misc_feature 1..1308: note = Description of Artificial Sequence: Synthetic coding sequence
  source 1..1308: mol_type = other DNA
atgaagcggcgggccagcgaccggggcgccggcgagaccagcgcccgagcaaaggccctgggtagtggcatatctggcaacaacgcaaaacgggccggaccttttatactcggcccccgcctgggcaatagccccgtcccttccattgtgcagtgtctggccagaaaggacgggaccgatgatttctatcagctgaagatcctaactctagaagagaggggggatcagggcattgagagtcaagaagaacgtcaaggcaaaatgcttctacacaccgagtacagcctcctgtctttgctgcatacgcaggatggggttgtgcaccaccatggcttgtttcaggacagaacgtgtgagatcgtcgaagatactgagtctagtcggatggtgaagaagatgaagaaaagaatttgtctggtgcttgattgtctctgcgcacatgactttagtgataaaacggctgatttgatcaatcttcagcactacgtgattaaggaaaaacgactttccgaaagggaaacagtggtgattttctacgatgtagttagggtcgtggaggcactgcatcaaaagaatatagtacatcgggatctgaaactcggcaatatggttctcaacaaaaggacgcaccgcataacgatcaccaacttctgtctgggcaaacacttagtctccgagggagacttgcttaaggaccagagaggatcaccggcctatattagtcccgacgtccttagcggtaggccgtaccggggtaagccctccgatatgtgggcccttggagtagtcctgttcacaatgctgtacggacaatttcctttctacgattctatcccacaggagttattcagaaaaattaaagccgcagaatataccatcccggaggatggacgggtctccgaaaatacagtctgtcttatcaggaaattactcgtgctagacccccagcagaggctggcagccgcggacgtactggaagctctcagcgcaatcatcgcctcttggcagtccctgtcttctctgtcaggtccgctgcaggtggtgccggacatcgatgatcagatgtctaatgcagattctagtcaggaggccaaagtgactgaggaatgtagccagtacgagttcgagaactatatgagacagcagttgctgttggctgaagaaaagtcttccattcacgatgccagatcttgggtgccgaagagacagtttgggtctgcaccccccgtaaggagactggggcatgacgcccaacctatgactagcctggacactgccattcttgcacagaggtaccttcgtaagtag

SEQ ID NO: 204757 - DNA, 1092 bp, synthetic construct
  misc_feature 1..1092: note = Description of Artificial Sequence: Synthetic coding sequence
  source 1..1092: mol_type = other DNA
atggccatgcggcagacccccctgacctgcagcggccacacccggcccgtggtcgatttagcctttagcgggatcacgccatatggctactttctgattagtgcctgcaaaggagccggtcaacatttgcccaggctctcgggacaacatgacggaaagcctatgctcagacaaggggacaccggggactggatcggcacctttctgggccataagggtgcagtctggggcgccactctgaataaggatgccaccaaggctgctaccgccgctgccgatttcactgccaaagtttgggacgcagtgagcggggacgaacttatgactctggcacacaaacatattgttaaaaccgtggattttacgcaggatagcaactatctgctgacgggaggacaggacaagctgcttaggatatatgacctcaacaagcccgaggccgagcccaaggagattagcgggcacacaagtggcatcaagaaagcgctgtggtgctcggaggacaagcagattctgagcgctgacgataaaaccgttagattatgggatcacgccaccatgaccgaagtcaagtcactgaatttcaacatgtctgtctcctctatggaatatataccagaaggggaaatcttggtgatcacatacggaagatccatcgctttccactcggccgtctcccttgatcccattaaatcctttgaggctccagccaccattaactctgcctccttgcatcccgaaaaggagttcctagtggccggcggtgaggattttaaactgtataaatacgactataatagtggagaggagctggagtcttacaaagggcactttggaccaatacattgcgtgagatttagcccagacggggaattatatgcctccggttcagaggacggtactctccgcctgtggcaaacagttgttggcaaaacctacggcctctggaaatgcgtgcttccagaggaggactctggtgaactggcgaagcctaagatcggatttcccgagaccacagaggaggaactggaggagatcgcgagcgaaaacagcgattgtatctttccctctgccccagatgtgaaggcatag

SEQ ID NO: 204758 - DNA, 1053 bp, synthetic construct
  misc_feature 1..1053: note = Description of Artificial Sequence: Synthetic coding sequence
  source 1..1053: mol_type = other DNA
atggccatgcggcagacccccctgacctgcagcggccacacccggcctgtagtggacctggctttttcagggatcactccttacgggtatttcctgatcagcgcatgcaaggacggaaaaccgatgctgcgccagggcgatactggagactggatcggaacctttctgggacataagggcgcagtctggggcgcaactcttaacaaggacgccacaaaggctgcaacagcggccgccgattttacagccaaagtctgggatgctgttagtggggatgagttgatgaccctggcccataaacacatagtgaaaactgtggatttcacacaagatagtaattacttgctaaccggaggacaggacaaactactacggatctatgatctgaataaacccgaagccgagcctaaggagatttccgggcatacatcgggaattaagaaggccctctggtgcagcgaggacaaacagatcttgagtgctgatgacaaaacagtacgtttatgggaccatgcgaccatgactgaggtgaaaagccttaacttcaacatgagtgtctcttcaatggagtacatcccggagggggagattctggtcataacctatgggagaagtatcgcttttcatagcgccgtcagtctggatccaatcaaatcatttgaggcccctgctacaatcaattccgcgtcccttcacccagaaaaggagtttctcgtcgctggtggcgaagacttcaagctttacaagtacgactacaacagtggagaggagctggaatcctataaggggcactttggccctattcattgtgtgaggttcagtccagacggagagctgtacgcaagtggctctgaggacgggaccctgagactctggcagacggttgtgggtaaaacatatggattatggaagtgtgtgctccctgaagaggacagcggagaacttgccaaacccaagatcggcttccctgaaacaactgaggaggaactggaggaaatcgcatccgaaaacagtgactgtatcttccccagcgctccagatgtgaaagcatag

SEQ ID NO: 204759 - DNA, 771 bp, synthetic construct
  misc_feature 1..771: note = Description of Artificial Sequence: Synthetic coding sequence
  source 1..771: mol_type = other DNA
atgaccctggcccacaagcacatcgtgaagaccgtggacttcacccaagattcaaactatcttctgaccggtggccaggacaaattgctccgcatctacgatttgaacaagccggaggcagagcccaaggaaataagcggtcatacaagcgggatcaaaaaagcactgtggtgttcagaagataagcaaatcctgtctgctgacgataaaactgttcggctgtgggatcacgccactatgacagaggttaagtcacttaatttcaatatgagcgtctccagcatggaatatattccagaaggcgagatccttgttatcacctacgggcgctccatcgctttccattccgcagtgtcactggatcctatcaagtccttcgaagctccggccacaataaacagtgcctccctccaccccgaaaaagagttcctagtggccgggggtgaggatttcaagctgtacaaatacgactacaacagtggcgaggagctggaatcctacaagggtcactttgggccaattcattgcgtgcgattcagccccgacggagagctgtatgcaagtggctcagaggatggcacactgcgcctgtggcagactgttgtgggaaagacgtacggcttatggaagtgcgtactcccagaggaggatagcggggagctggccaaaccaaagatcggttttcccgagacaacagaggaagagctcgaggagattgcgtccgagaatagcgactgtatttttccctcggcccccgacgtgaaagcatag

SEQ ID NO: 204760 - DNA, 1707 bp, synthetic construct
  misc_feature 1..1707: note = Description of Artificial Sequence: Synthetic coding sequence
  source 1..1707: mol_type = other DNA
atgaagaacaagatccaggtggtggtgctggagaacgagggcctgcagcagcagctcaaatctcagaggcaggaggaaaccctgcgcgaacagaccctcctagatgcttctggaaacatgcataactcatggatcaccactggcgaggattctggcgtgggagagacctctaaaagaccatttagccatgacaacgctgatttcggaaaagctgcgtctgccggcgagcagttggaactggaaaaactcaagcttacctatgaagagaaatgcgaaatcgaggaaagccagctgaagttccttagaaatgacttagcagagtaccagcgtacttgcgaagacctcaaagaacagctgaagcacaaagagtttctgctggccgccaatacttgtaatagggtcgggggtctgtgtctcaaatgcgcacagcacgaggccgtgctctcccagacccataccaatgtgcatatgcagacaatagaacgcctggtgaaagagagggatgacctgatgagcgccttagtcagcgtgcgctctagtctggcggacacccaacagagggaggctagtgcctacgagcaagtgaaacaggtgctgcagatttcagaggaagccaattttgaaaagaccaaagcgctgatacagtgtgatcaattgaggaaggaacttgagcgacaggccgagaggctggagaaggagctcgcgtcccaacaggaaaaaagagctattgaaaaagatatgatgaagaaagagatcacaaaggagagagagtacatggggtccaagatgttgatcttgagccagaacattgcacagctcgaagcccaggtagaaaaagtgaccaaggaaaagattagtgccattaatcagcttgaagagatacagagtcaactcgcaagcagggaaatggatgtcactaaggtatgcggcgaaatgaggtatcagcttaataaaacaaatatggagaaagatgaggccgagaaggagcaccgcgaattccgtgctaaaacgaatcgcgatctcgagattaaggaccaggagatcgagaagttgagaattgagctggacgagagtaagcagcacttggaacaggagcagcagaaggccgctctggccagagaggaatgtctgagactgacagagctgctgggggagtctgagcatcagttgcatctgacacggcaggagaaggattctattcagcaatcttttagcaaggaagcaaaggctcaggcgttgcaggctcagcaacgcgagcaagagctgacccaaaagatacaacagatggaagctcagcacgacaaaaccgagaacgaacagtacctcctccttacttcacagaacactttcctgacaaagttaaaggaggagtgctgtacgctggcaaaaaagttggaacaaatctcccagaagacaagaagtgagattgctcagctgtcacaagagaagaggtacacatatgacaaactgggcaaacttcaaagaagaaacgaagagttggaagagcagtgcgtccaacacggccgcgttcacgaaactatgaaacagaggctcagacagctggacaaacatagccaggcaaccgcccagcagcttgttcaactgttgtccaagcagaatcagctgctgctggaacgccaatctctgtccgaggaggttgacagacttaggacccaactcccgtccatgccccaatctgattgctag

SEQ ID NO: 204761 - DNA, 2013 bp, synthetic construct
  misc_feature 1..2013: note = Description of Artificial Sequence: Synthetic coding sequence
  source 1..2013: mol_type = other DNA
atggccaagagccccgagaacagcaccctggaggagatcctgggccaataccagcggtccctgagagagcatgcttccagaagtatccaccaactcacatgcgccctcaaagagggcgacgttaccattggtgaagatgccccgaatctctctttcagcacaagcgtgggcaacgaggacgctcgcacggcctggcctgagttgcagcagagccatgccgtcaaccagcttaaggatctgctaagacagcaggctgataaagagtccgaggtgtctcccagccgacggaggaaaatgtctcctttgagatctctagagcatgaagagaccaatatgccaactatgcatgacttagtacacaccatcaatgaccagagccaatacattcaccatctcgaggctgaagtcaagttctgcaaggaggagctatctggcatgaaaaataagatccaggtggtggttctggaaaatgaaggccttcagcagcaacttaagagccaacggcaggaagaaactcttcgcgagcaaacactgcttgatgcgagcgagaagttaaaacttacttacgaagaaaagtgcgaaattgaagaatcccaactcaagtttctgaggaacgacctggccgagtaccaacgtacttgtgaagatcttaaagaacagcttaaacataaagagtttcttctggccgccaacacttgtaaccgggttggcggcctgtgtctcaaatgcgcacagcatgaggcagtacttagtcagactcacaccaacgttcatatgcagacgatcgaaagactggtgaaggagagggacgacttgatgtctgccctggtgtcagtcaggagcagcctagctgacacccagcagagggaagccagtgcgtacgaacaggtaaaacaagtgctccagatttctgaggaggccaacttcgaaaaaactaaggctctgattcagtgcgaccagctcagaaaggagttagagcgccaggctgagagacttgagaaagagttagcttctcagcaagaaaaacgagcgatcgagaaagacatgatgaaaaaggagattacgaaggagagagagtatatgggtagcaagatgcttatcctgtcccagaatatcgcccagctcgaggcacaagtcgaaaaagtcactaaggaaaagatctccgcaattaatcagctggaggaaatccagagccagctggcctctcgtgaaatggacgtcactaaagtttgtggggaaatgcgctatcaactgaacaagaccaacatggagaaagatgaggcagagaaggagcatcgcgagtttcgcgccaagacgaaccgggatttagaaattaaagaccaggaaattgagaagttgcgaattgagctggacgagtccaagcaacacctcgagcaggagcagcagaaagccgccctggctcgtgaggaatgtttacgtctgacagagctgctcggcgaaagcgagcatcaactgcacttgactagacaagagaaggacagcatacaacagagtttcagtaaggaagctaaggcacaggccctccaggctcagcagagagagcaggagctgacacagaagatacagcaaatggaagcccagcatgataaaacagaaaacgaacagtatttgcttttaacgtcgcagaatacctttctcacaaagctgaaagaagaatgctgcacactcgccaaaaagttggagcaaatttcccagaagactaggagcgagattgcgcagctgtcccaggagaaacggtacacatacgataagcttggcaagctgcagagacgcaatgaggaactcgaagagcagtgcgtccagcatggtagggtgcatgagacaatgaaacagcgtctccggcagctggataaacatagtcaggccaccgcccaacaactggttcaactgctgtccaaacaaaaccaattgctgctggaaagacagagcctcagcgaggaggttgaccgcctacggacccaactgccgtcgatgccacagtctgactgttag

SEQ ID NO: 204762 - DNA, 2142 bp, synthetic construct
  misc_feature 1..2142: note = Description of Artificial Sequence: Synthetic coding sequence
  source 1..2142: mol_type = other DNA
atggccaagagccccgagaacagcaccctggaggagatcctgggccaataccagcgctccttgagggaacacgcatcaaggtctatccaccaactcacgtgtgcccttaaagaaggagatgtgaccattggtgaggacgctcccaatctttccttctctacctctgtggggaatgaggacgcgcggactgcatggcccgagctccaacagtcccatgccgttaaccagcttaaagatctgctcaggcagcaggctgacaaggagtccgaggtttcaccgtccaggcggagaaaaatgtctcccctgcgaagccttgagcacgaagagactaatatgccaaccatgcatgatctagtccacactattaacgatcagtctcagtacatccatcatctcgaggctgaagtgaaattctgcaaagaggaactgtcaggaatgaaaaacaagatccaagtggtcgtcctggaaaacgaagggctgcagcagcaactgaagtctcagcgacaggaggaaacactcagagagcagacgttgctcgacgcctcagggaatatgcacaacagctggattaccactggcgaagacagcggagtcggagagaccagtaaaagacctttctcccacgacaacgctgacttcgggaaggccgcctctgcgggtgagcagcttgagctcgaaaaactgaagctcacatacgaggagaaatgcgagattgaagagtcacaattaaaattcctgcgcaatgacctggccgagtatcagcgaacatgcgaagacttaaaggagcagcttaagcacaaggagttccttctggccgccaatacctgtaacagagtcggtggcctgtgtctgaaatgcgcccagcacgaagctgtcctgagtcagacccacactaatgtacatatgcaaacaatcgagcgcctggtcaaggagagagacgacctcatgtccgctctagtttcagtgcggagcagcctggctgacactcagcaaagagaagccagcgcctacgaacaggtcaaacaggtgcttcagattagtgaagaggccaacttcgaaaagaccaaagccctcattcagtgtgaccagctgcggaaagagctggagaggcaagctgaacggcttgagaaggagctcgcttcacagcaggagaaacgcgccattgagaaggacatgatgaagaaggagatcacgaaggagcgcgagtatatggggtcaaagatgctcattctcagccaaaacatagcccagctcgaggcccaggtcgagaaggtgacaaaagagaagatcagcgccattaatcagctggaagaaatccaatcccagttggcctcccgcgagatggacgtgacaaaagtgtgcggcgaaatgaggtaccagttaaataagacgaatatggaaaaggatgaggccgaaaaggagcacagagagtttcgggctaagaccaatagggacttggagattaaggaccaggaaattgagaaactgaggatcgagcttgacgagtcaaaacagcatctggagcaggagcaacaaaaagccgcactggcaagagaggagtgcctgcgcctgaccgaattgctgggcgagagcgaacaccagttacacctcacgcgtcaggagaaggatagcatccaacaatccttctcgaaagaggctaaggcgcaggccctacaggcgcaacaacgcgagcaggagttaactcaaaaaatccagcagatggaggcacaacacgacaaaaccgaaaacgagcaatacttgctgctgacttcccagaacacctttcttaccaagctgaaggaagagtgctgcactctcgcaaaaaaactcgagcagatctcccaaaaaactagatccgagattgcccagttgtcacaggaaaaacgatatacctacgataagttggggaagttgcaacgcagaaacgaggagctcgaggaacagtgtgttcagcacgggagggtccacgaaaccatgaaacaacggctcaggcagctcgacaaacactctcaggccactgcccagcagttggttcaactgctctccaaacaaaaccagttgctgctggaaagacaatctctttctgaagaggtggataggctcaggacacaattgccttctatgccacagagcgattgctag

SEQ ID NO: 204763 - DNA, 1083 bp, synthetic construct
  misc_feature 1..1083: note = Description of Artificial Sequence: Synthetic coding sequence
  source 1..1083: mol_type = other DNA
atggccaagagccccgagaacagcaccctggaggagatcctgggccagtatcagagatcactgcgagagcacgcctcaaggtccattcatcaacttacttgcgcactgaaagaaggggatgtcacgatcggagaggacgcacctaatcttagctttagcacttccgtcggcaacgaagatgctcgtacagcctggcccgagctccagcagagtcacgcggtgaaccaactgaaggatttgctgcgacagcaagccgacaaggagtcagaagtgtcgccgtctaggcgccgcaagatgagccccttacgctccctggaacatgaagaaacaaacatgccaactatgcacgacctggtccacactataaacgatcagtcgcagtatattcaccatcttgaggctgaggttaaattctgcaaggaagagctgtccggcatgaagaataagatccaggttgtcgtgttagaaaatgaagggcttcagcaacagctgaaaagccagcggcaggaggagaccctgcgagaacaaaccttgcttgatgcctcaggaaacatgcacaacagttggatcacaacaggcgaggacagcggggtcggcgaaacctccaagaggccattctctcacgacaacgcggatttcgggaaagcagccagcgccggagagcaattagagctagagaaattaaagctgacatacgaagagaagtgtgagatagaggagagccagctcaaattcctcagaaacgatcttgctgagtatcaaagaacatgcgaagacttgaaagaacagctgaaacacaaggaattcttgctggccgccaatacttgcaaccgcgtcgggggcttgtgtcttaaatgtgctcagcatgaggctgtattaagccaaacacatacaaatgtgcatatgcagacaattgagcggttggtgaaagagcgtgatgaccttatgtccgccctggtcagtgtgaggtctagcctagccgacacccagcaaagggaagcctcagcttatgagcaggttaagcaggtgctccagatctcggaggaagctaattttgagaaaaccaagcacccttcccagtag

SEQ ID NO: 204764 - DNA, 1245 bp, synthetic construct
  misc_feature 1..1245: note = Description of Artificial Sequence: Synthetic coding sequence
  source 1..1245: mol_type = other DNA
ctgctggacgccagcgagaagctgaagctgacctacgaggagaagtgtgaaatcgaagaatcgcagctaaagttcttgaggaacgacttagcagaatatcagagaacatgcgaagatttaaaggaacagctgaagcataaggagttcctccttgctgctaacacctgtaatcgggtaggcggactgtgcctgaagtgcgcacagcatgaagcggtactatctcagacccatacaaacgtgcatatgcagacaattgagaggttggttaaggaacgagacgacctaatgagtgccctggtttctgtacgctcgagtctggccgatacccagcagagagaagcctccgcctacgagcaggtgaaacaggtgctccagatttctgaggaggctaacttcgagaagactaaggcccttatccaatgtgaccagctccgcaaagaattagagagacaggctgagcgcctggagaaagaattggcctcacagcaagagaaacgtgccattgagaaagatatgatgaaaaaagagatcacgaaagagcgcgagtatatgggctctaagatgctgattctgtcccagaatattgctcagctggaggcccaggtcgaaaaggtgacaaaggaaaagatcagtgcaatcaaccagttggaggagatacagtcacagctagcatctagggagatggatgtaaccaaagtgtgcggcgaaatgcgttatcagttgaacaaaacaaacatggagaaagatgaggccgagaaagaacaccgagagttcagggccaaaaccaacagagacctggagatcaaagaccaggaaatcgaaaaactcagaatcgagctggacgagtccaaacaacatctagaacaagagcaacaaaaggccgcccttgcaagggaggagtgtctccgattgaccgaactgcttggtgaatccgagcaccagctccacttaacgagatccgaaatcgctcagctgagtcaggaaaagcgctacacttacgacaaattaggcaaactgcaacgacgaaacgaagagctggaagaacaatgcgttcagcacggcagagtccatgagactatgaaacagcggctgcgacagctggacaagcactcgcaagcgaccgcacaacaactcgtgcagctcctgtctaagcagaatcagctgcttcttgagaggcagtccctgtcagaggaggtggaccgcctgcggacccagttgccctccatgcctcaatctgactgttag

SEQ ID NO: 204765 - DNA, 729 bp, synthetic construct
  misc_feature 1..729: note = Description of Artificial Sequence: Synthetic coding sequence
  source 1..729: mol_type = other DNA
atggacgacctgtgcgaggccaacggcaccttcgccatcagcctgtttaaaatcctaggggaggaagataacagtcgcaatgtgttcttctcccctatgagcatttcatcagccctggcaatggtcttcatgggggccaaaggcagcaccgcagcacaaatgtctcaggccctatgcctgtataaagatggggatatccacagaggcttccagagtctgctgagtgaagtcaaccgcactggcacacagtatctgttgcggacggccaaccgcctgttcggggagaagacctgtgacttcctgcccgacttcaaggaatactgtcagaaattctaccaggccgaactggaggaattgtccttcgctgaagataccgaggaatgccggaagcacatcaacgactgggtcgcagaaaagacggagggcaaaatcagtgaagtgttggacgcaggcaccgtcgaccccctgactaaactggtgttggttaacgctatctattttaaaggcaaatggaacgagcagttcgaccgcaaatacactagaggcatgctattcaaaactaatgaagagaaaaaaaccgtgcagatgatgtttaaggaagctaagtttaaaatgggctatgctgatgaagttcacactcaggttctcgaactgccttacgtggaagaggaactgtctatggtgattctgctccctgatgacaatacagacttggctgtgaaggagtag

SEQ ID NO: 204766 - DNA, 1335 bp, synthetic construct
  misc_feature 1..1335: note = Description of Artificial Sequence: Synthetic coding sequence
  source 1..1335: mol_type = other DNA
atgaaggtggtgcccagcctgctgctgagcgtgctgctggcccaggtatggctggtacctggactggccccatcaccacaaagtcccgaaacaccagccccccagaatcaaacttcaagagtcgttcaggcgcccaaagaagaggaggaggatgagcaggaggccagcgaagaaaaggcctctgaggaggagaaagcttggctcatggcctcccggcaacagctggctaaagagacctcgaactttggcttcagcttgcttagaaagatatctatgcgtcatgacggtaatatggtcttttccccctttggcatgtcactggcaatgaccggccttatgctgggcgctacaggaccgacggaaactcagataaagcgaggactgcatctccaggcactaaaaccgaccaagcccggcctgctgccatccctgtttaagggcttacgggaaaccctctcccggaatctcgagctgggcttgacgcagggatcattcgcattcattcacaaagacttcgacgtaaaagaaacttttttcaatttaagcaagagatactttgatacggagtgtgttcctatgaattttcgaaacgctagccaggctaaaaggctgatgaaccattacataaacaaggaaactcgaggaaagatccccaaactgtttgatgagattaacccagaaacaaagctcattctcgtggattatatactgttcaaagggaaatggctcacaccctttgacccggtattcactgaagtcgatacctttcatctggacaagtataaaaccataaaagtgccaatgatgtacggtgccggcaagttcgcctccaccttcgacaagaacttcaggtgtcatgttcttaagctaccataccagggtaatgccaccatgttggtcgtgctgatggagaagatgggagatcacctcgcactcgaagactatcttactaccgacctggtggagacctggcttcggaacatgaaaacacgaaacatggaagtgttcttccctaagttcaagctggaccagaaatacgagatgcacgagctgctgcggcagatggggataagacgcatcttttcgccatttgcggacctctccgaattgtcagccaccggacgcaacctgcaggtatcacgggtcctgcagaggaccgtcatcgaggtggatgagagaggcacggaagctgttgccggaatcctttctgaaataacagcttactccatgcccccagtcataaaggtggaccgtcctttccatttcatgatctatgaggagacaagtggaatgctcttgttccttgggagggtggttaatcccacactgctttag

SEQ ID NO: 204767 - DNA, 1335 bp, synthetic construct
  misc_feature 1..1335: note = Description of Artificial Sequence: Synthetic coding sequence
  source 1..1335: mol_type = other DNA
atgaaggtggtgcccagcctgctgctgagcgtgctgctggcccaggtgtggttggtcccaggcctggcacccagtccacagtctccggagactccagccccacagaaccagacaagccgagtcgtccaagcccccaaggaggaggaggaggatgaacaggaagcctctgaggagaaagcctccgaagaagaaaaggcttggctgatggcttcacgccagcaactagccaaagaaacttccaattttggattttccctgttaagaaaaattagcatgcgacatgatggaaacatggtgtttagcccattcggcatgtcgctcgccatgacagggcttatgctcggagccactggacctacagagactcaaattaagcgcggtcttcacctccaagcgcttaagccgacaaaacccggattgctcccttctctgtttaaggggctgcgggagacgctatccaggaatctcgaactgggactcacccaaggctcctttgcttttattcataaagattttgatgttaaagaaactttctttaacttgagcaagcggtacttcgatacggagtgcgtgccaatgaacttcagaaatgcttcccaggccaaacgcctaatgaaccattacattaacaaggaaactcgtggtaagattccaaaactcttcgacgagattaatccggaaaccaaactgattctagttgattacattttgtttaaaggcaagtggctcaccccgttcgatccagtgttcaccgaggtggacaccttccacctcgacaaatacaagaccataaaggtccccatgatgtatggcgccggcaagtttgcgtccacatttgacaaaaattttaggtgtcacgtcctgaaactcccctatcaaggaaatgccacaatgttagttgttctgatggagaaaatgggtgatcacttagcccttgaggactatttgactacagatttagtggaaacatggctcagaaatatgaagacccggaatatggaagtgttcttccctaagttcaaattggatcaaaaatacgagatgcatgaacttcttcgtcagatgggtattcggcggatattttctccttttgctgacctctcagagctttcagctactggtaggaacctgcaggtatctcgagtgttacagaggactgtaatcgaggtggatgagaggggcactgaagctgtagcagggatcctgtcagagattacagcatattctatgccaccagttattaaggtcgataggcctttccatttcatgatatacgaggaaacgtccggcatgctgttatttctgggccgggtggtgaaccccaccttgctgtag

SEQ ID NO: 204768 - DNA, 1335 bp, synthetic construct
  misc_feature 1..1335: note = Description of Artificial Sequence: Synthetic coding sequence
  source 1..1335: mol_type = other DNA
atgaaggtggtgcccagcctgctgctgagcgtgctgctggcccaggtgtggctggtgcctggcctagccccaagcccgcaaagtcccgaaacgcctgcaccgcagaaccagacatcccgcgttgtccaggcaccaaaggaggaggaggaagacgagcaggaggccagtgaagagaaggcctccgaggaggaaaaggcctggttgatggcttctcgacagcagctcgccaaggagaccagcaattttggctttagcctgctcaggaagatatctatgagacacgacgggaatatggtgttcagccccttcgggatgtcactagcgatgacaggtttgatgttaggcgcgacgggacctactgaaacacagattaaaaggggcttgcacctgcaagccctgaagccaacaaaacccgggctcctaccttctctcttcaagggcctgcgcgaaactctcagccggaacctggaattgggcctgactcagggcagcttcgcctttatccataaggacttcgatgttaaagaaacatttttcaatttaagtaaacgatacttcgacactgagtgtgtccccatgaattttcgcaacgccagtcaggcgaaacggctgatgaaccattatatcaataaggagacccggggcaagattccgaaactgtttgacgagatcaatccggagaccaagttaatcttagtggactacatccttttcaaagggaagtggttaactccattcgatcccgtctttaccgaggtggatacttttcacttagataaatacaaaaccattaaagtccccatgatgtatggcgcaggcaagttcgcctcaaccttcgacaaaaacttccgctgtcacgtcttgaagctgccttaccagggcaatgcaacaatgctagtggtactgatggaaaaaatgggcgatcacctggcactcgaggactatctgaccaccgacctcgtggaaacgtggctgcggaatatgaaaaccaggaacatggaggtgttctttcctaagttcaagctcgatcagaaatatgaaatgcatgaattactccgacagatgggaataagacgcatttttagcccattcgctgacctcagcgaattgagtgccacagggcgcaatttgcaggtctcacgcgtgttgcagaggaccgtgatcgaagtcgacgaacgcggaactgaggcggtggccgggattctctcggaaatcaccgcctattccatgccccctgtgattaaagtggatagacctttccacttcatgatttacgaggagacttctggaatgttgcttttcttgggcagagtcgtcaatcccaccctgttatag

SEQ ID NO: 204769 - DNA, 1455 bp, synthetic construct
  misc_feature 1..1455: note = Description of Artificial Sequence: Synthetic coding sequence
  source 1..1455: mol_type = other DNA
atgagccggagcacccaggagctgctgggctaccactgccggctgcaggataagctccaggagcaggagggctctctggctgcagaaggacgtcacagtttggcctctgcagcagaccacatgaaggtagtcccgtccctgctgctgtctgtcctcctggcccaggtgtggttggtgccaggtcttgccccctcgccacaaagccctgaaactcctgctccacagaaccagactagtagagtcgtccaggccccaaaggaggaagaggaagatgagcaggaagcgagcgaggagaaggcgagcgaagaagagaaagcctggctgatggcttctaggcagcaacttgccaaggagacctctaatttcgggtttagcctgctccgtaagatttctatgcgccacgacggcaacatggtgttttctccttttgggatgagcctagccatgacaggcctgatgcttggtgcgaccggccctactgaaactcagatcaagagaggactgcacctgcaggcattgaaacctactaaaccaggactactgccctccttattcaagggtctcagagagacgctctctcgtaatctggaactagggctgacacaaggcagtttcgcttttattcacaaagacttcgacgtcaaggagacattctttaacttgtccaagagatactttgataccgagtgtgtacctatgaatttccgcaatgcatcacaggctaagcggctgatgaaccactatatcaacaaggaaacaaggggaaagattccaaagctgttcgatgaaattaaccctgagaccaagctgatcctagtggactacattttgttcaaaggaaagtggctgacccctttcgaccctgtttttacagaggtggacaccttccatctggacaagtacaaaacaataaaggtgccgatgatgtacggagctggaaagttcgcttccaccttcgacaagaacttccgatgtcatgtgctgaagctgccttaccagggaaatgcaaccatgttggttgtgttgatggaaaagatgggcgaccacctcgccttagaggattacctgacaacagacctcgtggagacgtggctgcgcaacatgaaaactaggaatatggaggtgttctttcctaaattcaaactcgaccagaaatatgaaatgcacgagctgctccgacagatgggaatacggcgcatattctcgccattcgctgatctctcagagctatcagctaccggaaggaacctgcaagtgagtcgtgttctccagcgcaccgtcattgaggtggacgagaggggcaccgaagctgtggccgggattctgtctgagattaccgcctatagtatgcctcccgttattaaagtggaccgacccttccactttatgatctatgaggaaacgtccggcatgctgcttttccttgggagagtggtaaaccctactctgctttag

SEQ ID NO: 204770 - DNA, 288 bp, synthetic construct
  misc_feature 1..288: note = Description of Artificial Sequence: Synthetic coding sequence
  source 1..288: mol_type = other DNA
atggagcggatgctgcccctgctggccctgggcctgctggccgccggtttctgccccgccgtgctgtgccatcctaattcccctctagacgaggagaatctgacacaggagaatcaggacaggggcacacacgtggacttaggactggcatccgcaaacgttgatttcgccttcagcctttataagcacccccaccgttggtcgataaggctgtgtctgatgtatttgagaagagcacaaaaacacctgctgccgcagcaaagcaaatcccccagctttcttcattag

SEQ ID NO: 204771 - DNA, 1272 bp, synthetic construct
  misc_feature 1..1272: note = Description of Artificial Sequence: Synthetic coding sequence
  source 1..1272: mol_type = other DNA
atggagcggatgctgcccctgctggccctgggcctgctggccgccggtttttgccctgccgttctttgtcaccccaattcacctctggatgaagaaaacctcactcaggaaaatcaggatcgagggacacatgtcgatctaggcctggcatctgcaaacgtcgactttgcctttagtttatataagcagctggtgctgaaagccccagataagaatgtgattttcagcccactgagcataagcacagcattggccttcctgagtttgggcgcgcataacacaacactaaccgagatactgaagggattgaagtttaaccttaccgaaacctcagaagcagaaatccaccagagcttccagcatctgctgaggaccctcaaccagagttccgacgagttacagctgtctatgggaaacgcaatgtttgtcaaggagcagttatcattgctggaccgctttaccgaggatgccaagcggctatacgggagcgaggcgttcgccacggactttcaggactccgccgccgccaagaagctcatcaacgattacgtcaagaacggtacccggggtaaaatcactgatctgataaaggacctcgactcgcagaccatgatggtcctcgtgaattacatattcttcaaagcgaaatgggagatgcctttcgaccctcaggacactcaccagtcccggttttacctgagcaagaaaaaatgggtaatggttcccatgatgagtctgcaccacctgacaatcccctacttccgagacgaggagctgagctgtacggtcgtggagctgaagtatacgggaaacgcgtcagcactgttcatactgccagaccaggataagatggaggaagtggaagccatgctcctgcctgaaaccctgaagagatggagagattccttggaattccgggagattggagaactctacctgccaaagttttcgatatccagagattataatctcaatgatattttgctccagttaggcattgaagaagcgttcacctctaaggccgaccttagcgggataacaggagcccgaaacctcgccgttagccaggtggtccataaggctgtactagacgtctttgaggagggaacagaagccagtgctgctaccgctgttaagataaccctgctaagtgccctggtggagacccggactatagtgcgctttaatcgcccctttctaatgataatcgtgcccaccgatacacagaacatattctttatgtcgaaagtcactaatccaaaacaggcctag

SEQ ID NO: 204772 - DNA, 1272 bp, synthetic construct
  misc_feature 1..1272: note = Description of Artificial Sequence: Synthetic coding sequence
  source 1..1272: mol_type = other DNA
atggagcggatgctgcccctgctggccctgggcctgctggccgccgggttctgcccagctgttctgtgccaccccaattctcctttagacgaagagaacctgacacaggaaaaccaggacagaggcacccacgttgacctgggattggccagcgcgaacgtcgacttcgccttctctctctataaacaactggttctgaaagcccctgacaaaaacgtgatcttttcccccctctcaattagcactgctctggctttcctgagccttggagcccacaataccaccttaactgagatcctgaagggcttaaaatttaacctcaccgagactagtgaggccgagatacaccagtcatttcaacacctgctcagaactctaaatcagtccagcgatgagctgcagctatccatgggcaatgccatgtttgtgaaggaacagttgagtttgcttgaccgctttacagaggatgccaagcgcctctatggttccgaagctttcgccacagatttccaggattccgcggccgccaagaaactgattaacgactatgtgaagaatggcaccaggggtaaaattacagatttgatcaaggatctggattcacagacaatgatggtgctcgttaattacatattcttcaaagctaaatgggagatgccttttgatccgcaggatacccatcagagtcgcttctatctctcaaaaaaaaaatgggtgatggtgcccatgatgtcactacatcatttaaccatcccatactttagggatgaggaactcagctgcaccgtggtggagctgaaatacacaggcaatgctagcgctttgtttattctcccagatcaagataagatggaagaagtcgaagcaatgctgctgcccgaaactctgaagcggtggcgggactctctggaatttcgtgagattggagagctttatttgccaaagttctccatctcaagggattataacttgaacgacatcctcctgcagctcgggatagaggaagccttcacatctaaggccgacctaagtggaataaccggggcgcgcaacctggcggtttcccaagttgtccacaaggccgtgctggacgtctttgaggaagggacagaagcatccgctgccaccgccgttaaaataacactcctctccgccctcgtagaaacaaggaccattgtccgtttcaataggcctttcctgatgataattgttcccaccgacacccagaatattttttttatgtcgaaagtgaccaaccccaaacaggcatag

SEQ ID NO: 204773 - DNA, 1272 bp, synthetic construct
  misc_feature 1..1272: note = Description of Artificial Sequence: Synthetic coding sequence
  source 1..1272: mol_type = other DNA
atggagcggatgctgcccctgctggccctgggcctgctggccgccggcttctgtcccgccgtactgtgtcacccaaactcacctctcgacgaagagaacctgactcaggagaaccaggatcgcggcactcatgttgacctcggtctggccagtgccaacgtagacttcgctttttccctgtacaaacagctggtcctcaaggcccctgataagaatgtaattttctcccctctctcgatctcaacagcactcgccttcctgtcactgggtgctcataatactaccctgaccgaaatcctgaaagggctgaaatttaacctcactgaaactagcgaggcagaaattcaccaaagctttcagcatttattgcgcacgttgaaccagagcagcgatgagcttcaactctctatgggcaatgccatgtttgtgaaggaacagctgtccctgctggacaggttcacagaggatgcaaaacgtctgtatggttccgaggctttcgctaccgattttcaagactccgcagccgcaaagaaattgataaacgactacgttaagaacggtacaagggggaaaatcaccgaccttattaaagacctcgactctcagacgatgatggtgctcgtgaattatatattcttcaaagccaaatgggaaatgccttttgacccacaggatacccatcaaagtaggttttatttgagtaagaaaaagtgggtgatggtgcccatgatgtccctgcaccatcttacaattccctacttcagagatgaagaactgtcttgcactgtcgtagagctgaagtacaccgggaacgcgagtgccctgtttattctccctgaccaggacaagatggaagaggtggaggccatgctgttgccagagaccctcaagcggtggagagacagcctcgagttccgggaaattggggaactgtatctgcctaagttttccatcagccgcgattacaacctgaacgacatcttgctgcaacttggcatcgaggaggcctttacttcgaaggcagatctgtctggtattactggcgcccgaaacctggcggtcagtcaagtggtgcacaaggccgtacttgacgttttcgaggagggcaccgaggcatcagcagccaccgctgttaagatcacgttgctgagcgcacttgtggaaacccgcactattgtgcgtttcaaccggccattccttatgatcattgtgccgactgacacccaaaatatcttttttatgtcaaaggttacgaacccaaaacaggcgtag

SEQ ID NO: 204774 - DNA, 1347 bp, synthetic construct
  misc_feature 1..1347: note = Description of Artificial Sequence: Synthetic coding sequence
  source 1..1347: mol_type = other DNA
atgaagatccactacagccggcagaccgccctggagagcaccagctacattcagcttcccgaagcagagctgcgcatggagcgaatgttgccgctcttagcactggggttgctcgcagctggattctgccctgcagtgctctgccatccaaacagcccccttgatgaggaaaacctgacccaggagaaccaagatagaggcacacatgtcgatctgggcctggctagcgccaacgtcgacttcgctttctctctatacaagcagttggtgctaaaggccccagataagaatgtcatcttcagccccctttcgatctctacggccctggcgtttttgagcctcggggcccacaataccacgctaacagagatccttaagggtctcaaatttaatttgaccgaaacttctgaggccgagatacatcaatcattccagcatctgctgaggactcttaatcagtctagtgacgagctgcagctgtctatgggcaacgcgatgttcgtgaaggagcagctctctctgctcgataggttcaccgaagatgctaagagactgtacggttccgaagcctttgccaccgatttccaggatagcgcagccgccaagaagttaattaacgactacgtgaaaaacgggactcgggggaagatcactgatcttattaaagacctggatagccagaccatgatggtcctcgttaattacatctttttcaaagctaagtgggaaatgccatttgacccccaggacacacaccagtctaggttctatttgagcaagaaaaagtgggttatggtcccaatgatgagtctccatcatcttacaatcccatattttagggacgaagaactcagttgtaccgttgttgaactgaagtacactgggaacgcctccgcgctcttcatcctccctgatcaggacaaaatggaggaagtggaggccatgctcctacctgagaccctcaaacgctggagagactccctggagttccgggaaattggcgagctttatctgccgaaattctcaatcagccgtgactacaatctgaacgatattcttctccagctcgggatcgaggaggcctttacttcgaaagccgacctgagtggtatcactggggccaggaatttggcggtaagccaagtagtgcataaggcggtactcgatgtcttcgaggaagggaccgaggcaagtgccgcaacagcggttaagatcacactgctgagcgctttagtggagacccgtacaatcgttagattcaaccgacccttcttgatgattatagtacctaccgacactcagaatattttcttcatgagcaaagtgactaacccgaaacaggcgtag

SEQ ID NO: 204775 - DNA, 918 bp, synthetic construct
  misc_feature 1..918: note = Description of Artificial Sequence: Synthetic coding sequence
  source 1..918: mol_type = other DNA
atggagcggatgctgcccctgctggccctgggcctgctggccgccggtttctgtcccgcggttctgtgccatccaaattccccgcttgatgaggagaacctgacacaagagaatcaggaccggggcacacacgtggacctgggcctggccagcgcaaacgtggattttgccttttccttgtataaacagctcgtcttgaaggcgccagataagaacgttattttctctccactgagtatttctaccgccctggcatttctgtcactgggagcccacaacaccactcttaccgagatcctgaaaggtctgaaattcaacttgactgagaccagcgaggccgaaatccatcagagcttccagcaccttttaaggacgttgaaccaatcttccgacgagctgcagctttccatggggaacgcgatgtttgtgaaagaacagttaagcttgctggacagatttaccgaagacgctaagcgtctctatggctccgaagccttcgcaaccgactttcaggactcagctgcagctaagaaactcataaacgactatgtcaaaaacggaacacgcggtaaaatcacagatctgattaaagacctcgattcacaaaccatgatggtcctggtgaattatattttttttaaggctaaatgggagatgccgtttgaccctcaggacacccatcagagccgattctatttgagcaagaaaaaatgggtcatggtgccaatgatgtctcttcatcacttgactatcccctacttccgagatgaagagctctcctgcacggtggttgaattgaagtataccggcaatgcgagcgccttgtttattctgccagatcaggacaagatggaggaagtcgaggcgatgctactgcctgaaactctaaaacggtggcgggacagcctcgagttttag

SEQ ID NO: 204776 - DNA, 1284 bp, synthetic construct
  misc_feature 1..1284: note = Description of Artificial Sequence: Synthetic coding sequence
  source 1..1284: mol_type = other DNA
atgcacctgatcgactacctgctgctgctgctggtgggcctgctggctctgagccacggccagctgcacgtcgaacatgatggcgagagttgttctaactcctcccaccagcagattctcgagaccggcgaaggatcaccgagtctgaaaatagctcccgctaatgccgacttcgcttttagattttattatttaattgcgtccgagacccccggcaagaacatcttcttctctcctttatccatatctgctgcctatgccatgctgtcactcggggcttgttctcattcacgaagccagatcctggaggggctgggattcaacctgacagagctgtcggagtccgacgtacatcgaggcttccagcatctgcttcacactctcaatctgcccggacacgggttagagaccagggtgggaagtgcactgttcctgtctcacaacctgaaattcctcgctaagttcctcaacgacactatggctgtgtacgaagctaagctgtttcacacaaatttttatgatacagtaggcacgatacagttgatcaacgaccacgtgaagaaggaaacacgcggcaagatcgttgacctcgttagtgaactgaagaaggacgtgctgatggtactggtcaattacatatactttaaggcactgtgggaaaagccttttatcagctcacggacaacccccaaagacttttacgttgatgagaacacgacagttagggttccgatgatgttgcaggaccaggagcatcactggtaccttcacgaccggtatctgccatgttccgtgctgcgcatggactataaaggcgatgcgacagtgttctttatcctgcccaatcagggtaagatgcgcgaaatcgaagaagtgctcacacctgagatgctaatgcgttggaataatctcctgaggaagcgaaacttctacaaaaagctagagttacacctgcctaagttcagtatttccgggagctacgtactcgaccagatcttaccaaggctgggcttcactgacctcttcagtaagtgggcggacctgagtggcatcacaaagcaacaaaaactcgaagcatcgaaaagtttccacaaagcaacactcgatgtggacgaagccgggaccgaggccgccgccgctacctctttcgccatcaagttcttttcagcgcagactaacaggcacatcttgaggtttaaccggccttttttggtcgtgatttttagcaccagtacccagagtgtgcttttcctgggcaaggttgtggaccccacaaaaccttag

SEQ ID NO: 204777 - DNA, 1284 bp, synthetic construct
  misc_feature 1..1284: note = Description of Artificial Sequence: Synthetic coding sequence
  source 1..1284: mol_type = other DNA
atgcacctgatcgactacctgctgctgctgctggtgggcctgctggctcttagccacggacagctccacgtcgagcacgacggagaatcttgttctaattcctctcaccaacagatacttgagacaggagaaggatctccaagcctgaagatcgcacccgctaacgccgatttcgcctttcggttttattacctgatcgccagtgagacaccaggaaagaacatatttttcagtcccctgagcatcagcgccgcctatgccatgctgagtctgggcgcgtgtagccactcacggtcacagatacttgaggggctggggttcaacctcaccgagctgagcgaatcagatgtccaccgcggatttcagcacctgctacatacattaaacttgcccggtcacgggctagaaaccagggtcggatccgcattgtttttgtcacataacctcaaatttcttgccaagttcctcaacgacacaatggcagtatatgaggccaagctgttccacactaacttctacgatacagttggtacaatccagttaattaatgaccatgttaaaaaagaaacaaggggcaaaatcgtggatttggtgagtgagcttaaaaaggacgtcctgatggtactcgtgaactatatttactttaaagcactgtgggaaaagcctttcatctcttcccggactacccccaaggatttctatgtggatgagaataccactgtccgggtgccaatgatgttacaggaccaggaacaccactggtacctccacgacaggtacctgccatgcagtgtcctgagaatggactacaaaggtgatgccacagtgttttttatcctgcccaaccaggggaagatgagagaaatcgaagaagttttaacgccggagatgttgatgcggtggaacaacttattgcggaaaaggaacttttacaaaaagcttgagctacatctgcctaagttttccatctccggaagctacgtgctggaccagatcttgcctaggcttggttttactgatctctttagtaaatgggctgacctttcaggaattacaaaacagcagaagctggaggccagcaaatccttccacaaggctacgttggacgtggacgaagcgggtaccgaagcggctgctgcaacttcgtttgcaattaagtttttttccgcacagaccaataggcacattttacgcttcaataggcccttcttagttgtcattttctccaccagcacgcagagcgtcctttttctgggaaaagtggtcgacccaaccaaaccctag

SEQ ID NO: 204778 - DNA, 1284 bp, synthetic construct
  misc_feature 1..1284: note = Description of Artificial Sequence: Synthetic coding sequence
  source 1..1284: mol_type = other DNA
atgcacctgatcgactacctgctgctgctgctggtgggcctgctggccctcagccatggccagttgcacgttgagcatgacggggagtcttgcagtaacagcagccaccagcagattctggagaccggcgagggctcccccagcctaaagatagcccctgctaatgcagatttcgcctttcgcttctactacctgattgcgtccgaaacgccgggaaagaacattttctttagccccctctcaatatctgccgcctacgctatgctaagcttgggtgcttgcagccattctagatctcagatcctcgaaggcctgggctttaatctgacagagttatccgaatctgatgttcaccgcgggttccaacatttattgcatacgcttaatctgcccggccacggactggaaacgagagtgggctccgcccttttcctctcacacaatctgaagtttctggccaaatttctaaacgacaccatggctgtctatgaagcaaagctcttccatactaatttttatgatacggtaggcactatccagctgattaatgatcacgttaagaaggagacgcggggtaagatagtagacttggtgtctgaactgaaaaaagacgtcctgatggtgctggtaaactacatttactttaaggccttgtgggagaagccttttatctccagtcggacaacacctaaagacttctatgtcgatgaaaacactacagtgagagtccctatgatgctgcaagaccaagaacatcactggtacctgcatgaccgatacttaccttgttccgtgttgcggatggactataaaggagacgctacggtgttcttcatcttgcccaatcagggaaagatgcgggagatcgaggaggtcctgacccccgaaatgctgatgaggtggaacaacttgctgcgaaagagaaatttctacaaaaaactggagcttcaccttcctaagttttctatcagcggcagttatgtgctggatcaaatccttcctagactggggttcacagatctatttagcaaatgggcggatttatccggcataacaaaacagcagaagctggaggcgtccaaaagtttccacaaggccacccttgatgtggacgaggccggaaccgaagctgccgccgccacttcgttcgcaatcaagttcttctcggcccagactaaccgacacattctcaggttcaaccgaccattcttagtggtgatcttcagtacaagtacccagagtgtcctgttcctcggtaaagtcgttgatccaaccaaaccctag

SEQ ID NO: 204779 - DNA, 1218 bp, synthetic construct
  misc_feature 1..1218: note = Description of Artificial Sequence: Synthetic coding sequence
  source 1..1218: mol_type = other DNA
atgcccctgctgctgtacacctgcctgctgtggctgcccaccagcggattatggaccgtgcaggctatggaccccaacgccgcttatgtgaacatgagcaaccatcacagagggttggcaagcgctaatgtggacttcgccttctctctgtacaaacatctagtagcactgtcccccaaaaagaacatctttattagcccagtgtcaatctctatggctctcgctatgctgagtttgggaacatgcggccatactagagctcaactcctgcagggtctaggattcaacctcactgaaagaagtgaaaccgaaattcatcagggattccaacacctgcaccaactgtttgctaaaagcgacacgagcttggaaatgaccatgggtaatgccctgttcctggatggaagtctggagctattggaaagcttttccgccgacattaaacactattacgagtcagaggtactggcaatgaactttcaggattgggcaaccgcatcaagacagatcaacagctatgttaaaaacaagactcagggaaagatcgttgacctgttctcgggcctggactcacccgctatactggtcctggtcaactatattttcttcaagggaacatggacccagccatttgatttggcgtccacccgcgaagagaacttttatgtcgatgaaaccaccgttgtaaaggtgccaatgatgctgcagagtagcacaattagctacttgcacgatagcgagcttccatgccagctggtccaaatgaactacgttggtaacggcactgttttttttattctgccagataagggtaagatgaatacagtgatagccgcgctttctcgcgacactattaatcgatggagtgctggactgacttcctcacaggtcgacttatacattccaaaggtcactatttctggggtctacgacctgggagacgtcttggaagagatggggattgccgacctgttcactaaccaggcgaacttctcccggataacccaggacgcccaactgaaatctagtaaggtagtacacaaagcagttctgcagctgaatgaagagggcgtcgacactgcgggctccacaggcgttacactaaacttgacatcaaagcctattatcctccggtttaaccaacccttcattatcatgatttttgaccactttacttggtcatccctcttcctcgccagggtgatgaatcccgtgtag

SEQ ID NO: 204780 - DNA, 411 bp, synthetic construct
  misc_feature 1..411: note = Description of Artificial Sequence: Synthetic coding sequence
  source 1..411: mol_type = other DNA
atgcccctgctgctgtacacctgcctgctgtggctgcccaccagcggactttggaccgtgcaggcaatggaccccaatgcggcctatgttaacatgagcaatcaccaccgaggtctggcttctgctaatgtcgatttcgcattcagcctctacaaacacttagtcgcactcagcccgaaaaagaacatattcatctcaccggtgtccatctctatggccttggccatgctctccttgggaacctgcgggcacacaagagcacagctgctgcaagggttagggttcaatctcactgaacgcagcgagactgagatccatcagggattccagcacctacaccagctattcgcaaaatcggacacctccttggaaatgaccatgggcaatgcgctctttctggacggctcctag

SEQ ID NO: 204781 - DNA, 1194 bp, synthetic construct
  misc_feature 1..1194: note = Description of Artificial Sequence: Synthetic coding sequence
  source 1..1194: mol_type = other DNA
atggacagcctggccaccagcatcaaccagttcgccctggagctgtcgaaaaagctagccgagtcagcccagggcaaaaatatcttttttagcagctggagcataagcacttccctgacaatcgtctacctcggagccaagggaacgaccgctgcacagatggcccaagtactgcagtttaatcgtgatcaaggagttaagtgcgacccagaaagcgaaaagaaaagaaaaatggaatttaatctctctaactctgaagagatccattccgattttcagaccctcatctccgagatactgaaacctaatgacgattacctgctgaagactgccaacgcgatctacggtgaaaagacttatgcctttcataacaagtatctcgaggatatgaagacttactttggcgcagaaccacagcccgtcaacttcgtcgaagccagtgaccagatcaggaaggatatcaattcctgggttgaaaggcaaacggaaggtaaaatccaaaacctgttgccagacgatagcgtggactctactaccaggatgatcctagtgaatgccttatatttcaaaggaatctgggaacatcagttcttggtacagaatactaccgagaagccttttagaatcaatgagacgacttccaaacccgttcagatgatgttcatgaagaaaaaactccacatttttcacatagaaaagcccaaagccgtgggacttcagttatactataaatcacgcgacctgagtctcctgattctgctccccgaagacatcaatggtctggagcagttagagaaagcaatcacctatgaaaagctgaacgaatggacaagcgccgatatgatggagctgtacgaggtgcagctgcacctccctaagttcaagctggaggattcttacgatttgaagagtaccctgagctctatgggaatgtcagatgccttcagccagtccaaggcagatttctctggcatgagtagtgccaggaacctatttctgagtaacgtgttccataaggcgttcgtggagattaatgaacagggtactgaggctgctgcaggcagtgggagcgagattgatattcggattcgtgtgcccagtattgagttcaatgcaaaccaccccttcctatttttcattaggcacaataaaaccaacaccattctcttctacggccgactctgtagtccatag

SEQ ID NO: 204782 - DNA, 1020 bp, synthetic construct
  misc_feature 1..1020: note = Description of Artificial Sequence: Synthetic coding sequence
  source 1..1020: mol_type = other DNA
atggacagcctgggcgccgtgagcacccggctgggcttcgacctgtttaaggagctcaaaaagacgaatgatggcaatatcttcttcagccctgtgggtatcttgaccgctataggcatggttctgctcggcacaagaggtgctacggcctcacaacttgaagaggtgtttcactctgagaaggaaacaaagagctctcgcattaaggcggaagaaaaagaggtgatcgaaaacaccgaggctgtgcaccagcagtttcaaaaatttctgaccgaaatcagtaagctgactaacgattatgagctgaacatcactaaccggctatttggggagaaaacatacttgttcctgcaaaagtacctggattatgtggaaaaatattaccacgctagcctggaacccgtggatttcgtgaatgcggccgacgaaagtaggaagaaaatcaacagctgggtagagtcaaagaccaacgagaaaattaaagacctctttcctgacggaagtattagctctagtacgaaactcgtgctggtgaatatggtgtatttcaaagggcaatgggatagggagtttaagaaggaaaacacgaaagaggagaagttttggatgaacaaaattattgataagattagcccagaaaaactggttgagtggacctctcctgggcacatggaggaacggaaggtgaacttgcacctccccagatttgaagtcgaagacggatacgacttggaggctgtcttggcggctatgggaatgggcgacgccttttctgagcacaaagcggactactccgggatgtctagcggctccggtttatacgcacaaaagtttttacactctagcttcgtggcggtaacggaggagggtaccgaagcagcagcggctacgggcatcggtttcaccgtgacatctgcgcccgggcacgaaaacgtccactgtaaccacccgtttctgtttttcatcagacataacgagtcaaatagcattctgttctttgggcgcttcagttctccttag

SEQ ID NO: 204783 - DNA, 1176 bp, synthetic construct
  misc_feature 1..1176: note = Description of Artificial Sequence: Synthetic coding sequence
  source 1..1176: mol_type = other DNA
atggacagcctgggcgccgtgagcacccggctgggcttcgacctgttcaaagagctgaagaaaactaacgacggcaatatctttttttcccccgttggaattctgactgccattggcatggtactcttgggaacacggggggccacagctagtcagctggaagaggtctttcacagcgaaaaggaaaccaaatcaagccgcattaaggctgaggagaaagaggtgattgaaaacaccgaggctgtacaccagcaatttcaaaaatttctgaccgagatctccaagctgaccaacgactacgagttaaatatcactaatagactgttcggggaaaaaacatacctgttcctccagaagtatttggattacgtggaaaagtactatcacgcatctctggagcctgtggactttgttaacgctgccgatgagtccagaaaaaagattaactcctgggttgagtcaaagacaaacgagaagatcaaggacctgttccccgacggatctatcagctctagcacgaaactggtcctggttaacatggtgtactttaagggccagtgggaccgagagtttaagaaagaaaatacgaaagaagagaaattctggatgaataagtcaacgagcaagtctgtccaaatgatgacacagagtcatagcttctcattcaccttcttggaggacttacaggcgaaaattctgggtatcccctacaaaaacaatgatctgagcatgtttgtgcttttgcctaatgacatagacgggcttgagaaaattatagataagataagcccagaaaagctggtggagtggacctctccaggccacatggaagaaaggaaggtgaaccttcacttaccgaggtttgaagtggaggatggttacgatctggaggcagtgcttgcagccatgggaatgggtgacgcgttctccgagcacaaagcagattattcgggcatgtctagtggaagtggactgtatgcacagaagttcctgcacagcagttttgtggcagtgaccgaagaggggacggaggccgctgctgctaccggcattgggttcacagtgacatccgcccccggccatgaaaatgtgcactgcaatcaccccttcctgttcttcattaggcataatgagagcaacagcattctgttttttggcaggtttagctccccatag

SEQ ID NO: 204784 - DNA, 930 bp, synthetic construct
  misc_feature 1..930: note = Description of Artificial Sequence: Synthetic coding sequence
  source 1..930: mol_type = other DNA
atggacagcctgggcgccgtgagcacccggctgggcttcgacctgttcaaagagctgaaaaaaaccaacgacggcaacatattcttcagtccagtgggtatcctgacagccattggtatggtactcttaggtactcggggtgccacggctagccagctggaggaggtcttccactccgaaaaagagaccaaaagttcccggatcaaggcggaggaaaaggaagtagagaagattaaagacctgtttcccgatggtagcattagctcatcgaccaagttagtgctagtgaacatggtgtatttcaaaggccaatgggacagagaatttaaaaaagaaaacactaaggaggagaaattttggatgaataagtctacaagcaaatcagtgcagatgatgactcaatctcacagctttagcttcaccttcctggaggatttgcaggccaagattctgggtatcccttataaaaataacgacctgtccatgtttgtactcctgccaaacgacatcgacggtttggagaaaatcatagacaagatatcccccgagaagctagtggaatggacgtcacccggacatatggaggagcgaaaggtcaatctccacttgcccagatttgaagtggaggatggctatgatctcgaggctgtcctcgcagccatgggaatgggcgacgctttcagtgagcacaaggccgattacagcggtatgtcaagtggctccggactgtacgcccaaaaattcctccattcaagttttgttgcggtcaccgaggaagggacagaggcagctgctgccactggaattggtttcacagtgacctcagctccaggccacgaaaacgtccattgtaaccaccctttcctcttttttattcgtcataatgagtccaactcaattctctttttcggccgtttctcctctccatag

SEQ ID NO: 204785 - DNA, 1173 bp, synthetic construct
  misc_feature 1..1173: note = Description of Artificial Sequence: Synthetic coding sequence
  source 1..1173: mol_type = other DNA
atgaacagcctgagcgaggccaacaccaagttcatgttcgacctgtttcagcaatttcgtaaatcaaaggaaaataacattttttacagtccgatcagcatcacctccgctctgggcatggtactgctgggcgctaaggacaacacagcacagcagattaagaaagtgctgcacttcgaccaggtcaccgaaaacaccactggcaaggccgccacttaccacgttgaccgctccggcaacgtacaccatcagttccagaaactgctcacagaatttaataagtccaccgacgcatacgaactgaagattgctaacaaactctttggggagaaaacctatctgttcctccaagagtatctggatgcaataaaaaagttttatcagacatcggtggagtcagtagactttgccaacgccccagaagagagtaggaaaaagatcaatagttgggtggaatcgcagactaacgagaagatcaaaaacctcattccagagggaaatatcggaagcaataccacgctggtgctggtgaatgcaatctattttaaggggcagtgggagaaaaagtttaacaaagaagacacgaaggaggagaagttttggccaaacaaaaatacctataagtctatccagatgatgcggcaatacactagttttcatttcgccagccttgaagacgtgcaggctaaagtacttgagataccatataaaggaaaggatttgagcatgatcgttttattgcctaacgaaatagacggtctccagaagcttgaggaaaagttgacagccgaaaaactaatggagtggaccagcttgcagaatatgagagagacccgcgtggatctccacctgccacgtttcaaagttgaggaatcctatgatttgaaagatactctgagaaccatggggatggtagatatcttcaatggagacgccgatctcagtggcatgacagggtctagagggctggtgctgtcgggtgtcctgcacaaggcctttgtggaggtaacggaagaaggagccgaggctgctgcagctacagcagtggtggggtttggttcctctcccacctccaccaatgaggaatttcattgcaaccatccatttctgttttttattcggcaaaacaaaactaacagtatcttgttttacggaaggttcagcagcccatag

SEQ ID NO: 204786 - DNA, 1173 bp, synthetic construct
  misc_feature 1..1173: note = Description of Artificial Sequence: Synthetic coding sequence
  source 1..1173: mol_type = other DNA
atgaacagcctgagcgaggccaacaccaagttcatgttcgacctgtttcagcagttccggaagagcaaggaaaataacatcttttactctcctatttccataacctccgcattaggcatggtgctgctgggggcgaaggacaacactgcccaacaaatctctaaggttctccatttcgaccaggttacggaaaatactactgagaaggccgccacgtatcacgttgacaggtccgggaacgtgcatcatcaattccagaagttgcttacggagtttaacaagtccactgacgcctatgaacttaagatcgccaacaagctgttcggggagaagacctaccagtttctgcaagagtatctggacgccattaaaaaattttatcagacatccgtcgaatctacagactttgctaacgcaccagaggagagccgaaagaagatcaactcatgggtggaaagccagactaacgagaagattaagaatctgtttcctgacggaactataggaaatgacaccaccctggtccttgtgaacgctatctactttaaaggccagtgggaaaacaagtttaagaaagagaatacaaaagaggaaaaattctggcccaataagaatacttacaagagtgttcagatgatgcgacagtacaatagtttcaattttgctcttctcgaagacgtgcaggcgaaagttctggaaataccatacaagggaaaggatcttagtatgatcgtgttgctcccgaacgagattgatgggctgcagaaactcgaagaaaaactgactgcagagaagctgatggagtggacctctctgcagaatatgcgtgagacatgcgttgacctgcacctgcctaggttcaagatggaggaatcctatgacctaaaagatactttgcgcacaatgggcatggtgaatatctttaatggggacgccgatctctccgggatgacatggtcacacggtctaagtgtgtcaaaagtgttgcataaggcattcgtcgaggtgacagaagagggggtggaggccgctgcagccacggccgtggtagtggtagagctcagcagtcccagcacaaacgaggaattttgctgtaatcaccccttccttttcttcattcggcaaaataaaaccaacagtattctgttttatgggaggttcagctctccatag

SEQ ID NO: 204787 - DNA, 1017 bp, synthetic construct
  misc_feature 1..1017: note = Description of Artificial Sequence: Synthetic coding sequence
  source 1..1017: mol_type = other DNA
atgaacagcctgagcgaggccaacaccaagttcatgttcgacctgttccagcagttccgcaagagtaaggaaaacaacatattctattcgccaatcagtattacctccgcactggggatggtgttgcttggagccaaggataatactgcccagcagatctctaaagtgctgcattttgatcaagtgaccgaaaacacaaccgagaaggctgcgacctaccacgtggatagatccggcaatgtccatcatcaatttcaaaaactcctgacagagttcaataagtcaacagatgcttatgaactgaagattgccaataagctattcggggagaaaacctatcagtttctgcaggagtatctcgatgcgataaaaaagttttatcagacgtccgtcgaatccacggacttcgcgaatgcccccgaggagtctcgcaagaagatcaattcgtgggtagaaagccagacaaatgaaaaaatcaaaaatctcttcccagatggcaccatcggcaatgataccaccctggtcttggtgaacgcaatatatttcaaggggcagtgggagaataagtttaagaaggagaataccaaagaggaaaagttctggcctaacaaacttgaggagaaacttacagccgaaaagctgatggagtggacatcgctccaaaatatgcgggaaacgtgtgtagatcttcaccttccaaggtttaaaatggaggagagttacgacttaaaagacaccttgcgaactatgggcatggtaaatatttttaatggtgatgctgacttgagcgggatgacctggagccacggattgtcggtaagtaaggtcttacacaaggcttttgtcgaagttaccgaggaaggtgtggaggccgccgccgcgaccgcggtcgtcgtggtcgagctgtccagtccctctaccaacgaggagttctgctgcaaccacccttttttatttttcattcgccagaacaaaacaaactctattctgttttacggccggttttcttccccatag

SEQ ID NO: 204788 - DNA, 1128 bp, synthetic construct
  misc_feature 1..1128: note = Description of Artificial Sequence: Synthetic coding sequence
  source 1..1128: mol_type = other DNA
atggacgccctgcagctggccaacagcgccttcgccgtggacctgttcaaacaactgtgcgagaaagagcccttgggaaacgtactcttttcacctatctgtctttccaccagcttgagcctggcccaggtcggtgcaaagggggacacagcaaacgagatcggccaggtgctccacttcgaaaacgtcaaagacgttccattcggatttcagactgtgacaagtgatgtaaataaactgtctagtttctacagtttgaagcttatcaagaggctgtatgtggacaaaagcctgaacctgtccacagagttcatcagctccacgaaacggccctacgcaaaagagttggaaacggtcgacttcaaggataagttggaggagaccaagggtcagattaacaactccatcaaagatttaactgatgggcactttgaaaacatcttggcagataacagcgtcaatgaccagacaaaaatccttgtagtgaatgcagcttactttgtggggaagtggatgaagaagtttagcgagagtgagaccaaggaatgtccgttccgcgtgaacaagacagacactaagcccgtgcagatgatgaacatggaagctacattctgcatgggcaatatcgattcaataaactgtaagataattgagctgccctttcagaacaaacatctgagtatgtttatccttcttccaaaggatgtcgaggatgagtctaccggcctagagaaaatcgagaagcagctgaacagcgagtcactcagccaatggacaaacccctctactatggcaaacgctaaagtgaaattgtctataccaaagtttaaggtggaaaaaatgatcgaccccaaagcctgcctcgaaaatctgggcctgaagcatatttttagcgaagatacaagcgacttttcgggaatgtcggaaactaaaggagtggccctgagtaacgtaattcataaggtgtgtctggagatcacagaggatgggggggactctatcgaggttcctggggctaggattctgcagcacaaagacgagctcaacgctgatcaccccttcatctacatcatcagacacaataagaccagaaacatcattttttttggcaaattctgcagcccatag

SEQ ID NO: 204789 - DNA, 390 bp, synthetic construct
  misc_feature 1..390: note = Description of Artificial Sequence: Synthetic coding sequence
  source 1..390: mol_type = other DNA
atggacgccctgcagctggccaacagcgccttcgccgtggacctgttcaagcagctgtgtgagaaggaaccgctaggcaatgtgctgttctccccaatttgtctcagcacaagtctctccctggcgcaagtaggtgcaaagggtgataccgccaacgaaatcgggcaggttttgcatttcgaaaatgtaaaggacgtaccgttcggattccagaccgtgacttccgatgtaaataagctctcttctttttattctctgaaactcatcaaacgattatacgtcgataaatctctcaacctcagtacggaattcattagcagtaccaagaggccatacgctaaagagttggaaactgtggactttaaggacaagctggaagagacaaaatag

SEQ ID NO: 204790 - DNA, 1131 bp, synthetic construct
  misc_feature 1..1131: note = Description of Artificial Sequence: Synthetic coding sequence
  source 1..1131: mol_type = other DNA
atggacgtgctggccgaggccaacggcaccttcgccctgaacctgctgaaaacactgggtaaggacaatagtaaaaacgtgttttttagtcccatgtctatgtcctgtgcactggccatggtctacatgggtgctaagggtaatacagcggctcagatggcccaaatccttagcttcaacaaatccggcggcgggggagacatccatcagggctttcagagtttgctgactgaagtgaataaaaccgggacacagtacctgttgagaatggccaaccgtttattcggggagaagagctgtgattttctctccagctttcgggactcttgccagaaattctaccaggccgagatggaagagctagactttatttcggccgtcgaaaaatcccgtaaacacattaatacttgggtggctgagaagacggagggcaagattgccgaattactgagcccaggttcagtcgacccccttactagactggtcctcgttaatgcggtttactttcggggcaattgggatgagcagttcgacaaggaaaatactgaggagcgcctgttcaaagtctccaagaatgaggaaaagcctgtgcagatgatgttcaaacagagtacctttaagaaaacctatataggcgaaattttcacacaaatactggtcttgccctatgtaggaaaagagttgaacatgatcataatgttacccgatgaaaccaccgatttaagaacagttgagaaagagctgacctacgaaaaattcgtggaatggacccggttggatatgatggacgaggaagaagtggaagtcagtctccctcggtttaaattggaggagtcatacgacatggagtctgtccttcgaaacttggggatgacagatgcgttcgaactgggaaaggccgacttctccggcatgagccaaacagacctcagcctcagcaaagttgtccacaagtcctttgtcgaggtaaacgaagaagggactgaagcagccgccgccacggcagctataatgatgatgcgctgcgctcgcttcgtcccgcgtttttgcgctgatcacccatttctgttctttatacaacatagcaaaactaatgggatcctcttttgcgggcggttctcttcaccctag

SEQ ID NO: 204791 - DNA, 546 bp, synthetic construct
  misc_feature 1..546: note = Description of Artificial Sequence: Synthetic coding sequence
  source 1..546: mol_type = other DNA
tgactgaacctgctgaagaccctgggcaaggacaacagcaagaacgtgtttttttctccaatgtccatgagctgtgcgctggctatggtctacatgggagccaaagggaacaccgcagcccagatggcccagatcctgagttttaacaaatctggggggggaggcgacattcatcagggctttcagtctttactgaccgaggttaataagacaggaacccagtacctcttaagaatggccaatagggaatcctatgatatggaaagtgtgctccgtaacctcggaatgactgacgcattcgaacttggcaaagccgattttagcggcatgtcccaaaccgacctgagcctgtctaaggtggtgcataagtccttcgtggaagttaacgaagaaggaaccgaagcggcggctgctaccgcagccatcatgatgatgagatgcgcgcgctttgtgccaaggttctgtgccgaccacccatttctgttcttcattcagcattcgaagacaaacggtatcctcttttgcggcagatttagcagtccttag

SEQ ID NO: 204792 - DNA, 1131 bp, synthetic construct
  misc_feature 1..1131: note = Description of Artificial Sequence: Synthetic coding sequence
  source 1..1131: mol_type = other DNA
atggacgtgctggccgaggccaacggcaccttcgccctgaacctgctcaaaaccctgggtaaagataacagcaagaacgttttctttagcccaatgtctatgtcatgtgctttagcaatggtgtatatgggggcaaaagggaacactgcagcacagatggcacagatcctgtccttcaacaagtcaggaggagggggggacatccatcaaggcttccaaagtttgctgaccgaggttaacaaaaccggcacacagtacctgcttaggatggctaatcgcctgtttggcgaaaaaagttgtgactttctcagctcctttcgcgactcatgccagaaattttaccaggctgaaatggaggaactggattttatcagtgccgtggaaaagagccggaagcacattaacacctgggtggccgaaaagacagagggcaagatcgctgagctcctttccccaggcagcgtggacccgctgacgagactggttctggtcaacgctgtgtatttccgaggcaactgggacgaacagttcgacaaggaaaatactgaagagagattatttaaggttagcaagaatgaggagaaacccgtccaaatgatgtttaagcaaagtaccttcaagaagacgtacatcggtgaaatctttactcagatcctagttttgccatacgtgggaaaagaactaaacatgatcatcatgctacccgatgaaacaaccgatcttagaaccgttgaaaaggaacttacgtacgaaaaatttgtggagtggacccggctggatatgatggatgaagaggaggttgaagtttctttacccagattcaagctggaggaatcctacgacatggagtctgtgctaaggaatctagggatgactgacgcgtttgagctgggaaaggcagatttttccgggatgtcacaaaccgaccttagtctcagcaaagttgttcataagtctttcgtcgaagtcaacgaagaaggcactgaagctgcagccgccaccgccgccattatgatgatgagatgcgcccgctttgtgccccgattctgcgcggaccacccctttctgtttttcatccagcactctaagactaatgggatattgttttgcgggagatttagcagcccttag

SEQ ID NO: 204793 - DNA, 1131 bp, synthetic construct
  misc_feature 1..1131: note = Description of Artificial Sequence: Synthetic coding sequence
  source 1..1131: mol_type = other DNA
atggacgtgctggccgaggccaacggcaccttcgccctgaacctgctcaaaacgttggggaaggataattcaaaaaatgtgttttttagtcccatgtccatgagttgtgccctggccatggtctacatgggggccaagggtaacaccgccgcacagatggcacaaatcttgtcctttaataagtcagggggcggaggggacatccatcaaggttttcagtccctccttacggaggtcaacaagacaggcacccagtatctccttcggatggctaatcgtctatttggagagaaatcgtgtgattttctcagctccttccgtgacagttgtcagaagttttatcaagctgagatggaggagctcgatttcatcagcgctgtagaaaaatctcgaaaacatatcaacacgtgggttgcagagaaaaccgagggaaaaattgccgaacttctaagtccgggaagtgtagaccccctgacaaggcttgtgcttgtgaatgcggtctacttcagggggaactgggacgagcaatttgacaaagagaacaccgaggagagactgttcaaggtctcaaaaaacgaagagaaacctgttcagatgatgtttaagcaatctacttttaagaagacgtacatcggagaaatctttacacagattttggtgcttccttacgtgggcaaggagctgaacatgatcataatgctgccggacgaaacaactgatctccgtactgtggaaaaagagctcacttacgagaagttcgtggagtggaccaggctggatatgatggatgaggaagaagtcgaggtaagtctgccccggtttaagctggaagagtcctacgacatggagtcagtcctccgcaacctgggcatgaccgacgctttcgagctgggaaaagctgacttttccggcatgtctcagaccgatctgtcccttagtaaggtcgtccataaaagctttgtcgaggtgaacgaagaaggaactgaggccgcggcagcgacggctgcaatcatgatgatgcgctgcgcccgattcgtgcccaggttctgcgccgatcatccctttctgttttttatacaacactccaaaacaaacggaatcttattctgcggccggttttcttccccctag

SEQ ID NO: 204794 - DNA, 1131 bp, synthetic construct
  misc_feature 1..1131: note = Description of Artificial Sequence: Synthetic coding sequence
  source 1..1131: mol_type = other DNA
atggacgtgctggccgaggccaacggcaccttcgccctgaacctgctcaaaaccctcggcaaggacaactccaaaaacgttttcttctcaccaatgtcaatgagttgcgcactcgcaatggtatacatgggggccaagggtaacactgccgcccaaatggctcagatcctgagttttaacaagtccggcggtggcggagatattcaccagggctttcagagccttctaaccgaagttaacaagactgggacacagtatttactcagaatggctaataggctattcggggagaaaagttgtgacttcctctccagctttagggatagctgccagaaattctaccaggcagagatggaagaactggactttatcagcgctgtggaaaaatctcgcaagcatatcaatacctgggtagctgagaagaccgagggaaagatcgccgagttgctttctcccgggtcagtcgatcctcttacaagattagtgctcgtcaatgccgtgtattttagggggaattgggacgaacaatttgacaaggagaacactgaggagagactgtttaaagttagtaaaaacgaggagaagccagtccagatgatgttcaaacagagcaccttcaagaagacctatataggagagatattcacacaaatcctggtgctgccatacgtgggcaaggaacttaacatgataataatgctgcctgacgagaccactgacctgagaaccgtcgagaaagaacttacctatgaaaaatttgtcgagtggaccagactcgacatgatggacgaggaggaggtggaagtgtctctgccccgtttcaagctagaggaatcatatgacatggagtctgtactcagaaacttgggaatgactgacgcgttcgaactcgggaaggctgatttcagtgggatgagtcaaaccgatctgtcactgtctaaggtcgtgcataagtctttcgtagaggtgaatgaagagggcactgaagcggctgcggccaccgcagccatcatgatgatgcgctgcgctaggttcgtccccaggttttgtgctgaccacccatttctgttctttatccagcactccaaaactaacggtatactcttctgtggcagattctctagcccgtag

SEQ ID NO: 204795 - DNA, 1131 bp, synthetic construct
  misc_feature 1..1131: note = Description of Artificial Sequence: Synthetic coding sequence
  source 1..1131: mol_type = other DNA
atggacgtgctggccgaggccaacggcaccttcgccctgaacctgctgaagacactcggcaaagacaacagtaagaatgtatttttctccccaatgtctatgtcctgtgctctggcaatggtctacatgggagcaaaggggaacaccgccgctcagatggctcagatcctgtccttcaataaatcgggtggtggtggagatatacaccaaggattccaatcactgcttactgaagtcaacaagaccggcacacagtacctcctgcggatggcaaatcgactgtttggggagaagtcttgcgacttcctttcctccttccgagacagttgccagaaattttatcaggccgaaatggaagaactggattttatctctgccgtggagaaatcgcggaaacatatcaatacatgggtggcagaaaagaccgagggcaaaattgcagagctgctgagccctggatctgtggaccccctgactaggttagtgctggttaatgctgtgtattttcggggaaactgggacgagcaattcgataaggagaatactgaagagagattgtttaaagtcagcaagaatgaagagaagccggtccagatgatgtttaagcaatctacattcaaaaaaacttacatcggggaaatttttacgcagatcctcgtgttgccctatgttggcaaggagctaaacatgatcataatgctgcccgacgagacaactgacctaaggacagtggaaaaagagcttacttacgaaaagttcgtggaatggacacggctggacatgatggatgaggaagaggtggaagttagccttccacgcttcaaactggaagagtcttatgatatggaatctgtcttgcgaaatctgggcatgactgatgctttcgaactcggaaaggctgatttctcaggcatgtctcagaccgacctgtctctgtccaaagttgtccataaatcgttcgtcgaggtaaacgaggagggcacagaggccgcggccgccaccgccgctatcatgatgatgcggtgcgccagattcgtaccacgtttctgcgccgaccacccgttcctgttcttcatccagcacagcaaaaccaacgggatcctcttttgcggtcgattttcttccccttag

SEQ ID NO: 204796 - DNA, 1131 bp, synthetic construct
  misc_feature 1..1131: note = Description of Artificial Sequence: Synthetic coding sequence
  source 1..1131: mol_type = other DNA
atggacgtgctggccgaggccaacggcaccttcgccctgaacctgctcaagacactgggaaaggataatagtaaaaacgtctttttctcacctatgtctatgagttgcgctctcgcgatggtgtacatgggagccaagggcaatacagcagcccaaatggcacagatcttgagcttcaacaagagcggcggaggtggcgacatccaccaaggtttccagagccttctgacagaggtgaataagactggtactcaatacctgctccggatggcaaacaggctgttcggcgagaaatcatgcgatttcctgagctcttttagggactcctgtcaaaagttttaccaagcagagatggaggagctggatttcatctccgccgtggagaaaagccgcaagcacataaacacctgggtcgccgagaagacggaaggaaagattgctgagctcctgagccccggctcagtggatccactcacgcgactcgtccttgtgaatgcagtgtactttcgtggcaattgggatgagcaatttgacaaggaaaataccgaagagaggctctttaaggtatcaaagaacgaagaaaaaccggtccagatgatgttcaagcagtctacattcaaaaagacttacatcggagaaattttcacccagattttagtgctcccgtatgtgggtaaggagctgaatatgattatcatgctccctgatgaaacaaccgacctgcgcactgtggaaaaagagctgacatatgaaaaatttgtcgagtggacccggctcgatatgatggatgaggaggaagtagaggtgtcactcccgcgattcaagctagaggagtcctacgatatggagagtgtcctgaggaatctcggcatgacagacgcttttgaactgggcaaagccgacttctccggaatgtctcagaccgacctcagcctatctaaagtagttcataagtctttcgtggaggtaaatgaggaaggcaccgaggccgcggctgccaccgccgccatcatgatgatgaggtgtgctagattcgtgcctaggttttgcgccgaccaccccttcctattttttatacagcattcaaaaactaatggaatattattctgcggtaggttctcctctccttag

SEQ ID NO: 204797 - DNA, 579 bp, synthetic construct
  misc_feature 1..579: note = Description of Artificial Sequence: Synthetic coding sequence
  source 1..579: mol_type = other DNA
atggacgtgctggccgaggccaacggcaccttcgccctgaacctgttgaaaacactgggcaaggataatagtaagaatgtctttttttctccaatgtccatgagttgcgctcttgctatggtttacatgggcgccaaggggaacacggctgcccaaatggcccaaatactgtccttcaataagagcggcggaggtggggatattcaccagggcttccagagcctacttaccgaggtgaataaaacaggtacccagtatctgctgcggatggccaatagggaatcgtatgacatggagagcgtactacggaaccttggtatgactgacgcatttgaactggggaaggctgacttctcaggcatgtcccagacagacctgagcctgtcaaaagttgttcacaagtccttcgttgaggtgaacgaagagggaacagaagctgcggccgccacagctgccatcatgatgatgcggtgcgccagattcgttccgcggttttgtgccgatcaccctttcctcttcttcatccaacatagtaagactaacggtatcctgttctgcgggaggttttcgtcaccgtag

SEQ ID NO: 204798 - DNA, 1143 bp, synthetic construct
  misc_feature 1..1143: note = Description of Artificial Sequence: Synthetic coding sequence
  source 1..1143: mol_type = other DNA
atggccagcctggccgccgccaacgccgagttctgcttcaacctgttccgtgaaatggacgacaatcaggggaacggcaatgtattctttagcagcctgtcactgtttgccgccctggccttggtgaggctcggggcccaggacgacagcctgtcacagattgacaagttgctccatgtcaatacagctagcggctatgggaattcttccaactctcaaagcggcctgcagagtcagcttaaacgagtgttcagcgatattaacgccagccataaggattatgacctgtcaatagtcaatggcctctttgctgagaaagtgtatgggttccataaggactatattgaatgtgccgaaaagctctacgacgcaaaagtcgagagggtcgatttcaccaatcaccttgaggacacccgaagaaacatcaataaatgggtcgaaaacgagactcatggcaagatcaagaacgtgatcggggaggggggaataagcagttctgctgttatggtcctcgtcaatgcggtgtactttaagggaaagtggcagagcgccttcaccaaaagcgagaccatcaactgtcactttaagagccctaagtgcagcggtaaggccgtcgcgatgatgcatcaggagagaaaatttaatctgagtgtaattgaggatccatcaatgaaaattctcgagctccgttacaacggtggcatcaatatgtacgtgctattgcccgaaaacgacctgtcagagatcgagaacaagctgactttccagaatctcatggaatggacaaatccccgccgtatgacctccaagtacgttgaggtgtttttcccacagtttaaaattgagaagaactatgagatgaagcagtatctgagagcactcgggttgaaggacattttcgatgagtcaaaggcggatctttctggaatagcatctggaggacgcctttatatctcaaggatgatgcacaagagctacatcgaagtgaccgaggagggcaccgaggccaccgccgctactgggtctaacatagtggagaaacaattgccgcagtcgactctcttcagggctgaccatccttttttatttgtgatccgaaaggacgatatcatattgttcagcgggaaggttagctgcccttag

SEQ ID NO: 204799 - DNA, 1143 bp, synthetic construct
  misc_feature 1..1143: note = Description of Artificial Sequence: Synthetic coding sequence
  source 1..1143: mol_type = other DNA
atggccagcctggccgccgccaacgccgagttctgcttcaacctgtttcgagagatggacgacaatcagggaaatgggaatgtattctttagcagtttgagtctgtttgctgccttggcgctggtaagactcggtgcacaggatgattcgttgtcacagattgacaaactgttacacgtcaatacggccagcggatacggaaattcatccaactctcagtcaggtctccagtctcagctgaaacgggtgttctccgacataaatgcatcacataaggactacgatctcagcattgtgaatggcctgtttgctgagaaggtttatggatttcacaaggactatatagagtgcgctgagaaactttatgatgcgaaggtcgagagggttgatttcacaaatcacctcgaggatacacgccgaaatatcaacaaatgggtggagaacgagactcatggaaagattaaaaatgtgattggtgagggggggatctctagctccgcagttatggtccttgtcaacgctgtctattttaaaggcaagtggcagtcggctttcactaaaagtgaaaccattaactgtcacttcaagagccctaaatgttctgggaaggccgtggcgatgatgcatcaggagagaaaattcaacttgagcgtaatcgaggacccttctatgaagattctcgaactccgctataatggtggaataaacatgtacgttttgctcccagaaaatgacctgtctgagatcgagaacaaactgacctttcaaaacctgatggagtggacgaatcctagacggatgaccagtaagtacgtcgaggtatttttcccacaatttaagatagagaagaactatgaaatgaagcagtatctccgcgctctgggattgaaagacattttcgacgagagcaaagccgatctcagtggtatcgcatctggcgggaggttgtatattagcaggatgatgcacaagtcttacattgaagtgaccgaagagggcactgaggcaacagcagctaccggatccaacatcgttgagaaacagctgcctcagtccaccttgttcagagccgatcatcccttcttgtttgtaatccgcaaggacgatattattctttttagcgggaaagtctcatgtccttag

SEQ ID NO: 204800 - DNA, 387 bp, synthetic construct
  misc_feature 1..387: note = Description of Artificial Sequence: Synthetic coding sequence
  source 1..387: mol_type = other DNA
atggccagcctggccgccgccaacgccgagttctgcttcaacctgtttcgggagatggatgataaccaagggaatggcaatgtgtttttctcctcattgagcctttttgcagccctggcactcgttaggctcggggcacaggatgactccttatcccaaatcgataagttgctgcacgtgaatacagcctccgggtacgggaacagtagtaacagccagtcaggccttcagagccagttaaagcgggtcttctccgacattaatgcatctcacaaggattacgacctgagtattgtgaacggactattcgctgagaaagtctacggcttccataaggattatatcgagtgtgcagagaaactatacgacgcaaaagtggaaaggtag

SEQ ID NO: 204801 - DNA, 387 bp, synthetic construct
  misc_feature 1..387: note = Description of Artificial Sequence: Synthetic coding sequence
  source 1..387: mol_type = other DNA
atggccagcctggccgccgccaacgccgagttctgcttcaacctgtttagggagatggatgataatcaggggaacggtaacgtcttttttagctctctctcgctttttgctgcccttgctctggtgcgcctgggagcacaggacgactcgctgtctcagattgacaaactgctgcacgtgaacactgccagtggctatggcaattcgtctaactctcagtcagggttgcaaagccaattaaagagagtttttagcgacatcaatgcatcccacaaggactatgatctgtctatcgtgaatggactgtttgccgagaaggtttatggctttcataaggactacatcgaatgtgcggaaaagctttacgacgcgaaggtcgaacgttag

SEQ ID NO: 204802 - DNA, 498 bp, synthetic construct
  misc_feature 1..498: note = Description of Artificial Sequence: Synthetic coding sequence
  source 1..498: mol_type = other DNA
atggccagcctggccgccgccaacgccgagttctgcttcaacctgttcagggaaatggacgacaaccagggtaacgggaacgtcttcttcagctctctatctctctttgctgccctcgctttagtgaggcttggggcacaggacgatagtttatcccaaatcgacaaacttctgcatgttaatacagccagtggatacgggaattcatccaacagtcagtctggtctccagtcccaacttaagagggtcttcagcgatattaacgcaagtcacaaagactacgatctgtctattgtcaacggattgttcgctgaaaaggtatacggatttcacaaggattacatcgaatgtgccgagaaattatacgatgcaaaggtggaacgcgtagattttacaaaccatctagaggatacgagaaggaacatcaacaagtgggttgaaaacgaaacccacgggaaaataaaaaatgtcatcggtgaaggcggaatcagtagttag

SEQ ID NO: 204803 - DNA, 1092 bp, synthetic construct
  misc_feature 1..1092: note = Description of Artificial Sequence: Synthetic coding sequence
  source 1..1092: mol_type = other DNA
atggccagcctggccgccgccaacgccgagttctgcttcaacctgttcagagaaatggatgataatcagggcaatggtaacgtgtttttttcttccttgagcctgttcgccgctctcgctctggtaagacttggcgcacaggacgactcattgagccaaattgacaaaagtggccttcagtctcagcttaagcgcgtgtttagtgacatcaacgccagccacaaagattatgatctgagcattgtaaacggactcttcgccgagaaggtctacggattccacaaggattacatcgagtgtgctgagaaactctatgatgctaaggtggaacgggtggactttaccaatcacctggaggatacacgacgtaatatcaataagtgggtggaaaatgaaactcacggtaaaattaagaatgtgataggcgaagggggtatatccagctcggctgttatggtactcgttaatgctgtttatttcaaggggaaatggcaatctgcatttacaaaatcggagacaattaattgccactttaaatctccaaaatgctcgggcaaggccgtggcgatgatgcaccaggagcgaaagttcaatttatctgtcattgaggacccgtctatgaaaatcctggaactgaggtacaatggaggtattaatatgtacgtgttgctgccggagaacgacctgtcagaaatagaaaacaaactcaccttccagaatctgatggaatggaccaatcctcgccgaatgacaagcaaatacgtagaggtttttttccctcagtttaagatagagaagaactatgaaatgaaacagtatctgagggccctgggcctgaaggatatctttgacgaatcaaaagccgatctcagcggaatagcttctggaggtcggttatacatttccaggatgatgcacaaatcttatatcgaagtcacagaggagggcacggaagctaccgctgccaccggctccaatattgtggaaaagcagttgccccagtctactctctttcgggccgaccacccgtttctctttgtcattcgcaaagacgatataatcttgtttagtggaaaggtaagttgcccctag

SEQ ID NO: 204804 - DNA, 1143 bp, synthetic construct
  misc_feature 1..1143: note = Description of Artificial Sequence: Synthetic coding sequence
  source 1..1143: mol_type = other DNA
atggccagcctggccgccgccaacgccgagttctgcttcaacctgttccgggaaatggacgacaaccagggaaatggaaatgtttttttttctagcttgagcctcttcgccgcgttagccctggtgcgtttgggggcccaagacgactccttgagccagatcgataagctgctgcacgtgaataccgcgagcgggtatgggaactcgtcgaacagtcagtccggtctgcagtcccagcttaagcgtgtgttcagtgatattaatgccagccacaaggattacgatctgtctatagtgaacggcctgttcgccgagaaggtttacggattccataaggattatattgagtgcgctgagaaactgtacgatgccaaggtagagcgcgtggattttactaatcatttagaagacacccgcaggaacatcaacaaatgggtcgagaatgagacacatggcaagatcaaaaacgttatcggggagggcggtataagctcttccgctgtcatggtgttagtgaacgccgtgtacttcaaggggaagtggcagtctgccttcacaaaaagcgagacaattaattgtcacttcaaatcccccaagtgttccggcaaagcggtagccatgatgcaccaggagcggaagttcaacctttccgtcattgaagacccctcgatgaagatccttgaattgaggtataatggggggattaatatgtacgtgctgttaccggagaacgatctatcagaaatcgaaaataagcttaccttccagaacttgatggagtggacgaatcccagaaggatgacgagtaagtatgttgaagtcttcttccctcagttcaagatcgaaaagaactacgaaatgaaacagtacctacgagcgctggggctcaaggacatctttgatgagtctaaagcagaccttagtgggattgcatccgggggcagactctatatttctcgcatgatgcataaatcctatatcgaggtgaccgaagagggcacagaggccacagctgccactggttccaatattgtggagaagcagctccctcagtcaacactgtttcgcgctgaccacccgtttctgttcgtgataagaaaagatgatatcatcttgttctccgggaaggtcagctgtccgtag

SEQ ID NO: 204805 - DNA, 1125 bp, synthetic construct
  misc_feature 1..1125: note = Description of Artificial Sequence: Synthetic coding sequence
  source 1..1125: mol_type = other DNA
atggacgacctgtgcgaggccaacggcaccttcgccatcagcctgttcaagattttaggcgaggaagacaacagtcgcaacgtgttctttagcccaatgtcgatatcatctgccttggctatggtatttatgggcgccaaagggagtactgccgcccagatgtcacaagccttgtgcctctataaagatggagacattcaccggggatttcagagtctactgtccgaagtgaatcgcactggtactcagtacctgctgaggaccgctaaccgactttttggcgagaagacttgcgacttcctgcccgattttaaagagtattgtcaaaagttctaccaggcggagctcgaggagctctctttcgccgaagatacagaggagtgtagaaagcatatcaacgactgggtggcggagaaaaccgaaggcaaaatctccgaggttctcgacgcaggaaccgtcgaccctctgaccaagctggttctcgttaacgccatctattttaaaggaaagtggaatgaacagtttgaccggaaatacactagagggatgctattcaaaactaatgaagaaaaaaagaccgtgcaaatgatgttcaaggaagcaaaatttaagatgggatatgccgacgaggtacacacgcaagttcttgagctgccgtatgtcgaggaggagctgagtatggtcatcttgctgcccgatgacaatacggatttggccgtcgtggagaaggctcttacatacgagaagttcaaggcctggacgaacagcgaaaaactcaccaaatcaaaagtgcaggtgttccttcctaggctgaagctggaagagagctatgacctggaaccatttcttcggcgcctcggcatgattgacgcttttgacgaagccaaggctgattttagcggaatgagtaccgagaagaatgttccattaagcaaggtggcacacaagtgtttcgtcgaggtaaatgaagagggaacagaggcggccgcagcgacagctgtggttcggaacagtaggtgtagccgcatggaaccgcgcttttgtgcggatcatccctttctgttcttcatccgccatcacaaaaccaactgcatcctcttttgcgggcgctttagctctccgtag

SEQ ID NO: 204806 - DNA, 1125 bp, synthetic construct
  misc_feature 1..1125: note = Description of Artificial Sequence: Synthetic coding sequence
  source 1..1125: mol_type = other DNA
atggacgacctgtgcgaggccaacggcaccttcgccatcagcctgttcaagattctgggggaggaagataactctaggaatgtgttcttttctcccatgagtatcagtagtgcattagcgatggtgtttatgggggctaagggctctacggccgcacaaatgtctcaagcgttatgcctgtacaaggacggggacattcatagaggctttcagagccttttaagtgaggtcaatcgcaccgggacccagtacttactgagaaccgccaatcgactgtttggcgagaagacctgcgactttctgcctgatttcaaggagtactgtcagaaattctaccaagccgaactagaggagctgagtttcgcagaagacaccgaggagtgccgcaaacatattaatgattgggtggccgaaaagaccgaagggaagatctctgaggtgctggatgccggaaccgtcgacccattgaccaagctcgtgctcgtcaatgccatctattttaagggaaagtggaatgaacagtttgatagaaaatacactaggggtatgcttttcaagaccaatgaggagaagaagactgtccagatgatgtttaaggaggcgaaatttaagatggggtatgccgatgaagtgcatacccaggtacttgagctaccttatgttgaggaagaactgtccatggtcatacttcttcccgatgacaataccgatctcgcagtggtcgagaaggccctgacttatgagaagtttaaggcttggaccaactctgaaaagctaaccaagagcaaagtgcaggtgttccttcctagactcaaactcgaggagtcctacgacttggaacctttcctcaggaggcttgggatgatcgacgcctttgacgaggccaaggcagattttagcgggatgtccacggagaaaaatgttcctctctcgaaggtggcacataagtgcttcgtcgaagtaaacgaagaaggaacagaggccgcagcggctaccgcagtggttcgtaactcaagatgttcgaggatggaacccagattctgtgctgatcacccctttctgttcttcatccgacatcacaagacgaattgcattttgttttgtggacgcttctctagtccctag

SEQ ID NO: 204807 - DNA, 495 bp, synthetic construct
  misc_feature 1..495: note = Description of Artificial Sequence: Synthetic coding sequence
  source 1..495: mol_type = other DNA
atggacgacctgtgcgaggccaacggcaccttcgccatcagcctgtttaaaatccttggggaagaagataacagccgtaatgttttcttttctcctatgagcatctcctctgctcttgctatggtctttatgggggctaagggcagtaccgccgcacagatgtcgcaggcgctttgtctctacaaggatggtgacattcaccggggattccagtccctgctttctgaggtgaaccgtacagggactcagtatctgctcaggactgccaaccgcttgtttggggagaaaacgtgcgattttctcccggacttcaaagagtactgtcagaagttctatcaggctgagttagaagagctgagttttgccgaggacactgaggaatgtagaaagcatatcaacgactgggtggcagagaagaccgaggggaagattagcgaagttctcgacgccggcactgtcgatcccctgacaaaactggtattggtgaacgcatag

SEQ ID NO: 204808 - DNA, 375 bp, synthetic construct
  misc_feature 1..375: note = Description of Artificial Sequence: Synthetic coding sequence
  source 1..375: mol_type = other DNA
atggacgacctgtgcgaggccaacggcaccttcgccatcagcctgtttaagattctgggtgaagaggacaattcccgaaatgtctttttctcacccatgagtatatcatctgccctcgctatggtattcatgggcgctaagggaagcactgccgcccagatgtctcaggcactgtgcctctacaaagacggcgacatccaccgtggtttccagtctctcctgagcgaggtgaaccgaaccggaactcagtacctgctccgcacggccaatagactcttcggcgagaaaacctgtgacttcctgcccgatttcaaggaatactgtcagaagttttaccaagctgaactggaagagcttagctttgctgaggattag

SEQ ID NO: 204809 - DNA, 579 bp, synthetic construct
  misc_feature 1..579: note = Description of Artificial Sequence: Synthetic coding sequence
  source 1..579: mol_type = other DNA
atgctgttcaagaccaacgaggagaagaagaccgtgcagatgatgtttaaggaggcaaagttcaaaatgggatacgctgatgaggtccacacccaggtgttggagctcccttatgtggaagaagaactttccatggttattctgcttccagacgataacaccgatctggccgttgtggagaaggctctaacatatgagaagttcaaagcatggaccaacagcgaaaagctcaccaaatcaaaggtgcaggtattccttccacggctcaaactggaggaaagctacgacctggaaccctttctgaggcgtctcggcatgattgacgccttcgatgaggctaaggcagatttttctggcatgagcacagaaaaaaatgtcccgctgtcgaaggtggctcataaatgttttgtggaggtgaatgaggaaggtactgaagcagctgccgctacagctgtggtacggaattcacgttgcagcaggatggagcctcgcttttgtgccgatcacccctttttgttctttattaggcaccataagaccaactgcattttgttctgcggaagattcagctctccatag

SEQ ID NO: 204810 - DNA, 1131 bp, synthetic construct
  misc_feature 1..1131: note = Description of Artificial Sequence: Synthetic coding sequence
  source 1..1131: mol_type = other DNA
atggagaccctgagcaacgccagcggcaccttcgccatccggctgctcaagatactctgccaggacaacccgagccacaacgtcttctgtagccctgtttcaatcagttccgctctggctatggttcttttaggagcaaagggcaacaccgctacccagatggctcaggccttatccttgaatacagaggaagatatccaccgtgcgttccagtctctactcactgaagtgaataaagccggcacccagtatcttcttaggaccgcaaaccggctgtttggtgaaaagacatgccagttcctttctacctttaaggaaagttgtctgcaattttaccatgccgaactcaaagaactaagttttattcgggctgcagaggaaagtcggaagcatataaatacatgggtgagtaagaaaacagaggggaaaatagaggagttgctgcccggcagtagtatcgacgcagagactcgtctcgtactggtcaatgctatatatttcaaaggcaagtggaatgagcctttcgacgagacgtatactagggaaatgcccttcaaaatcaaccaggaggagcaaagacccgttcagatgatgtaccaggaggccaccttcaagcttgcacatgtgggagaggtccgagcccagctgctggagctgccctatgcacgcaaagagctttccctcctggtcctcttaccggacgacggggtagagctgtccaccgtagagaagagcttaactttcgaaaaactgaccgcatggaccaagccggattgtatgaagagtactgaagtagaggtgcttcttccaaagttcaagctgcaggaggattacgacatggagagtgtgttgcggcacctcggcatagtcgacgctttccagcagggaaaggcagatttatcggccatgtcagcggaacgcgacctctgtcttagcaagttcgtccacaaatcatttgtcgaggtgaacgaggagggcaccgaggcagctgccgcttcgagttgttttgttgtggcagaatgttgtatggaatccggacctagattctgcgctgaccaccccttcctctttttcatccgacataatagagccaactccatcctattctgtggtcgatttagctcaccgtag

SEQ ID NO: 204811 - DNA, 1104 bp, synthetic construct
  misc_feature 1..1104: note = Description of Artificial Sequence: Synthetic coding sequence
  source 1..1104: mol_type = other DNA
atgagcagccccccccccgcccggagcggcttctaccggcaggaggtcacaaagaccgcgtgggaagttagagccgtctatcgggatctgcaacccgtaggctcgggcgcgtatggtgcagtctgcagtgcagtggacggacgcacgggtgcaaaagtagcaatcaagaagttgtacaggcccttccaaagcgagctgtttgcaaaacgtgcttacagagaacttcgcctcctgaagcacatgcgtcatgaaaacgtgataggcttacttgatgtgttcacaccagacgagaccctggatgactttactgatttttacctagtaatgccttttatggggacagatctgggcaaactgatgaaacacgagaagttgggagaagatcgtatccagtttctggtgtatcagatgctcaagggactccggtacatacatgcggcaggcattatccatagagatctgaaaccaggtaatctggcagtgaatgaagattgcgagctcaagatactcgactttggtttggcacgccaggcagactccgagatgacaggctatgtggtaacccggtggtacagagcccctgaggttatccttaattggatgcgctacacacagacagtggacatttggagcgtgggctgcataatggcggaaatgattacgggcaagactctcttcaaagggagcgatcacctggaccagttgaaggagattatgaaggtgacaggcaccccacctgccgagtttgtgcaacgtctgcaaagcgacgaagctaagaattacatgaagggcttacccgaactggagaagaaagacttcgccagtatcctgacgaacgcaagccccctggctgtcaatctcctcgaaaaaatgctggtcctagacgccgaacagcgtgttacggcaggtgaggctcttgctcacccctattttgaatctttgcacgatacagaggacgagccacaggtgcagaaatacgatgactcctttgacgatgtcgacaggactctagatgaatggaagagggtgacctataaagaggtactgtcttttaagcctcccagacagttaggtgcccgtgtttccaaggagacccccctgtag

SEQ ID NO: 204812 - DNA, 1500 bp, synthetic construct
  misc_feature 1..1500: note = Description of Artificial Sequence: Synthetic coding sequence
  source 1..1500: mol_type = other DNA
atgaagcacagcctgaacgccctgctgatcttcctgatcatcaccagcgcttggggtggtagcaaaggccccctagatcaactggaaaagggtggtgaaactgcacagagcgccgaccctcagtgggagcagctgaataacaagaacttgtctatgccacttttacccgctgattttcacaaggaaaacaccgtgacaaatgattggattccggagggggaagaggacgacgattacctggacttggaaaaaattttttcggaagacgacgactatattgacattgtggatagcttatcagtcagtcccacagactcagatgtatccgcaggtaatatcctgcagttattccatgggaagtcgcgtattcagaggctgaatatcctaaacgccaaattcgccttcaatctttatagggtgctgaaagatcaggtgaacacatttgataatatattcatcgcccctgtgggcatttctaccgccatgggcatgatctcactcggcctcaaaggggaaacgcacgagcaggtgcattcaatcctgcactttaaagattttgttaatgcttccagtaaatacgagataacgaccatccataacctgttccgcaagcttactcaccggttgtttaggcgtaattttggatatacactgaggagcgtcaacgatctctacattcagaagcaatttcccattctgctggacttcaagaccaaagtgcgggaatactacttcgcagaggctcagatcgcggatttttccgaccccgccttcatctcgaagaccaataaccatataatgaaactgactaaaggattgatcaaggatgccttggaaaatatcgaccccgccacccagatgatgatcctgaactgtatctactttaagggatcatgggtcaacaagtttcctgtggagatgacccacaaccacaatttcaggttgaacgagcgagaagtggttaaagtcagcatgatgcaaactaagggaaacttccttgccgctaacgaccaggagctcgactgtgatattctccagctggagtatgtgggcggcatttctatgctaatcgtcgtgcctcacaagatgagtggtatgaagacactcgaagcccagctgacgccccgggttgtcgaaaggtggcaaaagtcaatgactaatcggactcgcgaggttctgctgccaaagttcaagctcgaaaaaaactataacctggtagagagcctcaaacttatgggtatcaggatgctgtttgataagaatgggaacatggcaggcattagcgaccagcgtattgctatcgacttgtttaagcaccagggaacaataactgttaacgaggaggggacccaagccaccaccgtgaccactgtgggttttatgcccctgtcgacacaggtgagatttacggtagaccgcccgttcctttttcttatatacgaacataggacttcatgccttcttttcatgggaagggtggcaaacccatcccgctcctag

SEQ ID NO: 204813 - DNA, 1197 bp, synthetic construct
  misc_feature 1..1197: note = Description of Artificial Sequence: Synthetic coding sequence
  source 1..1197: mol_type = other DNA
atgaactggcacctgcccctgttcctgctggccagcgtgaccctgcccagtatctgttctcattttaatcccttgtctttagaggagcttggctctaacactggaattcaggtatttaaccagatcgttaaaagcagaccccatgacaatatagtgatatcgcctcacggcatcgcctcagtgttgggcatgctgcagctgggggcagatggccggactaagaaacagctggccatggttatgcgctatggtgttaacggcgtgggcaaaatactgaagaaaattaacaaggcaattgtgtctaagaagaataaggacattgtgaccgtggcaaacgccgtattcgtgaagaacgcaagcgagatcgaggtgccttttgttacgagaaacaaggatgtgtttcagtgcgaggtgagaaatgtcaattttgaggacccggccagcgcctgcgactccattaatgcctgggtcaaaaacgaaacgcgtgatatgatcgacaaccttctgtcccccgacctgatagatggggtgctaactagactggtgttagtgaacgccgtttactttaaagggttatggaaatcacgattccaacctgaaaacacaaaaaaacggaccttcgtcgcagcggatggaaaatcataccaggtacctatgctcgcccagctgtccgtattcaggtgcggatctacttctgcacctaacgatttgtggtacaattttatcgaactgccctatcacggcgagtccatttcgatgcttatagcactgcccacggaatcctcaacaccgctgagtgcaataattcctcatatatcaaccaaaaccatcgactcttggatgtcaatcatggtgccaaagagagtccaggtcattcttcccaaattcacggcggtagctcaaacagatttgaaagagcctctgaaggtgctcggaattactgacatgttcgacagcagcaaagcaaatttcgccaagattaccacaggatccgaaaatctacatgtgtcacatattctgcagaaggccaagatagaagtcagtgaagatggcacaaaggccagcgccgcaactacggctattctgatcgccagaagtagccctccctggtttatcgtggacaggcctttcttatttttcatccgtcacaatcccacgggggccgtactcttcatgggacaaataaacaaaccttag

SEQ ID NO: 204814 - DNA, 1194 bp, synthetic construct
  misc_feature 1..1194: note = Description of Artificial Sequence: Synthetic coding sequence
  source 1..1194: mol_type = other DNA
atgaactggcacctgcccctgttcctgctggccagcgtgaccctgccatctatctgttcacactttaaccccctgtctcttgaggagctgggcagtaacacaggcatccaggtgttcaatcaaattgtcaagagccgaccgcacgataatatcgtgatctccccccatggcatcgcttccgttttgggcatgctgcaattgggagccgatggccgcaccaaaaaacagcttgcgatggttatgaggtatggggtgaacggggtaggtaagatcctgaaaaagattaataaggcaattgtgagtaaaaagaataaggatatagtgactgtggccaacgccgtgtttgtcaaaaacgcatctgaaatcgaggttccttttgttacccggaacaaagacgtttttcaatgtgaggtcaggaatgtcaactttgaagacccagccagcgcatgcgattcgattaatgcttgggttaaaaacgaaacccgggatatgatcgacaatctgcttagccctgacctgatcgatggtgttctgaccagactggtgctggtgaacgcggtgtacttcaaaggcctttggaagtccaggttccagcctgaaaataccaaaaaaaggaccttcgtcgccgcggatggtaagtcttatcaggtgcccatgttagcccagctctccgtcttcagatgtgggagtacctcagccccaaatgatctgtggtataacttcatcgagcttccataccacggcgagagcatctcgatgttgatcgctctccctaccgaatccagtacacccttatccgctattatcccccatatttccactaaaacgatcgacagttggatgtcaatcatggtccccaagagggtgcaggttatcctgcctaagtttactgccgttgctcagaccgatcttaaggagccactgaaggtgctgggcataacagacatgttcgactcctccaaggctaatttcgcgaaaattacccgctctgagaaccttcatgtgtcccacatcttacagaaagctaagatagaagtgagcgaggatggtaccaaggcctcagctgccacgacagccattctgatcgcccggtcttccccgccctggttcatcgtggaccggccattcctcttctttatcaggcataaccccaccggagctgtgctttttatgggccagattaataaaccatag

SEQ ID NO: 204815 - DNA, 1194 bp, synthetic construct
  misc_feature 1..1194: note = Description of Artificial Sequence: Synthetic coding sequence
  source 1..1194: mol_type = other DNA
atgaactggcacctgcccctgttcctgctggccagcgtgaccctgccctccatctgcagccattttaatccactgagcctggaggaactgggaagtaatacgggaatacaagttttcaatcagattgtgaagagccggccccacgataatatcgtgatctctccccatggcattgcctccgtgctggggatgttgcagctgggggctgatgggcgtacaaaaaaacagctagccatggtgatgcggtacggcgtgaacggggttggcaagatcctgaagaaaatcaataaggctatagtctctaaaaaaaataaggacatagtgacggtggcgaacgcagttttcgtgaagaacgcctctgagattgaagttccgtttgtgacgagaaataaagatgtattccagtgcgaggttcgtaacgtgaattttgaagaccccgcttcagcatgtgattccattaacgcatgggtaaagaatgagacgcgggacatgatcgacaacttgctcagcccagatttaatagatggggtcttgacccgccttgtactcgtaaacgcggtgtatttcaaggggctgtggaaatctcgcttccagccagaaaataccaagaaacgcacattcgtcgccgcagacggcaagagctaccaggtgcctatgctcgctcagctgagcgtattcaggtgcggctccaccagcgcgcccaacgacctttggtataactttatcgagctgccataccacggcgagtcaattagcatgctcattgcattgcctaccgagagctccacgcctctgtctgctataatcccccacatctcaactaagactatcgacagttggatgtctatcatggtccccaagcgcgtacaggtaatcttgcccaagttcactgcagtggcgcagacagacttaaaggaacccctcaaagtgctcgggataaccgatatgtttgatagttcgaaggcgaatttcgctaaaatcactcgttccgaaaatcttcatgtaagtcacatcttgcagaaggcaaagatcgaagttagcgaggacgggactaaagctagtgctgctactacagcaatcttgatcgcaaggagttcgccaccatggtttattgtggataggccgttccttttcttcattcgccacaatcccaccggggctgtgctcttcatgggccagatcaataagccatag

SEQ ID NO: 204816 - DNA, 129 bp, synthetic construct
  misc_feature 1..129: note = Description of Artificial Sequence: Synthetic coding sequence
  source 1..129: mol_type = other DNA
atgaactggcacctgcccctgttcctgctggccagcgtgaccctgccatcaatctgttctcatttcaaccccttgtccctagaggagttaggctcgaatactggtattcaggtcttcaatcagatctag

SEQ ID NO: 204817 - DNA, 831 bp, synthetic construct
  misc_feature 1..831: note = Description of Artificial Sequence: Synthetic coding sequence
  source 1..831: mol_type = other DNA
atgaactggcacctgcccctgttcctgctggccagcgtgaccctgccttcaatctgcagccacttcaaccctctcagcctagaggagctgggatccaacacaggtattcaggtattcaaccagatcgttaagagtcgaccacatgataatatcgtcatctccccgcatggtatcgcgagtgtgctgggcatgctgcaactcggagccgatggccggactaaaaaacaacttgccatggtgatgaggtatggcgtgaatggtgttggaaaaatcctgaaaaagattaacaaggcaatcgtgagtaagaaaaataaggacatcgtaaccgtagctaatgccgtgtttgttaagaatgcttcggaaatcgaagttccattcgtgactagaaacaaggatgtcttccagtgcgaggtgcggaacgttaatttcgaggatccggcatcagcctgtgactccatcaatgcttgggtaaaaaacgagacgcgtgacatgatagataaccttctgtctcccgacttaatcgatggagtgctcacaagactggtactggtgaacgcagtctatttcaaaggcctttggaagagcaggttccaaccggagaatactaagaagagaactttcgttgccgctgatggaaagtcctaccaagttcctatgctggcccagttgtctgtttttcggtgcgggtctacatcagcccccaatgacttatggtacaactttatcgagttgccatatcacggtgaaagtatctctatgcttatcgcacttcctactgagtcaagcacacctctgagcgctataatcccgcacatcagcacgaaaacttag

SEQ ID NO: 204818 - DNA, 1230 bp, synthetic construct
  misc_feature 1..1230: note = Description of Artificial Sequence: Synthetic coding sequence
  source 1..1230: mol_type = other DNA
atgagcgactgccggagcagcctggtggagggcaccatgaactggcatctccccttattcctgctggcctcagtcacactgcctagcatttgcagtcacttcaaccctctatcactggaagagcttgggagcaacaccgggattcaggtgttcaatcagatagtcaagagtcgcccccatgataacattgtgattagcccccacggcatcgcaagtgtattaggcatgctccagttgggggccgacggaagaacgaagaagcaacttgcaatggtgatgcgctacggagtcaacggggtaggtaagatcctcaaaaagattaacaaggcaattgtgtcaaagaagaacaaagatatcgtgacagtagcaaacgctgtgtttgtgaagaacgccagcgaaatcgaggtcccctttgttacacggaacaaagatgtatttcagtgtgaggttcggaacgtgaacttcgaggaccccgcaagcgcatgcgactccataaacgcctgggtgaaaaacgagacacgggacatgatcgataatttgctgagcccagacctcattgatggtgtgctcactaggttggtgttagtcaacgcagtctactttaaggggctgtggaaatcccggttccaaccagagaatacgaaaaagcgcactttcgtggcggctgatggcaagtcctatcaagtgcccatgctggctcagctgtcagttttccggtgcggctcaacttctgcgcctaacgatctgtggtacaacttcattgagcttccttaccatggggagtcgatttcgatgctcatagcgttacctactgagagtagcacacctcttagtgcaatcattccgcacatttcaaccaagaccatcgacagctggatgtctataatggtccccaaaagagtgcaagttatactcccaaagtttaccgctgtcgctcagacagacctaaaagagcccctgaaagtactcggcattactgatatgtttgatagtagtaaggccaattttgcaaaaatcactcggtcagagaacttacacgtaagtcacattctgcagaaggctaagattgaagtgagcgaggacgggaccaaggctagcgcagcaaccacagctatactgattgcacgaagcagtccgccatggttcattgtcgatcggccttttctattcttcatcaggcataaccccacaggagccgtcctgttcatgggacagatcaataagccatag

SEQ ID NO: 204819 - DNA, 264 bp, synthetic construct
  misc_feature 1..264: note = Description of Artificial Sequence: Synthetic coding sequence
  source 1..264: mol_type = other DNA
atgaactggcacctgcccctgttcctgctggccagcgtgaccctgccgagcatctgctctcactttaaccccctgtccctagaggaacttgggtctaacacagggatccaggttttcaaccaaatagtaaagtctcggccacacgacaatattgttatctccccacatgggatcgcaagtgtgcttgggatgcttcagctcggcgccgatggccgtacaaaaaagcagctggctatggttatgagatatggtgttaacggctag

SEQ ID NO: 204820 - DNA, 1257 bp, synthetic construct
  misc_feature 1..1257: note = Description of Artificial Sequence: Synthetic coding sequence
  source 1..1257: mol_type = other DNA
atgcaggccctggtgctgctgctgtgcatcggcgccctgctgggccacagcagctgccagaatcctgcaagtcccccggaggaggggtcaccggatcccgactccacgggggcactagtcgaggaagaagacccctttttcaaggttcccgtcaataagcttgcagctgcagtttccaactttggatatgatttatatagggttagatcaagcacctctccgaccacaaatgtgctccttagccccctgtccgtggccaccgccctgtccgccctgtccctgggagccgaacagcgcactgaatctatcatccatagggcgctgtattacgaccttatctcttctcccgacattcacggaacatataaagagctgctagatactgtgaccgcgccccagaagaacctgaagtccgcttctcgcatcgtattcgaaaagaagctccgcatcaagtcctcctttgtggccccacttgaaaaatcctatgggacacgtccgcgcgtgctcactggtaatccgcggctcgacctacaggagatcaataattgggtccaggcgcagatgaaggggaaactagctcgcagtactaaggaaatacctgacgaaattagtatcctgcttctgggggtggctcatttcaaggggcagtgggtgacgaaattcgattcccgaaaaacttccttggaggatttttacttggacgaagagcggacggtgagagtgcctatgatgtctgatccaaaagcagtcctgaggtacgggctggattccgacctttcttgcaagatcgcgcaactgcctctgaccggatctatgtccatcatcttcttcctcccactgaaggtgactcagaaccttactctgatcgaggaatcacttacatccgagttcattcatgatattgatcgggaattgaagaccgtgcaagcagtgttaactgtgcctaagttgaaattgtcgtatgagggcgaagtcacaaaaagcctgcaggagatgaagcttcagagtttgtttgacagcccagatttctccaagatcacagggaagcccatcaagctgactcaggtggagcaccgagcaggcttcgaatggaatgaagacggagcagggactaccccctctcccggcctacaaccagcccacctcacctttcctctggactatcacctgaaccaacccttcatctttgtactgagggacacagacacaggcgccttactcttcatcggaaaaatactggatcctcgcggaccatag

SEQ ID NO: 204821 - DNA, 1233 bp, synthetic construct
  misc_feature 1..1233: note = Description of Artificial Sequence: Synthetic coding sequence
  source 1..1233: mol_type = other DNA
atggccttcctgggcctgttcagcctgctggtgctgcagagcatggctaccggtgcgacatttccagaggaggcgatcgctgatctttctgtgaacatgtacaataggctgagggcaaccggcgaagacgagaatattctgttctcgccactgtctattgcattggcaatgggcatgatggagctgggagctcaaggatcaacccagaaagagattagacattccatgggatacgactccctgaaaaatggggaagagttttcctttctgaaagagttctcgaatatggttacggccaaggagagtcagtatgtgatgaaaatcgccaactccctgtttgtccaaaacggattccacgtgaacgaagagtttttacagatgatgaagaaatacttcaacgctgccgtaaaccatgtggactttagtcaaaacgttgctgtagccaactatatcaacaagtgggttgaaaataacacgaataacttagtcaaggatctggtttcaccccgcgatttcgatgctgccacctatcttgctctcattaatgcagtctatttcaaggggaactggaagagtcagttccggcccgaaaacacccggaccttctcattcactaaagatgacgagagcgaagtgcagattcccatgatgtatcagcaaggtgaattctactatggtgagttctccgacggctccaatgaagctggaggcatatatcaagtccttgagatcccttatgaaggagatgaaatcagtatgatgctggtgctttcccgccaggaagtgccactggcaaccctcgagccattggtaaaggcccagctcgtggaggagtgggcaaacagcgtgaaaaagcaaaaggtagaagtttatcttccgcgatttacggttgagcaagaaattgacctcaaagacgtgctaaaagcactgggcatcaccgaaatattcataaaggatgcaaacctgacaggactctcagataacaaggagatttttctgagcaaagctatccataagtcatttctagaggttaatgaggaaggctccgaagcagcagctgtgtccgggatgatcgccatttcccgcatggccgtactgtacccacaagtgatagtggaccacccgtttttcttcctgattaggaaccgacgaaccggtaccatcttgtttatgggaagagtgatgcaccctgagactatgaatacgagtggccacgacttcgaggagctttag

SEQ ID NO: 204822 - DNA, 1233 bp, synthetic construct
  misc_feature 1..1233: note = Description of Artificial Sequence: Synthetic coding sequence
  source 1..1233: mol_type = other DNA
atggccttcctgggcctgttcagcctgctggtgctgcagagcatggctactggagccacatttccagaggaggccatcgccgacctgtccgtcaatatgtataataggctgagagctaccggcgaagacgagaacatccttttcagccccctaagtatcgccctggcgatgggaatgatggagcttggcgcacagggtagtacacagaaggaaattaggcattccatgggctatgacagcctcaaaaacggggaagaattcagctttctcaaagagttttccaatatggtgaccgctaaggaaagccagtatgtgatgaaaatcgctaacagcctgttcgttcagaatggctttcacgtgaacgaggaattcttgcagatgatgaagaagtactttaatgccgcagtaaatcacgtcgactttagccagaatgtggcagtggccaattatattaacaagtgggtggaaaataacactaataacttggtcaaggacctggtgagtcctagggacttcgacgccgctacctacctcgcattgattaacgccgtgtattttaaaggaaactggaaaagtcagttcaggcccgaaaatacccgaactttttccttcactaaggacgacgagtccgaagttcaaattcctatgatgtatcagcagggcgaattctactatggggagttttcagatggctctaatgaagcagggggcatctatcaggttcttgagatcccctatgaaggtgatgagatcagcatgatgcttgtcctgtcacgtcaggaggttccactggcgacattggagcctcttgtcaaggctcagctggttgaagaatgggcaaattcagtgaaaaagcagaaagtggaggtgtacttacctagatttactgtggagcaagagattgaccttaaagatgtgctcaaggcactgggaatcactgaaattttcatcaaggatgcaaatctcaccggactgagcgacaataaggagatctttctcagcaaggcaatccacaagtctttcctcgaggtgaacgaggagggctccgaagccgccgcagtaagcgggatgattgctatcagtcggatggccgtcctataccctcaggtgatcgtagaccaccccttcttctttctcatacgcaataggaggaccggcactatcctgtttatgggaagagttatgcaccctgaaaccatgaacacgagcggtcatgattttgaggaattgtag

SEQ ID NO: 204823 - DNA, 738 bp, synthetic construct
  misc_feature 1..738: note = Description of Artificial Sequence: Synthetic coding sequence
  source 1..738: mol_type = other DNA
atggccttcctgggcctgttcagcctgctggtgctgcagagcatggctactggagcaacttttccagaggaagcgatcgctgacctatcagtgaatatgtataacaggctgagagcaacaggtgaggacgaaaacattctgttctcccctctctctatcgccctcgccatgggaatgatggagctcggcgcacagggatccacacagaaggagattaggcactctatgggctacgatagccttaagaacggagaagagtttagctttctgaaagaattctccaatatggtcacagccaaggaatcacaatatgttatgaaaattgcaaatagtctgtttgtgcagaacggttttcacgtgaatgaggagtttctgcaaatgatgaagaagtatttcaatgcagccgtgaatcacgtcgacttcagtcagaacgtggcagtcgcgaactatattaataagtgggtcgagaacaataccaataatctcgttaaggatcttgtgagtccaagggactttgacgccgcaacctatctcgctttgatcaacgccgtgtactttaagggaaactggaagagccaattcagacccgaaaatacacgtaccttctccttcaccaaggacgacgaatctgaagtccagatcccaatgatgtaccagcagggtgagttttattatggggaatttagcgatggatccaatgaagcaggcggtatataccaagtgctagaaataccttag

SEQ ID NO: 204824 - DNA, 483 bp, synthetic construct
  misc_feature 1..483: note = Description of Artificial Sequence: Synthetic coding sequence
  source 1..483: mol_type = other DNA
atggccttcctgggcctgttcagcctgctggtgctgcagagcatggccactggcgccacattcccagaggaagcaattgccgatctgtcagtaaacatgtacaaccgcctgagggcgacaggcgaagatgagaacatcttgttttcaccactgtccatcgctctggcaatgggcatgatggaactcggtgctcagggcagtacgcagaaggagattaggcactctatgggatatgactcattaaaaaacggtgaagaatttagctttttgaaggagttcagtaacatggtgactgcgaaagagtctcaatacgtcatgaagatagcaaatagtttgtttgtacagaacggattccacgtgaacgaagagttcctgcagatgatgaagaagtattttaacgccgccgtcaaccatgttgatttctcccagaacgtggccgtggctaactacattaataaatgggttgagaataacaccaactag

SEQ ID NO: 204825 - DNA, 591 bp, synthetic construct
  misc_feature 1..591: note = Description of Artificial Sequence: Synthetic coding sequence
  source 1..591: mol_type = other DNA
atggtgggcggcctgaagcggaagcacagcgacctggaggaggaggaagagcggtgggaatggtcccccgccggcctacaatcttaccagcaggcactgctgaggatttccctggacaaagtgcagcggagcctcggccccagggcaccctcccttaggaggcacgttctcatccataataccctgcaacaactccaagcagctctacggctggcacctgcgcctgctttgccccccgagcccttgtttttaggcgaagaggatttttcactatcagcaacaatcggaagcattctccgggagctagatacctctatggatggcacagagcctcctcaaaatcccgtgaccccactgggccttcagaatgaggtcccacctcagcccgatcccgtgtttctggaggccttgtccagcaggtacctaggagactcagggttggatgatttttttctcgacatagacacatccgctgtggagaaagagccggctagagcgccccccgagccccctcataacctcttttgcgcccctggcagctgggaatggaacgagcttgatcacatcatggaaataatcctgggatcatag

SEQ ID NO: 204826 - DNA, 591 bp, synthetic construct
  misc_feature 1..591: note = Description of Artificial Sequence: Synthetic coding sequence
  source 1..591: mol_type = other DNA
atggtgggcggcctgaagcggaagcacagcgacctggaggaggaggaagaacgctgggagtggtctcctgccgggttacaaagctatcaacaggctcttcttcgtattagcctcgacaaggtgcaaagatccctgggccctcgggccccctctcttcgccgacatgtcctgattcacaatacactccagcagctgcaggctgccctgagattagctcctgcccccgctctcccgcctgaacccctgtttctcggggaagaagacttctccctgagcgcgaccatcgggagcatccttcgagagctggataccagtatggatggtaccgaacctccacaaaaccccgtgactcccctgggactgcagaacgaagttccacctcagccagatccagtttttctcgaagctctgtcgagtcgctatttgggtgactccggactggatgactttttcctggacatcgacactagcgctgtagaaaaagagccggctagggcccctccggaacctccccacaacttattctgcgcccccgggtcttgggagtggaacgaacttgaccatataatggaaatcatcctggggtcttag

SEQ ID NO: 204827 - DNA, 369 bp, synthetic construct
  misc_feature 1..369: note = Description of Artificial Sequence: Synthetic coding sequence
  source 1..369: mol_type = other DNA
atgaagctgctgaccggcctggtgttctgcagcctggtgctgggcgtcagtagcagatccttcttttctttccttggcgaagctttcgatggggcacgggatatgtggagggcttactcagacatgcgggaggccaattatatcggctctgataaatatttccacgccagaggaaattatgacgccgccaaacgaggacctggaggagcctgggctgccgaggtcattacagacgcccgtgagaatattcagaggttctttggtcatggagccgaggattcactcgcggatcaagcagccaatgagtgggggaggagtgggaaagatcctaatcacttccgccctgctggtctcccagagaaatattag

SEQ ID NO: 204828 - DNA, 369 bp, synthetic construct
  misc_feature 1..369: note = Description of Artificial Sequence: Synthetic coding sequence
  source 1..369: mol_type = other DNA
atgaagctgctgaccggcctggtgttctgcagcctggtgctgggcgtgagtagcaggtccttcttctccttccttggggaggctttcgacggtgctagagacatgtggagggcgtacagtgatatgagggaagctaattacattggttccgataagtattttcacgcgcgtggcaactatgacgctgcaaagagaggtcccggcggcgcatgggcagctgaagtcataactgatgctcgggaaaacatccagcgcttctttggacatggtgcagaggacagcctagcagaccaggcagcaaatgagtggggaaggtccggcaaagaccccaatcatttcaggcccgcaggacttccagagaaatactag

SEQ ID NO: 204829 - DNA, 369 bp, synthetic construct
  misc_feature 1..369: note = Description of Artificial Sequence: Synthetic coding sequence
  source 1..369: mol_type = other DNA
atgaagctgctgaccggcctggtgttctgcagcctggtgctgggcgtttcttcaaggagcttcttttctttcctcggggaggcattcgacggcgcccgcgatatgtggcgggcttattccgacatgcgcgaggccaactatatcggctcagacaagtacttccatgcaaggggaaattatgatgccgccaaacgcggcccaggaggcgcctgggctgcagaggtgataactgacgcaagagaaaatatccagcgcttcttcgggcatggggcagaagactcattggctgaccaagccgccaacgagtggggacggagcggtaaagaccctaaccatttccggcctgctggcttgcctgagaagtattag

SEQ ID NO: 204830 - DNA, 369 bp, synthetic construct
  misc_feature 1..369: note = Description of Artificial Sequence: Synthetic coding sequence
  source 1..369: mol_type = other DNA
atgaagctgctgaccggcctggtgttctgcagcctggtgctgagcgtttcctccaggagtttcttttcgttccttggagaagccttcgatggcgccagggacatgtggcgcgcctatagcgacatgcgcgaggcaaattacattggaagtgacaaatattttcatgctagggggaactatgatgcagccaaaaggggccctgggggcgcatgggcagccgaagtcataagtaacgccagagagaacatccagagactgactggcaggggtgctgaggactctcttgccgaccaagcagccaataagtggggaaggtcaggacgagatcccaaccacttccgtcctgctgggctgcccgaaaagtactag

SEQ ID NO: 204831 - DNA, 252 bp, synthetic construct
  misc_feature 1..252: note = Description of Artificial Sequence: Synthetic coding sequence
  source 1..252: mol_type = other DNA
atgaagctgctgaccggcctggtgttctgcagcctggtgctgagcgtttcttcaaggtctttcttttctttcctgggggaagcttttgatggagcaagggatatgtggagggcatattcagatatgcgtgaggcaaattatatcggcagcgacaaatacttccacgcaagaggaaactatgacgctgccaagaggggcccaggcggggcctgggcagcagaagtgattagcttgttttccgccgagttgtag

SEQ ID NO: 204832 - DNA, 369 bp, synthetic construct
  misc_feature 1..369: note = Description of Artificial Sequence: Synthetic coding sequence
  source 1..369: mol_type = other DNA
atgaagctgctgaccggcctggtgttctgcagcctggtgctgagcgtgtctagccggtcttttttctctttcctcggggaagcctttgacggggccagagacatgtggagggcttactccgatatgagagaggccaattacattggctcggataagtactttcacgcacgcggaaattacgacgccgccaagagggggccaggaggcgcttgggccgccgaagtgatctctaacgctcgcgaaaatatccaacgacttacaggacggggagcagaggacagcttagctgatcaagcagcaaataagtggggaaggtctggtagggatccaaaccacttcagacccgctggccttcctgaaaagtattag

SEQ ID NO: 204833 - DNA, 369 bp, synthetic construct
  misc_feature 1..369: note = Description of Artificial Sequence: Synthetic coding sequence
  source 1..369: mol_type = other DNA
atgaagctgctgaccggcctggtgttctgcagcctggtgctgagcgtctcaagccggagttttttcagctttctaggggaggcctttgacggggctagagacatgtggcgggcctacagcgacatgagggaagccaactatataggtagtgacaaatactttcatgcccggggtaattacgatgccgccaagcgtggacccggcggtgcatgggcagctgaggtgatttcgaatgcaagggaaaacatccagagattaacaggacggggggcggaagattccctggccgaccaggcagccaataagtggggccggtccggaagagatcctaaccacttccggccggctggcctgcctgaaaagtactag

SEQ ID NO: 204834 - DNA, 393 bp, synthetic construct
  misc_feature 1..393: note = Description of Artificial Sequence: Synthetic coding sequence
  source 1..393: mol_type = other DNA
atgcggctgttcaccggcatcgtgttctgcagcctggtgatgggcgtgacctcggagtcctggcgatccttctttaaagaggcgctacaaggtgtcggcgacatgggtagggcttattgggacatcatgatctcaaaccatcagaattccaaccgctatctatatgcaagggggaactacgatgccgctcaacggggaccaggcggagtctgggctgctaaacttatatctcggtcacgagtgtatctccagggtcttattgattgttacctgttcggaaattcatcaacagtactggaggattccaagagcaacgagaaagccgaggaatggggtaggtccgggaaagatccagatcgcttcaggccagacgggcttcccaagaagtactag

SEQ ID NO: 204835 - DNA, 1278 bp, synthetic construct
  misc_feature 1..1278: note = Description of Artificial Sequence: Synthetic coding sequence
  source 1..1278: mol_type = other DNA
atgggcgaggacgccgcccaggccgagaagttccagcaccccggcagtgacatgcggcaagagaaacctagctccccttcccctatgccctcttctacaccgagtccgagtctgaatctcggtaatactgaggaggcaatccgagataattcccaggtgaatgctgttacagttttaactctcctggacaagctggtgaacatgctagacgctgttcaggagaaccagcacaagatggaacaaaggcagatcagcttagaggggagcgttaaaggtatccagaatgatttaacgaaactaagtaagtatcaagcttcgaccagtaacacggtgagcaagttactggaaaagagtcgcaaggtcagtgcccacacaagagctgtcaaggagagaatggatcgtcagtgtgctcaggtcaagagactcgagaataaccatgcacagctgcttcgtcgcaatcattttaaagtgctcatctttcaggaagagaatgaaattcccgcctccgtgttcgtgaaacagcctgtgtccggggccgtcgagggaaaggaagagcttcccgacgaaaataagtctcttgaagaaaccctgcacactgtcgacttgtcttccgatgatgatttacctcatgatgaggaggcgttggaagatagcgccgaagagaaggttgaggaaagtagggcagagaagatcaagaggtctagcctgaaaaaagtggattcccttaagaaggctttttctaggcagaacatcgagaaaaagatgaataaactggggactaaaattgtgagcgtcgagcggagagaaaaaattaagaagagcctgaccagcaatcaccagaaaatctcttccggcaagagcagcccattcaaagtctccccccttacatttggcagaaagaaggtgcgcgaaggggagtcccacgccgagaatgagaccaaatccgaggacctgcctagctcagaacagatgcctaatgatcaggaggaagagagttttgccgaaggacactccgaggccagcctggcctccgccttggtagagggtgagatcgccgaagaggcagccgaaaaggccacatcaagggggtccaactcaggaatggactccaacatcgatttaacaatcgttgaggatgaggaagaggagtctgtcgcactggagcaggcacagaaggtgcgctacgagggcagctacgccctcaccagcgaagaggcggagaggtccgatggggaccctgtgcagcccgccgtgctgcaggtacaccaaacttcctag

SEQ ID NO: 204836 - DNA, 1290 bp, synthetic construct
  misc_feature 1..1290: note = Description of Artificial Sequence: Synthetic coding sequence
  source 1..1290: mol_type = other DNA
atggcccagcccggcaccctgaacctgaacaacgaggtggtgaagatgagaaaggaggtgaagcgcattagagtgctggttatccgaaaactcgttagatctgttggccggctgaagagtaagaaagggactgaagatgcgctgctcaaaaatcaaagaagagcccagcggctcctggaggagattcatgccatgaaagagctgaaacctgacattgtaacaaaatctgccttgggtgacgacatcaatttcgagaagattttcaagaaacctgacagcacagccactgagagagcaatagcccggctggcagtccacccgctgctcaaaaaaaagatcgacgtgttgaaggctgccgtccaggcctttaaggaagcaagacagaacgtggccgaagtcgaaagctccaagaatgctagtgaggataatcattctgagaataccctctactcgaacgataatgggagcaatcttcaaagggaagccaccgtcataagtgaacagaaggtgaaagagactaagattctggcaaagaaacccatacacaattccaaagaaaagatcgccaaaatggaacacggaccaaaagcagtcacaatcgctaattctccatctaaaccctcagaaaaggacagcgtcgtgtcgctggagagccaaaaaactcccgcagacccaaaacttaagactctgtcccaaaccaagaagaacaagggttctgattccagcctgtctgggaactctgatggcggggaagaattctgtgaagaggagaaggaatacttcgacgactctacagaagaacggttctacaagcaaagctccatgtcagaggattccgacagcggggatgacttctttatcggtaaggtgaggaggacacgcaagaaggagtcctcttgtcactctagcgtgaaggaacagaagccattagaaaaagttttcctgaaagaagacactggcgaaacgcacggcgataccaggaatgacaaaatcaaacccagcactgaaaccaggaaacttgaaagtgtgttttttcactcactgagcggcagcaaatccagcagacgcaactttaaagagcaggcccctaaaacacgctcgctggattttccccagaatgagcctcagatcaaaaatcagttcaataaaaagttgtccggtagattagagaacacgaaacagcaactccaacttcccttgcacccatcctgggaggcaagcagacggagaaaagaacagcagtccaacatcgctgtcttccagggaaagaaaattacgtttgatgactag

SEQ ID NO: 204837 - DNA, 1296 bp, synthetic construct
  misc_feature 1..1296: note = Description of Artificial Sequence: Synthetic coding sequence
  source 1..1296: mol_type = other DNA
atgaccgtgaagaccgaggccgccaagggcaccctgacctacagccgcatgcggggcatggtggcaatcctgattgctttcatgaagcagcggcggatgggcctgaacgactttatccaaaaaattgccaacaatagttacgcctgtaagcatccggaagtgcaatcaatcctgaagatttcccagccccaggaaccggagcttatgaatgccaacccttctcctccaccgagcccatcccagcagattaacctgggaccatccagcaatccccacgccaaacccagtgattttcactttcttaaggtgatcggcaagggttcgttcgggaaggtcctgctagctcgtcacaaagctgaggaagtcttttatgctgtgaaagttctgcagaagaaggccattctcaagaagaaggaggagaaacacataatgagcgaacgcaacgtgttgctgaaaaacgtgaaacatcctttcctggtgggattgcactttagctttcagactgctgataaattatactttgtgctggactatatcaacgggggcgaattgttctaccacctccagcgggagaggtgtttcttggagcctagggcacgcttctacgccgccgagattgcctcggccctcggctacttgcatagtctgaatatagtgtaccgcgacctgaagccagagaacatcctgttagactctcaaggtcacatcgttctcactgacttcggactgtgcaaggagaacattgagcacaattccaccacttccacattttgtggaaccccggagtacctagcccctgaggtgcttcacaagcagccatatgacaggacagtggattggtggtgcctcggtgctgtactgtatgagatgctgtatgggctgccgcccttctatagccggaacactgctgagatgtacgacaatatcttaaataaacctttgcaattgaaacctaatattaccaactctgccaggcacttgctagagggccttctacaaaaggaccggacaaagcgactgggtgccaaagacgactttatggagatcaaatcacatgttttcttttcgttgattaattgggatgacttgattaataagaagataactcctccctttaaccctaatgtgagcggcccaaatgacttgcgccacttcgatccagagttcaccgaggagcctgtgcccaattctattgggaagagccctgattctgtgctggttactgcttcagttaaagaggccgcagaggcatttttgggcttctcatacgctcctcctacggacagtttcctatag

SEQ ID NO: 204838 - DNA, 1266 bp, synthetic construct
  misc_feature 1..1266: note = Description of Artificial Sequence: Synthetic coding sequence
  source 1..1266: mol_type = other DNA
atgaagcccagcaagcggttcttcatcagcccccccagcagcaccgcttttatgaaacaacggagaatggggttgaatgactttatccagaagatagcaaacaacagctatgcatgtaagcacccagaggtccagtccatcctcaagatcagtcagccacaggagccggagttgatgaatgccaaccctagcccgcctccatccccttcccagcagatcaacctcggtccaagttccaatccacacgctaagccaagcgatttccactttctcaaagtgataggcaaaggtagttttggcaaggtgttactcgccaggcacaaagccgaggaggtcttttacgccgtgaaggtgctgcaaaaaaaagcaattttaaagaaaaaggaagaaaagcatatcatgagtgaacggaacgtcctcctcaagaacgtgaagcatccattcttggtaggactacatttctctttccagaccgccgacaagctgtacttcgtgctggattatatcaacggcggggagctgttttaccacctgcagcgagagcgatgtttccttgaacctcgggcgcgcttttacgcagctgaaattgcctctgcattgggctatctgcactcgcttaacattgtttacagagacctgaaaccggaaaatatactgcttgactctcagggccacatagtgcttaccgacttcggcttgtgcaaagagaacatcgagcacaattcgaccactagcacattctgcggcacaccagagtacttagcaccagaagtgctgcacaaacagccatacgacaggacagtagattggtggtgtctgggggcagtgctgtacgagatgctctatggcctgcctcctttttactcgaggaacaccgcagaaatgtacgacaatattctgaacaaaccattgcaactgaagccaaatatcacaaactccgcacggcatttgctggagggtctgcttcagaaggatcgaaccaagcgtctcggtgcgaaagatgatttcatggaaataaagtctcatgtgttcttctccttgatcaattgggacgatttaatcaacaaaaagatcacacccccctttaacccgaatgtgagtgggcccaacgacctccggcacttcgacccggagtttactgaagagccggtacctaacagtataggaaaaagtcccgacagtgtcttagtaacagcaagcgtaaaagaagcggccgaggccttcctggggttctcgtatgcaccgcccactgattcttttctgtag

SEQ ID NO: 204839 - DNA, 1581 bp, synthetic construct
  misc_feature 1..1581: note = Description of Artificial Sequence: Synthetic coding sequence
  source 1..1581: mol_type = other DNA
atggtgaacaaggacatgaacggcttccccgtgaagaagtgcagcgcctttcagttctttaagaaaagggtgcggcgctggatcaaatcaccaatggtcagtgtggataaacaccaaagcccgagcctgaagtacaccggtagttctatggttcacatcccgcctggcgaaccagattttgaatcttccttgtgtcagacatgcctgggggaacatgccttccagagaggagttctccctcaggaaaacgagtcctgcagctgggagactcaatcaggttgcgaggtgagagaaccatgcaatcatgccaatattttgacaaagcctgatcctcgtactttctggactaacgacgaccctgcgttcatgaagcagcgacgaatgggactgaacgatttcattcagaaaatagccaacaacagttatgcgtgcaaacaccccgaagttcagagtattttgaagatttcacagccacaggagcccgagctcatgaatgccaacccaagcccacccccttctcctagtcaacagatcaacctaggccctagttctaatccgcacgcaaagccgtccgattttcattttctgaaagttataggtaagggatccttcggcaaagtccttctggccagacataaggctgaagaggtcttctatgccgtgaaagtcttgcagaaaaaagcgatcctgaagaaaaaggaggagaaacacattatgagcgaaaggaatgtactgctgaagaatgtaaagcacccgtttctcgtgggcctgcatttttcgttccagaccgctgataagttgtacttcgttttggattacatcaacggcggcgaattgttctatcatttacagagagagcggtgctttttggagccaagggcccggttttatgctgctgagatagccagcgctctgggctacctgcactcattgaatattgtctatagagatctgaaacctgagaatattcttctggattcacaggggcatatagtgctgactgattttggcctttgtaaagaaaacattgagcataattctacaactagtacattctgtggcaccccggaatatttggcccctgaagtgctccataagcaaccatatgatcggaccgtcgattggtggtgtctcggtgccgtgctgtatgaaatgctttatggactgccccccttttactcccggaatactgccgaaatgtacgataacatcctgaataagccattgcagctgaagccaaacattacaaattctgcaagacacctgctggaagggctgctgcaaaaggacagaacaaagaggttgggtgccaaggatgactttatggagattaaatcacacgtattttttagtctgatcaactgggatgacctcattaataagaagatcacccctccattcaaccccaacgtgtccgggcctaatgatttaagacatttcgaccctgaatttacagaagagcccgtaccgaactcaatcgggaaatcccctgacagcgtgttagtaacagctagcgtaaaagaagccgctgaagcatttctgggcttcagttatgccccacctaccgacagtttcttatag

SEQ ID NO: 204840 - DNA, 1338 bp, synthetic construct
  misc_feature 1..1338: note = Description of Artificial Sequence: Synthetic coding sequence
  source 1..1338: mol_type = other DNA
atgggcgagatgcagggcgccctggcccgggcccggctggagagcctgcttagaccacggcataagaagcgtgcagaagcccagaagcgatcagagtctttcttgctctccgggttagcctttatgaagcaaagacgtatggggctcaacgactttatacagaaaattgcaaacaactcctatgcttgcaaacaccccgaagtgcagagtatacttaaaatctctcagccacaggaaccggaactcatgaacgcaaatccaagccctccccccagcccttcccagcagattaacctgggccccagttcaaaccctcatgccaagccctctgactttcactttctcaaagtaatcggcaaaggctcattcgggaaagtgttgctcgcacggcacaaggcagaggaggtattttacgcagtaaaagttttacaaaagaaggccattctgaagaaaaaagaagagaaacatatcatgtcagagcgtaacgtcctgctaaaaaacgtcaaacacccttttctggtggggctgcacttcagcttccagacggcagacaagctgtacttcgttctggactatataaatggcggggaactgttctaccatcttcagagagaacgttgttttcttgagcctcgtgcaaggttctacgcagccgagatagcctctgccctcggttaccttcactctcttaacatagtctatcgcgacttgaaacccgagaatattctgcttgatagccaggggcatatcgtgctgaccgattttggtctgtgtaaagagaatatcgaacacaactccacaacctccaccttctgcggcacccccgaatacctcgcaccagaggtacttcacaagcagccttatgatcgaaccgtggattggtggtgcctgggagcagtgctgtacgaaatgctctatggcctacctcctttctatagcagaaacactgctgagatgtacgacaatatccttaataagcccctgcagttaaagcccaatataaccaattccgcacgtcatctgctcgagggcttactacagaaagatagaaccaaaaggcttggagctaaagatgacttcatggagatcaagtcgcatgtttttttttctctgattaactgggatgatctgattaacaaaaagatcactcctccattcaacccaaacgtaagcggccctaatgacctacggcattttgatccagagtttaccgaagagcctgttcctaacagcatcggcaagagccctgactctgttctagtaactgctagtgtgaaggaggctgctgaagctttcctcggattctcctacgccccccctaccgatagctttttgtag

SEQ ID NO: 204841 - DNA, 435 bp, synthetic construct
  misc_feature 1..435: note = Description of Artificial Sequence: Synthetic coding sequence
  source 1..435: mol_type = other DNA
atggtgagcgtggacaagcaccagagccccagcctgaagtacaccggttcatcaatggtgcatattccaccaggagaacccgactttgaatcaagtctctgtcaaacctgcctgggcgaacatgctttccaacgtggggtgctgccccaagaaaacgagagttgctcttgggagacacagagcggttgcgaagtgcgggagccatgtaaccatgcgaacatactgaccaagcccgatccacgcacattttggaccaacgacgacccagcattcatgaagcaaagacgaatgggcctcaatgactttatacagaagatcgctaacaatagctacgcctgcaaacacccagaagtgcagtctattctcaagatttctcagcctcaagaacccgaactgatgaatgcaaatccctcaccccccccttcacctagctag

SEQ ID NO: 204842 - DNA, 1380 bp, synthetic construct
  misc_feature 1..1380: note = Description of Artificial Sequence: Synthetic coding sequence
  source 1..1380: mol_type = other DNA
atgagcagccagagcagcagcctgagcgaggcctgcagccgggaggcatacagcagtcacaattgggctttgccccccgcgtcaaggtctaacccccagcccgcctatccctgggcgacccggcggatgaaagaggaagcaattaagcctcctctgaaagcattcatgaagcaacgcaggatgggattgaatgatttcatccaaaaaatcgcaaataacagctatgcgtgtaaacatccagaagtgcaatctattctcaagatctcccagcctcaggagcctgagctgatgaacgccaatccctctcctccaccatcacctagtcaacaaattaacttggggcccagttccaatccgcatgcaaaaccaagcgactttcatttccttaaggtgatcggaaagggctcattcgggaaagtacttctggcgcgacataaggctgaggaagtattctacgccgtcaaagtactacaaaaaaaggcgatcctgaaaaaaaaggaggaaaagcatatcatgtctgagaggaacgtactgctgaagaacgtgaaacaccctttcctagtgggccttcattttagcttccagaccgctgacaagttatacttcgtgctagactatatcaacggaggtgagcttttttaccaccttcaacgagagaggtgttttctggaaccccgggctaggttctatgccgctgagatagcttctgctctgggatatctgcatagcctcaacatagtgtatcgtgatcttaagcctgagaatattcttttagacagtcagggccatatcgtgctgacagacttcggactttgcaaggaaaacatagagcacaactccactacctccaccttttgcggaacgccagaatacttagcgcccgaggtcctccacaaacagccttacgacagaactgtcgactggtggtgcttgggggccgtgctgtatgaaatgctatacggcctaccacccttctactcaaggaataccgccgagatgtatgacaatattttaaacaaacctttgcaattaaaacccaacatcactaattcagcccgtcatctgctggaaggcctgttacagaaggacagaaccaagcgtttgggagccaaagatgattttatggagatcaagagccacgtgttcttttctttgatcaactgggatgacctcatcaacaagaagatcacacctccttttaacccaaatgtgagcggccccaacgaccttagacactttgacccagagtttacagaagagccggtaccaaattccattggaaagtctccggattcggtacttgtgacggccagtgtaaaggaggccgccgaagcgttcttgggcttctcttatgccccacctacagactcattcctttag

SEQ ID NO: 204843 - DNA, 183 bp, synthetic construct
  misc_feature 1..183: note = Description of Artificial Sequence: Synthetic coding sequence
  source 1..183: mol_type = other DNA
atggtgaacaaggacatgaacggcttccccgtgaagaagtgcagcgctttccagttcttcaagaaacgggtgcgaaggtggattaaatcccctatggtctccgtggataagcaccagtctccttctcttaaatataccggcagcagcatggtccatataccgccgggggagcccgacttttag

SEQ ID NO: 204844 - DNA, 1284 bp, synthetic construct
  misc_feature 1..1284: note = Description of Artificial Sequence: Synthetic coding sequence
  source 1..1284: mol_type = other DNA
atgcagggcctgctgaccagcggccggaagcccagcggcggcggcagatgtacaggccgcggtgggtggcggggccaatggtgcctgaagccatggatgggcggtgccgacccccccacccctacgctgtcctgcctgctcctgcccgtgccgccggagttgcccgaccattgttacagaatgaattcatctcctgctggcaccccctcacctcaaccttccagagcaaacgggaacataaacctgggaccgtccgctaaccctaatgcccagccaactgacttcgacttccttaaagtaataggcaagggtaattacggaaaggtcctcctggccaagaggaaatccgatggcgctttctacgctgtgaaagtgcttcagaaaaaaagcatactgaagaagaaagagcaatcccacatcatggcagaacggtccgttctcctcaagaacgtcaggcaccctttcctcgttgggctaaggtacagtttccagacaccagagaaactgtactttgtgctggattacgttaacggcggagagctgttcttccacctgcagagagaaagacggtttctcgagcctagggcacgcttttacgccgccgaagtggcatctgcgatcggttacttgcatagtctgaacatcatataccgggatttgaagccagagaatatcctgttagactgccagggccatgtagtgctgaccgacttcgggctttgtaaggaaggcgtggaaccagaagacactaccagcactttctgtggtactccagaatacctcgcccccgaggttctgcgcaaagagccctacgacagggctgtagactggtggtgtctgggagccgtgctgtacgaaatgctccacggcttaccgcccttctacagccaggatgtgtcccagatgtacgaaaacatcctgcaccagcctttacagattccggggggacggactgtggccgcctgcgacctgctgcagtctctgcttcataaggaccagaggcagcgtttgggaagcaaggctgatttcctggagatcaagaatcacgtttttttctcacccatcaattgggacgacctgtatcacaaaaggctaaccccccctttcaaccccaacgttactgggccagcggacctgaaacacttcgatcccgagtttacccaggaagccgtgtcaaagtccatcggttgcacgccagatacagttgcgagctcctcgggtgcatcctctgccttcttagggtttagctatgctccagaggatgacgacatcttggactgttag

SEQ ID NO: 204845 - DNA, 1101 bp, synthetic construct
  misc_feature 1..1101: note = Description of Artificial Sequence: Synthetic coding sequence
  source 1..1101: mol_type = other DNA
atgaacagcagccccgccggcacccccagcccccagcccagccgggccaatggaaacattaatttgggccctagcgccaatccaaacgcccagccaactgacttcgactttctgaaagtcatcggaaagggcaactatggcaaagtcctgcttgcaaagaggaaatcggatggtgccttttatgctgtcaaggtgttgcagaaaaagagcatcctcaaaaaaaaggaatcacatattatggctgagcgcagcgtgttactgaagaatgtgaggcacccatttttagttggactgcggtatagctttcaaacgcccgagaagttatatttcgtacttgactacgtgaatggcggcgagctttttttccacctacagcgtgagcgtcgctttctggaaccccgggcacgattttacgccgcagaagttgcaagcgctatcgggtatctgcacagtttgaacataatatatagagatttgaaaccggagaacatcctgctggactgccagggtcacgtggtgctgacagatttcggcctctgcaaagaaggcgttgagccggaggatactacctcaacattctgtggcacccccgagtacctggcccctgaagtgttgcgaaaagaaccctacgacagagcagtggactggtggtgcctcggggctgtcctatatgagatgttgcacggcttgccacccttttattctcaggatgtgtcacagatgtatgagaatattctccatcaacctctccagattcccggcgggaggactgtggctgcatgcgatctcctccagtcactgctgcataaagaccagcgccagcggctgggctcaaaggctgatttcttggagatcaaaaaccacgtttttttctcacctataaactgggatgatctttaccataaaagacttacgcccccttttaaccctaacgtgaccgggcctgcagacttaaagcactttgatccagagttcacacaagaggcagtttccaaatctattggctgtacgccagatactgtcgcgtccagctcaggcgcctcgtcagccttcctcggcttctcttacgctccagaggatgatgacatcctggactgttag

SEQ ID NO: 204846 - DNA, 1104 bp, synthetic construct
  misc_feature 1..1104: note = Description of Artificial Sequence: Synthetic coding sequence
  source 1..1104: mol_type = other DNA
atgaacagcagccccgccggcacccccagcccccagcccagccgggctaacgggaacattaacctgggccccagcgctaatccgaatgctcagccgactgactttgattttctgaaagtcattggtaagggtaactacggtaaagtgctgctggcaaagagaaagtccgacggggccttttatgccgttaaggttctgcagaaaaagtcgattttgaaaaagaaggaacaatcgcatataatggcagagagatcggttctgctgaaaaacgtacgacatccttttctcgtgggtttgcgatacagcttccaaacccctgagaaactctatttcgttctcgactacgttaacgggggcgagctgttcttccatctacaacgtgagcgcagattcctggagccccgggcccgattttatgccgccgaagtggcctccgctatagggtacctgcattctctgaatatcatttacagagatcttaaacccgagaatatcttgctcgactgccaaggccatgtggtgctgacggacttcggcctgtgcaaggaaggcgttgagcccgaagataccacatcgacattctgcgggacaccagagtaccttgcacccgaagttctgcgcaaggagccttacgacagggcggtcgattggtggtgcctcggagctgtcctttatgagatgttgcatggcctgccccctttctatagtcaggacgtgtctcagatgtacgaaaatattttgcaccagccgctgcaaattccaggtggtcgaaccgtggctgcgtgtgatcttcttcagtccttgctccataaggatcagcgccagcgcctgggatcaaaagctgatttcctcgagattaaaaatcacgtattcttttcaccaattaattgggatgatctgtaccacaagaggctgactccacctttcaacccgaacgttacaggcccagcagatttaaagcatttcgatcctgagttcacacaagaggccgtgtccaagtcgatcggttgtaccccagacacagtggcttccagcagcggggcatcttccgcctttctcgggttttcctacgctcctgaggacgatgacatcctggactgctag

SEQ ID NO: 204847 - DNA, 1104 bp, synthetic construct
  misc_feature 1..1104: note = Description of Artificial Sequence: Synthetic coding sequence
  source 1..1104: mol_type = other DNA
atgaacagcagccccgccggcacccccagcccccagcccagccgggctaatggcaatattaacctcgggccatccgctaatcccaatgcccaacctacagatttcgatttcctgaaagtgatcggcaaaggcaattatggcaaggttctgttagccaaacggaaaagcgatggagcattttacgccgtgaaagtgctgcagaagaaaagcatcctaaagaagaaagagcagagccatatcatggccgaacggagtgtactgctgaagaacgtgcgccatccctttttagtggggctgcgatactcattccaaacacccgagaagctgtatttcgtgttggattatgtgaatggtggtgagctattcttccaccttcagcgggaaaggcgcttcctagaacctagggcccgtttctacgcagccgaggtcgcttctgcaatcgggtacttacatagcctcaacattatctacagagatctcaaaccagaaaatatacttctggattgtcagggccacgtcgtgctcaccgacttcgggctgtgcaaggagggagtggagcctgaggacactactagcacattctgcgggacccctgagtatctcgctccagaagtcctccgcaaggagccttacgaccgcgccgtggactggtggtgtttaggggcagttctttatgagatgttacacggactccctcctttctacagtcaagatgtgtcgcagatgtatgagaatattttacatcagcccctgcaaattccgggagggcgaactgtggcagcctgtgacctgcttcagtcgctactgcacaaagaccagagacagcggctggggtccaaagcagatttcctcgaaattaaaaaccacgtgttcttctcaccaatcaattgggatgacctgtatcacaaacgcctgactccgccattcaatccaaacgtaaccgggcctgcagatttaaagcactttgatcctgagttcacccaagaggccgtgtctaagagcattggctgcacccctgatacagtggcttcatctagtggcgctagttctgctttcttaggtttctcgtacgcccccgaggatgatgatattctggactgctag

SEQ ID NO: 204848 - DNA, 597 bp, synthetic construct
  misc_feature 1..597: note = Description of Artificial Sequence: Synthetic coding sequence
  source 1..597: mol_type = other DNA
atgaacagcagccccgccggcacccccagcccccagcccagccgggcaaacggcaacatcaacttgggcccctcggccaacccgaacgcacagccaaccgatttcgactttctaaaagtcattgggaaagggaactacggaaaggtgctccttgcaaagaggaaatcagatggcgcattctatgctgtaaaagtgctccagaagaagagtattctcaaaaagaaggaatcccacattatggcagaaagatctgtcctgctgaaaaacgtgcggcatcccttcctggtcggattgcgctacagctttcagacaccagagaaactttattttgtgctagattatgttaatggtggtgaacttttctttcacctgcaacgtgagaggagatttctggaaccacgggcacgcttctacgctgctgaagttgctagcgccatcgggtacctgcattcgctgaatattatctacagggatctgaagcccgaaaatatccttctggactgtcagggtcatgtggtgctgaccgatttcggcctgtgtaaggagggtgtggagccggaggacaccacatccactttttgcggtactccagagtag

SEQ ID NO: 204849 - DNA, 1104 bp, synthetic construct
  misc_feature 1..1104: note = Description of Artificial Sequence: Synthetic coding sequence
  source 1..1104: mol_type = other DNA
atgaacagcagccccgccggcacccccagcccccagcccagccgggcaaacgggaacattaaccttggacccagtgctaaccccaatgcacaaccgacagactttgacttcctgaaagtaattggaaaaggcaactacgggaaggtgctgctggccaagagaaaatccgatggcgccttctacgcggtaaaggtgctgcagaagaaatcaatccttaaaaaaaaggagcagtcccacattatggctgagcggagcgtgttactgaagaacgtgaggcatccgttcctcgtcggcctgcggtacagtttccagacaccagagaagctgtacttcgtactcgactatgtgaatgggggagaactttttttccatctccagcgagagagaaggtttctcgagccaagggctcgcttctatgcagcggaggtggcctcagcaattggatacttgcattcattgaacatcatttatcgggatttgaaacctgaaaatattttgttagactgtcagggccacgtggtgttgaccgattttggcctgtgtaaggagggcgtggagccagaagataccacaagcacattttgcggcactcccgagtatctggccccagaggtgcttcggaaggagccttatgatcgtgccgtggactggtggtgccttggcgcggttctgtacgaaatgctacacggattgcccccattctattcccaggacgtgtctcagatgtatgagaatattttacaccagcccctccagatccctggcggacggaccgtcgcagcatgcgatctcctgcagtctcttcttcacaaagaccagaggcaaaggctgggaagcaaggccgactttttggaaatcaagaaccatgtgttcttctctcctatcaactgggacgatttgtaccacaaaaggctaacccccccattcaaccccaatgtgacgggcccagccgatctcaaacatttcgatcccgagtttacccaggaggctgtctccaagagcataggttgtacccctgacaccgtggcctccagctcaggcgcgtctagcgcattcttgggttttagttacgcaccagaggacgacgatattcttgattgctag

SEQ ID NO: 204850 - DNA, 1182 bp, synthetic construct
  misc_feature 1..1182: note = Description of Artificial Sequence: Synthetic coding sequence
  source 1..1182: mol_type = other DNA
atgcagggcctgctgaccagcggccggaagcccagcggcggcggccgctgtaccgaactacctgatcattgctatagaatgaacagctcccctgccggaaccccctcaccccagccttctcgagcaaatggcaatatcaacctaggaccgagtgccaatccgaacgcccaacccactgattttgacttcctgaaagtgattggcaagggaaactatggtaaagtgctgcttgctaagagaaagagcgacggcgccttttacgctgtcaaggtcctgcagaagaaatccatcctgaagaaaaaagagcagagtcacataatggcagagaggagcgtgctgttaaagaacgtgcgtcacccttttctggttggactccgctactcgttccaaactccagagaagctctatttcgtgctggattatgttaacgggggcgagctgttctttcacttacagagggaaagacgcttcctggagcctcgcgcgcgtttctacgctgccgaggtggcatctgccatcggctatctccacagtctcaacatcatctacagggacttgaagcccgagaacatactgctggactgtcagggacatgttgttctgaccgatttcggcctttgtaaagagggggtggagcccgaagacaccacttctacgttttgtggtaccccagagtatttagcaccagaagtgctaagaaaagaaccatatgatcgagctgtcgactggtggtgcctgggcgctgtgctttatgagatgcttcacggtcttccacctttttattctcaagacgtctctcagatgtacgagaacatcctgcatcagccccttcagattccagggggtaggactgtagcagcatgcgatttgcttcagagcttgctgcacaaggatcagcgccaacggctcgggtccaaggcagactttttggagattaagaatcatgtgttcttctcccctatcaattgggacgatctgtaccacaaacgcctcacccctcccttcaacccaaacgtgactggcccagcagacctgaaacacttcgatcccgaattcacccaggaggccgtgagtaagagcatcgggtgcaccccagacacagtggcttcctcctcaggcgcctctagtgctttcttgggtttcagctatgccccggaggacgacgacattttggactgctag

SEQ ID NO: 204851 - DNA, 1491 bp, synthetic construct
  misc_feature 1..1491: note = Description of Artificial Sequence: Synthetic coding sequence
  source 1..1491: mol_type = other DNA
atgcagcgggaccacaccatggactacaaggagagctgccccagcgtgtctattcccagttcagacgagcaccgcgaaaaaaaaaagagatttactgtttacaaagtattagtcagtgtgggtagaagcgaatggtttgtgttcagacgctacgctgagtttgacaaactgtataacactctcaagaaacagttcccagcaatggcactgaagatccctgcaaagaggattttcggagataacttcgatccagacttcataaagcagaggagggctgggcttaatgagttcatacaaaacctcgtgcggtatcctgaactgtacaatcacccagacgtgcgggccttcttgcagatggactcccccaaacaccaatcggatccgtccgaggacgaggacgagagaagctcccagaagcttcactctacttcacagaacattaatctcggaccctcagggaatcctcacgcgaagcccaccgattttgacttcctgaaagtgatcggtaagggcagcttcggaaaggtgctcctggctaagaggaagctggacggtaaattctacgcggtgaaggttttgcagaagaagatagtgttaaaccgcaaagagcagaagcatataatggcggagaggaatgtgctgctgaagaacgttaaacaccccttcctcgtcggcttgcactacagcttccagactacggagaagctgtatttcgtcttagacttcgtgaatggaggcgagctcttttttcacctgcaaagggagcggagcttccccgagcaccgggcacggttttacgcagcagaaatagcttctgcgcttggctacctccactctatcaagattgtctacagggacctgaaacccgagaacatcctgctggactccgtgggccatgtcgtgctaaccgattttggcctctgtaaagagggtatcgcgatcagcgataccactactactttttgcgggactccggaataccttgcacccgaagtcattcgcaagcagccatatgataataccgtggattggtggtgtctgggggctgtgctttacgagatgttgtacggcctaccccccttctactgtagggacgtagccgaaatgtatgataatatcctccataaacctctctctctgaggcctggtgtgagcttaactgcgtggagtatcttagaggagctgctggagaaggaccgccagaaccgtcttggcgcaaaagaagactttctggagatccagaaccacccttttttcgaaagtctgtcgtgggctgatctagttcagaaaaaaatccctcctcctttcaatccaaatgtcgccggccccgatgacatccggaacttcgatacagccttcactgaagaaaccgtgccgtactccgtgtgcgtgagttcagattactctattgttaatgcttccgtcctggaagctgatgatgcgtttgtgggtttctcttatgcccccccatctgaagacctgttcttgtag

SEQ ID NO: 204852 - DNA, 1491 bp, synthetic construct
  misc_feature 1..1491: note = Description of Artificial Sequence: Synthetic coding sequence
  source 1..1491: mol_type = other DNA
atgcagcgggaccacaccatggactacaaggagagctgccccagcgtcagcattccgtcttcagacgagcacagagagaaaaaaaaaaggttcaccgtgtataaagtcctggtgtcagtcgggagatctgaatggttcgtgtttcgtcgctatgccgagtttgataagttgtacaacacgcttaaaaagcagttcccagctatggcactcaaaattcccgctaagagaatcttcggtgataactttgaccctgacttcattaagcaacgcagggccggtttgaatgaattcattcaaaatctggtccgatacccggagctatacaaccaccctgacgtgcgcgccttcctccaaatggattcccccaagcatcaatcagacccctcagaagatgaggacgagcggtcatctcagaaactgcactctacttcccagaatattaacctgggtccaagcggcaatcctcacgctaagcccacagactttgacttcctgaaggtcatcggaaaggggtcttttggcaaagtgctactggcaaagagaaagctggatggaaaattttacgcggttaaagtgctgcagaaaaaaatcgtcctgaaccgcaaagaacagaaacatatcatggccgagcggaatgtgttgctcaaaaatgtgaagcacccgttccttgtcggacttcattatagcttccaaactaccgaaaagctctattttgtcctggacttcgttaatgggggtgaactttttttccacctgcagcgtgagagaagctttccggaacaccgggctaggttctacgccgccgaaatagccagtgctctggggtacctgcattccattaagatcgtttacagagatctgaaaccagaaaacatcttattggatagtgtcggccacgtcgtgttgacggactttggactgtgcaaagaagggattgccatctctgataccacaaccacgttctgcggtacccctgagtacctggcccccgaagtaattcgaaagcagccgtatgataataccgttgattggtggtgtcttggggctgtattgtacgagatgctgtacgggttgcctcccttctattgtagagatgtggctgaaatgtatgataacattctgcataagccgctgagcctcagaccaggcgtgagcctgacagcctggtccattctcgaggaactgctggagaaggaccgtcagaacagactgggggccaaagaagattttctggagatccaaaatcacccatttttcgaaagcctttcctgggccgacctggtacagaaaaagatcccccctccattcaatcctaacgtcgccggaccagacgacattcgcaactttgacaccgccttcactgaggagacggtaccctactccgtgtgtgtatcatccgactacagtatcgtaaatgcttctgttctcgaagcggatgacgctttcgtgggcttctcctatgctcctcctagtgaagacctgttcctgtag

SEQ ID NO: 204853 - DNA, 1491 bp, synthetic construct
  misc_feature 1..1491: note = Description of Artificial Sequence: Synthetic coding sequence
  source 1..1491: mol_type = other DNA
atgcagcgggaccacaccatggactacaaggagagctgccccagcgtatcaatcccttcgtcggacgagcatcgcgaaaaaaaaaaaagatttacggtttataaggtgctggtgtcagtgggccgttccgaatggttcgttttcaggcggtacgccgagttcgataaattgtataacactctgaagaagcagtttcccgccatggctctaaagattccggcaaaacgcattttcggagataattttgacccagacttcattaagcaacgcagagcaggtcttaacgagtttattcaaaatttagtgcgctacccagagctttataatcacccggatgtaagagcatttctccaaatggatagcccaaagcaccagtctgacccgtccgaggacgaagatgagcggtccagccagaagctccactctaccagtcagaatatcaatctgggaccgtctggcaatccacatgctaagcctactgacttcgacttcttgaaggttattggcaaggggagctttggcaaagtcctactggcgaagagaaagcttgatgggaaattctacgccgtgaaggtgctgcaaaaaaaaatcgtgttaaatcgcaaagagcagaagcacataatggctgaaagaaacgtcctgctcaaaaatgttaagcacccgtttctggtgggactgcactattcctttcagaccactgagaagttgtactttgtgttggattttgttaatgggggggaactttttttccatctccagagagagagaagttttcccgaacaccgagctagattttacgctgctgagatcgcctccgcgctggggtatctgcatagcattaagattgtctaccgggatctcaagcctgagaatatcttacttgactccgtgggccacgtagttttgaccgattttggtctgtgtaaagaaggaatagctatttcggataccaccacaactttttgtggcactcctgaatacctcgcgcctgaggtgatccgtaaacagccgtatgacaacaccgtagactggtggtgtctgggtgcagtgctgtacgagatgttatacggcttaccccccttctactgcagggatgtcgcagagatgtacgataacatactgcataaacccctgtctctgcgtccaggagttagcctgactgcctggtccatcctggaggaacttcttgagaaggatcgacaaaaccgcttgggggcaaaagaggatttcctcgagatacagaaccatccctttttcgagtcgctttcttgggccgatcttgtccagaagaagatcccgcctccatttaaccccaatgtggctgggcccgatgatatcagaaactttgatactgcctttaccgaggagaccgtcccctattcagtgtgtgtgtcatctgattactccattgtgaatgcttccgtgttagaggctgacgacgccttcgtaggattctcatacgctcccccgtccgaagacctctttttatag

SEQ ID NO: 204854 - DNA, 1491 bp, synthetic construct
  misc_feature 1..1491: note = Description of Artificial Sequence: Synthetic coding sequence
  source 1..1491: mol_type = other DNA
atgcagcgggaccacaccatggactacaaggagagctgccccagcgtgtctatcccctcttcagacgagcaccgggagaagaagaagcggttcaccgtatacaaggtgctcgttagcgtgggacgtagcgaatggtttgtgtttcggcgatatgccgagttcgataagttatataatacactgaaaaaacagtttccagccatggctctaaaaatccccgctaaaaggatttttggggacaatttcgatccagattttattaaacagcggagggctggcctaaacgagttcatccaaaaccttgttcgctatccagagctgtataatcaccccgatgtgcgagcctttctccagatggactcccctaagcaccagagtgaccccagcgaggacgaagatgagcgctcttctcagaagctgcattcaacaagtcagaatattaacctcggcccgagcggcaacccgcacgccaaaccaactgacttcgatttcctaaaagtcattggtaagggatcatttggaaaggtgctgctggctaagcgtaagctggatggcaagttctatgctgtgaaggtgctgcaaaagaagatcgtcctgaataggaaggaacagaagcacattatggcagaaagaaacgtcctgctgaagaacgtgaaacatcccttcttagtgggtctgcactattcctttcagacaactgagaaactgtacttcgtcttagatttcgtaaatggtggtgagctgttcttccacttgcagagagagcgttcgtttcccgaacatagggctcgcttctacgctgctgaaatcgcgagtgctctgggatacctacactccatcaagatcgtctaccgagacctgaagcccgaaaatattttactggattccgtgggccacgtagttctcactgacttcggtctctgtaaggagggaatcgctatcagtgataccacaaccactttttgtggcacacccgagtacctggcacctgaagtcatcaggaaacaaccatatgacaacaccgtggactggtggtgcctcggcgctgtcctgtacgaaatgttatatggcctgccccccttctactgtcgagatgttgccgaaatgtacgacaacatccttcacaaaccgctctctttaagacctggtgtctccctgacagcctggtctattctcgaggagctgcttgagaaggatcgacagaaccgcttgggtgccaaggaggatttcctcgagattcagaatcaccccttcttcgagtcgctcagctgggccgacctggttcagaaaaaaattccaccgccctttaaccccaatgtggcaggtccagacgatataagaaatttcgacacagccttcacagaagaaaccgtgccctatagcgtgtgtgtgagcagcgattacagcatcgtgaatgcaagcgttttggaagcagatgatgctttcgtgggcttctcttatgctcccccctccgaagacctgttcctgtag

SEQ ID NO: 204855 - DNA, 1395 bp, synthetic construct
  misc_feature 1..1395: note = Description of Artificial Sequence: Synthetic coding sequence
  source 1..1395: mol_type = other DNA
atgcagcgggaccacaccatggactacaaggagagctgccccagcgtgtctatccccagttcggatgagcacagggagaagaagaagaggttcacagtgtataaggtgctcgtgtcagtggggcggagtgagtggtttgtcttccggcgttacgccgaattcgataagctgtataacactctcaagaaacaatttcccgccatggcccttaagattccggctaagagaatcttcggagacaatttcgatcctgattttattaagcagcgccgtgccggccttaatgaattcatccagaatttggtccggtaccctgaactgtacaaccatcccgacgtcagagccttccttcaaatggactcgcctaaacaccagtcagacccctcggaagacgaagacgaacgtagctctcagaagctccattccacctcacagaacatcaaccttggacccagcgggaacccacacgctaagcctacagatttcgacttcctaaaagtcattgggaaggggtcgtttggaaaagtgcttctcgctaagcgcaagcttgacggcaagttttacgccgtcaaggttcttcagaaaaaaatagtccttaacaggaaggaacagaaacatatcatggccgagcgaaacgtgctcctcaagaatgtcaagcacccattcctcgtcggcctccattattcctttcagaccacagaaaagttgtattttgtgctggacttcgtcaacggcggcgagttgttttttcatctccagagggagcgcagctttcccgagcatagagcacggttttatgcggctgagattgccagcgctcttggatacttgcactctattaagatagtctacagggacttaaagcccgagaatatcctcctggactcagtagggcatgtcgtgctgactgactttgggctatgtaaggaggggatcgccatttccgatactaccacaaccttttgcgggactcccgaaccaccgttctactgtagagacgtggctgaaatgtacgacaacatccttcacaagcctctgagtctcaggccaggggtaagcctgacggcctggagcatcttggaggagctcctggaaaaagatcgccagaatcgtctcggagccaaggaagatttcctcgaaatccagaatcatccttttttcgagtcattatcatgggcggatctggttcagaaaaagatacccccgccctttaatcccaatgtcgccgggccggacgatatccgtaatttcgataccgctttcaccgaggaaacggtgccttattctgtgtgtgtgtcatctgattatagcattgtcaatgcatcggtcctggaggcagacgatgctttcgtaggattcagttacgcccctccgtctgaggatcttttcttgtag

SEQ ID NO: 204856 - DNA, 1491 bp, synthetic construct
  misc_feature 1..1491: note = Description of Artificial Sequence: Synthetic coding sequence
  source 1..1491: mol_type = other DNA
atgcagcgggaccacaccatggactacaaggagagctgccccagcgtttccataccatcatccgacgagcaccgcgagaaaaaaaagcgcttcaccgtgtacaaggtgttggtctctgtgggacgctctgaatggttcgtctttcgccgttacgctgagtttgacaagctttataataccctaaaaaagcagttccccgccatggcgctcaaaattccagctaaaaggatctttggggacaattttgatcccgactttattaaacagagacgagcaggcctgaacgagtttattcaaaacctcgtcaggtaccccgagctctataaccatcctgatgtacgagccttcctgcaaatggattctcctaagcatcagtcagacccatctgaggatgaagatgaaaggagctctcaaaagctgcattctacaagtcagaacatcaacctgggtccctccggcaacccccacgccaaacctacagatttcgatttcctcaaagtaattggcaaaggatcttttgggaaagttcttctcgctaaacgaaaattagacgggaagttctacgccgtgaaggttttgcagaaaaaaattgtgctgaataggaaggagcaaaagcacatcatggccgaaagaaacgtcctcttgaaaaacgttaaacacccatttctggtcggtctccactactcattccagactacagagaaactatacttcgtgctggacttcgtgaacggaggcgaactttttttccacctgcagcgagagcgttcctttccagagcaccgcgcccggttctacgccgcagagatcgcaagcgccctgggctatttgcatagtattaagatcgtttatagggacctgaaacccgaaaacatcctgttagattctgtcggccacgtggtgctgactgattttgggctctgtaaggaagggatagcaatcagtgacactacaacaacgttttgtgggacccccgagtacctggctcccgaggtcattcgcaagcagccctacgacaatactgtagactggtggtgcctgggcgccgtgttgtatgaaatgctgtatggccttccccctttttactgccgggatgtggcggagatgtacgacaatatactgcataagccactgagtttgagaccaggcgtgtctctcaccgcgtggtccatactggaagaacttctggagaaggaccggcagaatagactgggagctaaggaggactttctggagatccagaatcatccattttttgaatcattaagttgggccgatctcgtgcagaaaaaaatacccccccccttcaacccaaacgtggccggaccagacgatattcgaaatttcgacacggccttcacagaagaaacagtgccgtactcagtgtgtgtttcatctgattattcaattgtgaatgcatctgtgctggaggcggatgacgcttttgttggattttcttacgcaccaccctccgaagacctttttctctag

SEQ ID NO: 204857 - DNA, 1491 bp, synthetic construct
  misc_feature 1..1491: note = Description of Artificial Sequence: Synthetic coding sequence
  source 1..1491: mol_type = other DNA
atgcagcgggaccacaccatggactacaaggagagctgccccagcgtctcaatcccctcctccgacgagcatagggaaaagaaaaagaggtttaccgtgtacaaggtgttggtgtcagtgggcagatcggagtggtttgttttccggcggtatgctgagttcgacaaactatataataccctgaaaaagcagttccccgcaatggccctcaagatccctgcaaaaaggatcttcggcgataacttcgaccctgacttcattaagcagaggcgcgcgggcctgaatgaattcattcagaatctggtccgctatccagagctctacaatcatcccgacgtgagggcgttcttgcaaatggactcaccaaagcaccagtccgatccctctgaggacgaggatgagagatctagccagaaactccactcaacttcccaaaatattaacctgggcccatcggggaatccacatgctaaaccaaccgacttcgactttttgaaggtaattggaaaaggatcattcggtaaagtgctactcgccaagaggaagctcgatgggaagttctacgccgtaaaggtcttgcagaaaaagattgtcctgaaccggaaggagcagaagcacataatggccgagcgcaacgtgttgttaaaaaacgtgaaacacccttttctcgtgggcctgcattactcattccaaacaaccgaaaaactctacttcgtgctggacttcgttaatggcggagaactgtttttccatctccagcgtgagaggtccttcccagagcaccgcgccaggttctacgctgccgagattgcctctgccctgggctacctgcatagtattaaaattgtgtacagagatcttaagccggagaacattctgctggattccgtcggccacgtcgtccttactgacttcggactgtgcaaagaaggcatagcaatttctgacactaccaccactttctgtggaacccctgaatacctggcccctgaggtaatcaggaagcagccgtacgacaataccgtcgactggtggtgtctgggagcagttctgtacgagatgctttatggattgccgcctttttactgcagggacgtcgctgagatgtacgacaatatcctccacaagcctctaagcctccgtccaggggtgtcattaaccgcttggtcaattctggaagagcttctagaaaaagacagacagaaccggctgggggctaaggaagacttcctagagatccagaaccatccctttttcgagtccttgtcctgggctgatctggtacaaaagaaaattccaccgcctttcaacccaaatgtggccggacccgacgacattcgcaactttgatacagcctttacagaagaaaccgtcccttattctgtttgtgtgagcagcgactactcaatcgtcaacgcctcagtgctggaggctgacgatgcgtttgtggggtttagctacgccccgcctagtgaggatctatttttgtag

SEQ ID NO: 204858 - DNA, 1725 bp, synthetic construct
  misc_feature 1..1725: note = Description of Artificial Sequence: Synthetic coding sequence
  source 1..1725: mol_type = other DNA
atggaggccagcctgggcatccagatggacgagcccatggccttctctcctcaacgggatcggtttcaggctgaaggctccttaaaaaagaacgagcagaacttcaaattagctggcgtcaagaaagacatcgagaagctgtatgaggccgttcctcagctgtccaatgtattcaaaatcgaggacaagatcggcgaaggaaccttctcttccgtctacctagcaaccgcccagctgcaagtggggcccgaagaaaagatcgccctaaagcatctgattcccacttcacatccgattcggatcgcagctgaattacagtgtctgaccgtggcaggcggacaggacaacgtcatgggtgtcaaatactgcttccgcaagaacgatcacgtagtgatcgctatgccttacctggaacatgagtctttcctcgacatacttaattccttgagctttcaagaggtgagagagtacatgctgaacctgttcaaagccctgaaacgcattcatcaatttggcatcgtccatcgcgatgtgaagcctagcaatttcttatataacagacggctcaagaagtatgcattggtggattttggcctcgcccaagggactcacgacacgaaaatagaactgctgaagtttgtgcagagcgaggcccaacaagaacgctgcagtcagaataaatcccacatcattaccgggaacaagattcctctcagcggccccgttcccaaggagctggaccagcagagtaccaccaaggcctctgtgaaaaggccttacaccaatgcccagatccagatcaagcagggcaaggacgggaaggaaggctccgtgggcctctccgtccagaggtcggttttcggcgagcgcaactttaatatacactcatctatctctcatgaaagccctgccgtgaaactgatgaagcagagcaagacagtggacgtcctctccaggaaactagccaccaagaaaaaggctatcagtacgaaagtcatgaattccgctgtgatgcgcaagaccgcctcgtcttgcccagctagtcttacctgtgactgttatgccacagacaaggtgtgctcaatttgcctgtctaggcggcagcaggtggccccccgggccgggaccccgggcttccgcgccccagaagtgctcacgaaatgccccaatcagacaacggccatagacatgtggtcagccggggtcatcttcctgagcctcctgtccggacggtaccccttttataaagcatccgacgatctgacagcattagcacaaattatgacaattagaggctccagggaaactattcaagccgccaagacattcgggaaaagtattctgtgctccaaggaggtccccgcacaggatctacgcaagctgtgcgaaaggcttcggggtatggactctagcaccccaaaattgactagcgatatacaggggcacgcgtcacaccagcctgccatttccgaaaagaccgatcataaagcaagctgccttgtgcagacacccccggggcaatactcaggcaattcatttaagaaaggagactccaacagctgcgaacactgctttgatgaatacaacactaacttggaaggctggaatgaagtccctgacgaagcctacgatttgttggataaattgctcgatctaaatcccgcatcaagaattaccgccgaggaggctctcctccaccccttcttcaaggatatgagcctatag

SEQ ID NO: 204859 - DNA, 1611 bp, synthetic construct
  misc_feature 1..1611: note = Description of Artificial Sequence: Synthetic coding sequence
  source 1..1611: mol_type = other DNA
atggtgctggacctggacctgttccgggtggacaagggcggcgaccctgccctcatacgggagacccaggagaaaagatttaaggatcctggactcgttgaccagctggtcaaggcagattcagagtggcgtagatgccgatttagagcggataatctgaacaaactaaagaatctttgtagcaagaccattggcgaaaagatgaagaaaaaagagcctgtcggtgacgatgagagcgtgccagaaaatgtattgagcttcgatgatctgaccgccgacgccctggccaacctcaaagtcagtcagataaaaaaggttagactgctcatcgatgaggcgattctaaagtgcgatgccgaaagaattaagttggaggcagagagattcgaaaatctgagagaaattggaaacttgcttcatccgtctgtgcctatttcgaacgacgaggacgtggataataaggttgaacggatctggggggattgtacagtgagaaagaaatatagccacgtagatctggtcgtgatggttgatgggtttgaaggagaaaaaggagcagtcgtggccgggagtcggggctattttctcaaaggggtcttggtcttcctggagcaggctcttattcaatatgcattaaggaccctcgggtcgcgtggttatatcccaatttatacccctttctttatgcgaaaggaggtgatgcaggaggtggcccagctctcccagtttgacgaagaactgtataaagtgattgggaaaggctccgaaaagtccgacgacaactcctacgacgaaaagtacctaatcgccacttccgaacaaccaattgctgctctgcatagagatgaatggttgcggccagaagacctgcctattaaatatgccggactttcgacttgttttaggcaagaggtgggttcccatgggcgcgatactagaggcatctttcgtgttcatcagtttgagaaaatagagcagttcgtgtatagctcaccacacgacaacaaaagttgggagatgtttgaagaaatgattacaaccgccgaggaattctaccagtctttagggattccttatcacatcgttaatattgtttctgggagcctaaatcacgccgcgtctaagaaactagacctagaggcctggtttccaggctccggcgctttcagagagcttgtctcctgctccaactgtacggactaccaagcgcgccggttaagaatacgctatggtcagacgaaaaagatgatggacaagaggaagaacaacctgcatcttagtactcaaaacaaacttgaagccagcctgttttctccaaagaaggtggagttcgttcatatgctgaacgccacaatgtgtgcaactacacggactatctgcgcaattctggagaactatcagactgagaaaggaatcacagtcccagagaagttgaaagagtttatgcccccgggccttcaggaactcattccttttgttaagcccgctcctatcgaacaagaacccagcaagaagcaaaaaaagcaacacgagggcagcaagaaaaaagccgcagccagggatgtcactctagagaatagactgcagaatatggaggtgacggatgcatag

SEQ ID NO: 204860 - DNA, 1563 bp, synthetic construct
  misc_feature 1..1563: note = Description of Artificial Sequence: Synthetic coding sequence
  source 1..1563: mol_type = other DNA
atggccgccagcatggcccggcggctgtggcccctgctgacccggagagggtttcgcccgaggggaggctgtatatcgaatgactcaccacgaaggtcgttcaccactgaaaaacggaacaggaatcttctgtacgaatatgcgagagaagggtactccgccctcccgcagctggacattgagcggttctgcgcttgtcctgaagaagctgcccacgcccttgaactgcgaaaaggcgagttgcgcagcgccgatctccccgcgattatcagcacctggcaagagctccgtcagctacaggaacaaatccgctcactggaggaggagaaagcagcagtcaccgaagctgtgagggctttgctcgcaaatcaggactccggggaggtacagcaagtacgcctagatcccggggcaggtagcatcttcggacctacatttttgccctttcccggacagctgtccttgttagttgaggcccagctggaggaacaattctatcttcaggcactcaagctgcctaatcagacacacccagacgttcctgtgggagacgagtcccaggccagagtacttcatatggtgggcgacaagcctgttttctcatttcagccccggggacaccttgaaatcggagaaaagctcgacataatcaggcagaagagacttagtcacgtgagtggacataggtcatactatctgcgaggagctggcgctctcctccagcacggcctcgtcaacttcacattcaacaaactcctaaggcggggcttcacaccgatgaccgtgcctgacctgctgagaggcgcggtgttcgaaggttgtggaatgacccccaatgccaacccgtcccagatctacaatattgacccagctagattcaaggacctaaacctcgctgggaccgcagaggtaggcttggccgggtactttatggaccacaccgtggcatttcgggacttacctgtaaggatggtctgctcctcaacctgctaccgtgccgaaaccaatacaggacaggaacctagaggcctttacagagtgcatcacttcactaaagtggagatgtttggagtcacgggacctggattggaacagagctcacagttgctggaggagttcttgtccctccagatggagatcttgacagagcttggcctccactttagggtactggacatgccaacgcaggagctgggactccctgcctacaggaaattcgacatagaggcctggatgccaggacgaggtcgctttggtgaggtgacgagcgcaagcaattgtacagacttccagtcacggagacttcacatcatgtttcaaaccgaggccggcgaattacaatttgcccatacagtgaatgcaaccgcttgcgctgttccccgcctgctgattgcattgctggagtccaaccagcagaaggacggctctgttctggtgccacctgccctccagtcctacctgggcacagatcgcatcacagcacctacacatgtccctttgcagtatatagggcctaaccaaccaagaaagcctggcttgccaggacaacccgcggtatcctag

SEQ ID NO: 204861 - DNA, 426 bp, synthetic construct
  misc_feature 1..426: note = Description of Artificial Sequence: Synthetic coding sequence
  source 1..426: mol_type = other DNA
atggagatgctgcagggcctgctgctgctgctgctgctgagcatgggtggagcatgggccagtcgcgagccgcttcgtccatggtgccatcctattaacgcgattctggctgtggaaaaggaggggtgtcctgtttgtatcacggtaaatacgacgatctgcgcagggtactgccccacgatgatgagggtgttgcaggcagtgttgcctccactcccacaggttgtgtgtacatatagggacgttaggttcgagtctatcaggctgccgggatgcccacggggcgttgacccagtcgtctcatttcctgttgccttaagttgtcggtgcggcccatgtagaaggtcaactagtgactgcggcggtcctaaggaccatccccttacttgcgaccacccgcagctaagtgggttactgtttctctag

SEQ ID NO: 204862 - DNA, 837 bp, synthetic construct
  misc_feature 1..837: note = Description of Artificial Sequence: Synthetic coding sequence
  source 1..837: mol_type = other DNA
atgggcgcccggctgagccggcggcggctgcccgccgaccccagcctggcccttgatgctttacctcctgaactgttagtgcaggtactgtctcacgtccccccacgtagcctggtcacaaggtgtcggcctgtgtgcagggcctggcgggacatcgtcgacgggcctacagtgtggcttctgcagttggcccgtgatcgctccgccgagggaagagccctgtatgctgtggcccaaaggtgtctcccctccaatgaggacaaagaagagttccctctgtgtgccctggctcgctattgtttacgagcacccttcgggcggaatctcatctttaattcctgtggcgagcagggctttaggggttgggaggtagaacacggcggcaatggttgggcgatagaaaaaaacttgactcccgtgcccggggccccgagccagacctgttttgttacgtcgttcgagtggtgctctaagcgtcaactggtagatctggtgatggaaggggtctggcaggaactcctggatagcgcccaaattgaaatttgtgttgccgactggtggggtgcgagggaaaattgcggctgcgtgtatcagctcagggtgaggttgctggatgtgtatgaaaaggaagtggtcaagttcagtgcatcccctgatcccgtgcttcagtggacagagcgcggctgccgtcaggtgtcccacgtgtttactaacttcggcaagggcatcaggtatgtgtcattcgagcaatatggcagggacgtgagtagttgggtggggcactatggagctctagtgactcactcatcagtccgcgtgcgtatcaggctgagttag

SEQ ID NO: 204863 - DNA, 864 bp, synthetic construct
  misc_feature 1..864: note = Description of Artificial Sequence: Synthetic coding sequence
  source 1..864: mol_type = other DNA
ttcaagcagggcctgtggctgctggagatgggcgcccggctgagcaggcggcggctacccgccgatccttcattagcactggacgccctgccccccgagttactcgtacaagtgctgtctcacgtgcccccccggagtctggtcacacggtgccgacctgtgtgcagagcctggagagacatcgtggatggcccgactgtctggctgctgcaattggcccgcgatcgttcagctgagggcagagcactgtatgcagtggcgcaaaggtgcctacccagtaacgaggacaaggaggagttccctctatgtgcactggcccggtattgtctgagggcccccttcggacgcaacctaatcttcaattcttgcggggagcagggcttccgtggttgggaggtagagcatggtgggaatggctgggccatcgaaaaaaatttgactccggtgcccggggccccatcgcagacgtgcttcgttacttctttcgagtggtgttccaagaggcaactggtggacctagtgatggaaggagtttggcaggagcttttagactccgcgcaaatagagatctgtgtggcggactggtggggcgctcgagaaaattgcggctgcgtctaccagctgagggtacgcttgctggatgtctacgagaaagaggtagtgaagttctccgccagtcccgatcccgtgctgcagtggactgagcggggatgtcggcaggtatcccacgtgtttactaactttggtaaaggaatcagatatgtgagtttcgaacagtacggtcgagacgtctccagctgggtgggacactacggagccttagttacgcacagttctgtgagagtgcgtattcggctgtcatag

SEQ ID NO: 204864 - DNA, 1563 bp, synthetic construct
  misc_feature 1..1563: note = Description of Artificial Sequence: Synthetic coding sequence
  source 1..1563: mol_type = other DNA
atggccgccagcatggcccggcggctgtggcccctgctgacccggcgggggttcaggcctcggggaggctgcatttccaacgacagcccccggcgctcattcacgaccgagaaacgaaatcgcaatcttctatacgagtacgcgcgggaggggtactccgctctcccgcagctagacatcgagcggttctgcgcctgtcccgaggaggctgctcatgccctcgagctcagaaaaggagagctacggtccgccgatctgccggcaatcattagtacatggcaagaactaaggcagctccaggaacagattagatctttggaggaagaaaaggcagccgtgacagaagccgttagagccctgctcgcaaaccaggattccggcgaagtgcagcaggtcagattggatcctggcgcaggaagtatttttggcccaaccttcctccccttccctgggcagttgagtctgctcgtggaagctcagctggaagagcagttttacctgcaggccttgaaactccctaatcagacacacccagatgtgccagtaggtgacgagtcacaggctagagtgcttcatatggtaggcgataaacctgtcttctccttccaacccagaggtcatttggagattggcgaaaagctcgacatcatccggcaaaaaaggcttagccatgtgtctggtcacagatcatattacctccgcggggccggagctctcttacagcacggactggtgaactttacgtttaataagttgttgcgcaggggcttcactccgatgaccgtacctgatctccttcggggtgccgtgttcgaaggctgcgggatgacgcccaatgcaaatccaagccagatctataacatagatcccgcccgctttaaggacctgaatttggcaggtactgctgaggtgggattagcagggtatttcatggatcatacagtcgctttccgtgacctgccagtgagaatggtctgctcctctacctgctacagagccgagaccaataccggtcaggaaccacgcgggttatatagggtccatcacttcaccaaggtggaaatgtttggagtgactgggccaggattggagcagtcaagtcagctgctggaggaattcctgtcattgcaaatggaaattctaacagaactgggcctccattttagggtgctggacatgcccacacaggagctcggtctaccagcttatcggaagttcgatatcgaggcatggatgccaggacggggcaggtttggagaggttacctcagctagcaattgcactgacttccagtctaggcgacttcatatcatgttccagactgaagccggcgaactccagtttgcacacacagttaatgcaaccgcttgcgcagtccctaggttactgattgctttgttagaatctaaccagcagaaggacggaagtgtgctggtgcctccagccttgcaatcatatctgggaacagatagaatcaccgcccctactcacgtgcctcttcagtacatcggccccaaccaaccccgaaaacccggactgcctggacagcctgccgtgagctag

SEQ ID NO: 204865 - DNA, 1557 bp, synthetic construct
  misc_feature 1..1557: note = Description of Artificial Sequence: Synthetic coding sequence
  source 1..1557: mol_type = other DNA
atggagggcgtgtggcaggagctgctggacagcgcccagatcgagatttgcgttgcagattggtggggagctcgcgagaattgcgggtgcgtgtatcagctccgcgtgagactgttagatgtttacgaaaaggaagtcgtaaagttttcggcctctcccgatcctgtgctgcaatggacagagcggggctgtcggcaggtgagtcacgtttttaccaatttcgggaagggaattaggtacgtgtcatttgagcaatatggaagggacatctctacctggcaggaactccggcagctgcaagaacagatccggtccctagaagaggagaaggcagctgttactgaggcggtgagggcactcctggctaatcaggactcgggagaggttcagcaggaccccaagtaccaaggcctgcgcgctaggggcagagaaattcggaaggaactggtgcatctgtatcccagggaggcacagttagaagaacagttctacctccaggccctaaagctgcctaatcagacacaccccgacgtcccggtcggcgacgaatcgcaggctagggtcctgcacatggtcggggacaaaccagtattttcttttcaacccaggggccatttagagattggggagaagttggacatcattagacagaagcgtttgtcacatgtgtccggccacagatcttactatttgagaggagctggggcacttctgcagcatggtttagtgaattttacttttaacaagctgttacgccggggcttcaccccaatgacagtgccggaccttctgcgtggagcagttttcgaagggtgcgggatgacgcccaacgcgaacccatcccagatctacaatatagatccagcacgcttcaaagacctcaacctggctggaaccgccgaggtgggactggccggctactttatggaccatactgtggccttccgagatcttccagttcgaatggtatgcagcagcacatgttaccgggccgaaaccaatactggccaggaaccccgcggcctgtaccgtgtgcaccatttcaccaaagtagagatgttcggggttactggcccagggctcgaacaatcctctcagctattggaagagttcctctccctgcagatggagatattgactgagctcggattgcacttcagagtcttagacatgcccacccaggagctcggtctgcccgcgtatcgtaaattcgacatagaggcctggatgccgggacgtggaagatttggggaggttacatcagctagcaattgtaccgactttcaatcccggaggcttcacatcatgtttcagaccgaggctggcgaactgcagtttgcccatacagtgaacgctactgcgtgtgccgtgccccggctgctaattgcccttctagagtccaaccagcagaaagacggaagtgtcctcgtgcctcccgccttgcaaagctacctgggcactgaccgaattacggctcccacacacgtgccacttcagtatatcgggcctaaccagccccgtaaacccggcctgcctggccaacccgccgtgtcatag

SEQ ID NO: 204866 - DNA, 711 bp, synthetic construct
  misc_feature 1..711: note = Description of Artificial Sequence: Synthetic coding sequence
  source 1..711: mol_type = other DNA
atggccgccagcatggcccggcggctgtggcccctgctgacccggagaggattccggcctcgaggaggatgcatctcaaacgactctccgagacgcagcttcaccactgagaaacgcaacaggaatttgctgtacgagtacgcccgagagggatactctgcgcttccccagctcgatatcgaaagattttgtgcctgccctgaggaggccgcccatgctttagagcttaggaaaggagagctaagatcagctgacctgcccgcgatcattagcacctggcaagagcttcgtcaactgcaagagcagattagatctctggaggaggagaaggccgccgtgacagaggccgtgagggccctgctggccaaccaagacagcggagaggtacagcaggatcccaagtaccaaggtctcagggcccgcggccgggagatcagaaaagaactcgtacatctataccctcgggaggcgcagcttgaggaacagttctatctccaggccctgaagttgcccaatcaaacacatccagacgtgcctgttggagacgagagtcaggcgcgagtgctgcacatggttggggataagcctggggcatgcccgacctgtctggccacaggtccaattacctgcgccggtctggaaccctcctgtagcaccgcatggtccacatcacacagcaccagcttttctgcaggagcaagccccccctag

SEQ ID NO: 204867 - DNA, 1281 bp, synthetic construct
  misc_feature 1..1281: note = Description of Artificial Sequence: Synthetic coding sequence
  source 1..1281: mol_type = other DNA
atgcacgccctgttcgccgacagcttcgccgccctgggccggctggacaacattaccctcgtcatggtgtttcatccacaatacctcgagagcttcctaaaaactcagcactatctccttcaaatggatgggcccctcccactgcattaccggcactatattgggataatggctgccgcacgacatcagtgtagctatctggtcaacctgcacgttaatgatttcctgcacgtggggggtgatccaaagtggctgaacggtctcgagaacgcaccacaaaagcttcagaatctcggcgagctaaacaaagtcttggcccaccgtccatggcttatcaccaaggaacacattgagggattactaaaggcggaggagcactcttggagcctcgccgagctggtccacgccgtcgttttgctgactcattatcatagcctggcatctttcactttcgggtgcggaatctccccggaaattcactgtgacggggggcacacctttcggcccccgtcagtgtcaaactattgcatttgtgacattaccaatggcaaccattcagtcgatgagatgccagtcaattctgctgagaatgtgtctgtcagcgatagctttttcgaagtggaggctctcatggaaaaaatgaggcagctccaggagtgtcgcgatgaagaggaggccagccaggaagaaatggcttctcgattcgagatcgaaaaacgtgagtctatgtttgtcttcagtagcgatgacgaggaagtaactcccgcccgcgcagtctcccggcacttcgaggacacatcctatggatacaaagacttttctcgtcacgggatgcacgtacctactttccgcgtgcaggactattgttgggaggaccacggttatagcctggtgaatagactctatccggacgtgggacagctgatcgacgagaagtttcacatcgcctacaacctgacctacaatacaatggccatgcacaaagatgtagatacatcgatgcttcggagagctatctggaattatatccactgtatgtttgggattagatatgacgattatgattatggagagattaatcagctgctggacagatctttcaaggtgtatatcaaaacggtggtatgtactcccgagaaagtgaccaaacgcatgtacgactccttttggcgtcagtttaagcattctgaaaaggtgcacgtgaatctcctattgattgaagcacgcatgcaagcagaactactttacgcactgcgcgcaatcacccggtatatgacatag

SEQ ID NO: 204868 - DNA, 1479 bp, synthetic construct
  misc_feature 1..1479: note = Description of Artificial Sequence: Synthetic coding sequence
  source 1..1479: mol_type = other DNA
atgcggctggccgccgccgccaacgaggcctacaccgcccccctggctgtcagcggactcctgggctgcaagcaatgtggaggaggccgggaccaagacgaggaactggggatccggattccccgcccactcggacagggcccctcacgtttcatccctgaaaaagagatcttacaggtagggagcgaggatgcacagatgcatgctctgtttgctgacagttttgcggccctcggtcgcttggacaacatcaccctggtgatggtatttcacccacagtacttggaatcttttcttaagacccagcattatctgctgcagatggatggcccacttcccttacattatcgccactatataggcattatggccgcagccaggcatcagtgctcatacctcgtgaatttgcacgtgaacgatttcctccacgttgggggcgatcccaagtggctaaacgggctcgaaaacgctccccagaagcttcagaacctaggagagctaaataaggtattagcccatagaccctggttgatcacaaaggagcatattgagggcctcctaaaagctgaagagcactcgtggtcactggctgaactagtacatgccgtcgtactcctcacacactatcacagtctggcaagcttcacatttggatgtggtatctccccagagatccattgtgacggcggtcacacatttcggcctccatcagtatccaactattgtatttgcgatatcaccaatggtaatcattcagtggacgagatgcccgtcaatagcgctgagaatgtatcagtgagcgacagtttctttgaagtggaggctctaatggaaaaaatgagacaactgcaggagtgccgcgacgaagaggaggccagtcaggaagagatggcctctagattcgaaattgagaaacgggagagcatgttcgtgttcagcagcgacgacgaagaagtgacccccgctcgagccgtgagccggcacttcgaagacacctcctatggctacaaagacttcagccggcatggtatgcatgtacccacattccgcgtacaggattactgttgggaggatcatggatatagccttgtaaacaggctgtacccagatgtggggcaattgattgacgagaaatttcacatcgcctataatctcacttacaatactatggccatgcacaaggacgtggacacaagtatgctgaggcgcgccatatggaattatatccactgcatgtttggtatacggtatgacgactacgattacggtgagattaaccaacttttggaccgctcatttaaagtgtacattaaaaccgtagtttgtacacctgagaaagttacgaagcgtatgtacgactccttttggcggcaattcaagcacagcgagaaggttcacgtcaatttgctgctgattgaggcccgcatgcaagccgagctcctctatgccctgagagccattacccggtacatgacctag

SEQ ID NO: 204869 - DNA, 1656 bp, synthetic construct
  misc_feature 1..1656: note = Description of Artificial Sequence: Synthetic coding sequence
  source 1..1656: mol_type = other DNA
atggccgagggcgagaacgaggtgcggtgggacggcctgtgcagccgggatagtacaactcgggagaccgctctcgaaaacatccgccaaaccatcctccgtaaaacggaatatctcaggtccgtcaaggagaccccgcatcgccccagtgacggcctgtccaataccgaatcatcggacgggctgaacaagttactggcccacctccttatgctgtccaagcgctgtccctttaaagatgtccgtgaaaagtcagagttcatcctcaagagtatacaagagttaggtatacgcatcccaaggcctttaggccagggtccatctcgcttcattcccgagaaagagatcctgcaagtgggttccgaggatgcccagatgcatgctctgtttgccgatagtttcgccgctttgggtaggttggacaacatcacgctcgtgatggtattccacccacagtacctggagtctttcctgaaaacacagcattatttgctacagatggacggtccattgcctttacactatcggcactacataggcatcatggctgccgcacggcatcagtgcagctacctggttaacctgcatgtgaacgactttctacacgtggggggggacccaaaatggctgaatggactcgagaatgccccccaaaaacttcaaaacctcggggaactcaacaaagttctcgctcacaggccatggctgatcaccaaagaacacatagaagggctattgaaggccgaggagcatagttggtccctcgccgagctcgtgcacgcagtggtcctactcacacactatcatagcctggcctcgtttacctttgggtgtggtatttcaccagagattcattgcgacggaggacatacctttaggcctccttctgtgtctaattactgcatctgtgacattaccaatggtaatcacagcgttgacgaaatgcctgtcaactccgcagagaacgtgagtgtttcagattccttctttgaagttgaagctcttatggaaaagatgcggcagctacaggaatgtcgcgacgaagaagaagccagtcaggaagaaatggcatctcgctttgagattgagaagcgcgagagcatgtttgtgttcagctcagacgacgaagaggtcaccccagcacgggccgtatcccggcattttgaagataccagctatggttacaaggattttagcaggcacggcatgcatgtgcccactttccgggtgcaggattattgttgggaggatcatggctactccctggttaaccggctgtacccggacgtgggtcaactgattgatgaaaaatttcatatcgcttacaatctcacttacaacacaatggcaatgcataaagacgttgatacctccatgcttagaagggccatctggaattacatccattgtatgtttggaatccggtatgatgactacgattacggcgaaatcaatcagctcttggatcgttctttcaaggtttatattaagactgtggtttgtacgcccgaaaaggtgacaaagcgtatgtacgattcattctggcgtcagttcaagcactcagagaaagtgcatgtgaatcttctcctgatagaggcccgcatgcaggcggagcttctctatgcgttgcgggcgataacgagatacatgacctag

SEQ ID NO: 204870 - DNA, 1302 bp, synthetic construct
  misc_feature 1..1302: note = Description of Artificial Sequence: Synthetic coding sequence
  source 1..1302: mol_type = other DNA
atgcgggccgagggcctgggcggcctggagcggttctgcagccccggcaagggtagaggtttgagggctctgcagccgttccaggtcggggatttactgttttcttgtccggcatacgcttatgttctgacagtcaacgaacgcggcaatcactgcgagtactgcttcaccaggaaagagggtttgtcaaagtgtggcagatgtaagcaggctttttattgcaacgtcgaatgccagaaggaagattggcccatgcataagcttgaatgcagcccaatggtggtgtttggggagaattggaatccctctgaaacagtgcgccttacagctcgcatactagccaaacaaaagatccatcctgaaagaaccccctctgaaaagctgttggctgtcaaagaatttgagagtcacctggataagctggacaatgaaaaaaaggacctgatccaaagcgacatcgcggctcttcatcacttttactcaaaacacctcggattcccagacaatgattctttggtggttctgttcgcccaagtgaactgcaacggatttaccatcgaagatgaggagctgagccacttagggtctgcgatttttcccgacgtagccctgatgaatcactcctgttgccccaacgtgatcgtgacatacaaggggaccctcgccgaagtgagagcagttcaggagatcaagccgggcgaggaggtgtttacttcttacatcgaccttctgtacccaacagaagacagaaacgatcggctgcgggacagctacttctttacatgtgagtgtcaggaatgcaccacaaaagataaggataaggccaaggtcgagataagaaagctttctgacccccccaaagcagaggccatcagggatatggtgcgctacgctaggaacgtcatcgaagagttccggcgggccaagcactataaatccccttcagagttactggagatatgtgagttgtcacaggagaagatgtcatccgtgttcgaggactctaacgtctatatgctccatatgatgtatcaggcaatgggggtctgtctgtacatgcaagactgggaaggtgcgttgcagtacgggcagaaaattatcaaaccatacagtaagcactaccccctgtattcactaaatgtggcctctatgtggctgaaactgggacgcctgtacatgggccttgaacacaaggctgctggggaaaaagctctgaaaaaggccatagctattatggaagtggcccatggcaaggatcacccgtacattagtgagattaaacaagaaatcgagtcgcactag

SEQ ID NO: 204871 - DNA, 819 bp, synthetic construct
  misc_feature 1..819: note = Description of Artificial Sequence: Synthetic coding sequence
  source 1..819: mol_type = other DNA
atgcgggccgagggcctgggcggcctggagcggttctgcagccccggcaaaggcaggggactgagagcgctacagccctttcaggtcggcgatctcttgttctcgtgccctgcctatgcatatgtgttaacagttaatgaaaggggtaaccactgtgaatactgttttactcgcaaagaagggctctcaaagtgtggcaggtgtaaacaggcattttattgcaacgtcgaatgccagaaggaggattggccaatgcacaaacttgaatgcagtccgatggttgttttcggcgaaaattggaacccctcagagactgtcaggttgactgctcgcatcctggccaagcagaaaattcaccccgagcgtactcccagcgaaaaactgctcgcggtgaaggaattcgagtcccacctggataagcttgataacgagaaaaaggatctgatccaatctgatattgccgctctccatcacttctacagcaaacacctaggattcccagataacgactccttggttgttttgtttgctcaggtgaactgtaacggcttcactatagaggatgaagagttgtctcaccttgggtcagccatcttccccgatgtggcgctgatgaaccacagttgttgtcccaacgtgatagtcacctataagggcactctggccgaggttagagccgtgcaggagatcaagccgggtgaggaagtgtttacctcttacatagatctcctatatcctacggaggataggaacgaccgactgcgggattcttactttttcacgtgtgaatgccaggaatgtactactaaggacaagtag

SEQ ID NO: 204872 - DNA, 5712 bp, synthetic construct
  misc_feature 1..5712: note = Description of Artificial Sequence: Synthetic coding sequence
  source 1..5712: mol_type = other DNA
atggccgccggcacctgggccgccgccgccgccgccgccgccgccgactacttcgtgcttgtcgctttcgggcctcatccacgtggatctggcgagggccaaggacagatcctgcagcgcttccccgagaaagactgggaggataacccatttccccagggcattgagcttttctgccaacccagcgggtggcagctgtgcccagaacgcaatccgcccacctttttcgtcgccgtcttaactgatataaattccgagcgccactactgcgcctgtctcaccttctgggagcctgccgaaccctcacaggagaccacacgagtcgaagatgccaccgagcgggaagaggagggagacgagggcggacagacccacttatctcctacggcccccgcaccctcagcacagctgtttgcgccaaagactctggtgttggtttcaagacttgatcacacagaggtgttcaggaattcgctcgggctcatctacgccatccatgtagaagggttgaatgtgtgtctggagaacgtgatcggcaacctactcacttgtacagtgcccctggctggcgggtcccagaggactatctctctgggagctggcgatcgccaagttattcagacgccgttggcagacagtttgccagtgagcagatgctccgttgcactcctgttccgacagctgggcattaccaacgttctgagcttgttctgtgccgctctaactgaacataaggtcctgtttttgagtcgcagttaccagcgcctggcagacgcatgcagggggttgttggctctcttattcccactacgatattcttttacctatgtgcccatcttacctgcccagctgttggaggtactctccactcccacccccttcataatcggggtgaacgcagccttccaggcagagacacaggagctgctggacgttatcgtagctgatctcgacggaggaaccgtgactattcctgaatgcgtacacatccccccattgcccgaaccactgcaatcacaaacacatagcgtcctttcgatggtgctcgatccagagctagaactagcggatctggcgttcccacccccgactacatcaaccagtagtctgaaaatgcaggacaaagagctgcgggcagtcttcctgcggctgtttgctcagctcttacagggatacagatggtgtttgcatgtggtaagaattcaccctgaaccagtgatccggttccataaggcagctttcctaggccaacgcggtttggtcgaggatgatttcctgatgaaggtgctggagggtatggcatttgcaggtttcgttagtgagaggggggtgccataccgtcccaccgatttgtttgatgagttggtggcgcacgaggtggccaggatgcgtgccgacgaaaatcatccacagagggtgctgagacatgttcaggaactggcagagcagctgtacaagaatgagaacccgtacccagcagtcgccatgcataaggtacaacgacctggggagtccagccacctgaggcgggtgcccaggccatttcctaggctggatgaggggacagtgcaatggatcgtcgatcaggctgctgccaaaatgcaaggcgcacctccggcggtaaaggcagaacggcgaactaccgtcccgagcggaccaccaatgactgcaatcctggaaaggtgctctggattgcacgtcaactccgcccgacggctggaggtcgtgcggaattgtatatcttatgtatttgaaggcaagatgctggaggccaaaaagttgctccctgcagtgttaagggctctcaagggcagagccgccaggcgctgcctggcgcaagagctacacctacatgtgcagcagaaccgtgctgtgctcgaccaccaacagttcgactttgtggtgcggatgatgaactgctgcctgcaagactgcacctctctcgacgagcatggtatcgcggccgccttactcccgctggttaccgccttttgccgtaagctcagcccaggcgtaacccagttcgcctactcctgcgtgcaggaacacgtggtctggagtactccacagttttgggaggctatgttctacggtgacgtccaaactcatattagggctttgtacctggagcccaccgaagatctcgcaccggctcaggaggtgggcgaagcaccttcccaggaagacgaacggtccgctctcgacgtggccagcgagcaacgcaggttatggcctacactttcccgcgaaaagcagcaggagctggtacaaaaggaagagagtactgtattctcccaggccatccactacgccaaccggatgagttacctgcttctgccactcgactcttcaaagtccagactactgcgagaaagagccgggttgggcgatctggagagtgccagcaactcattggttacaaattctatggcaggctcagtcgcggaatcgtatgataccgaatccggttttgaagacgcagagacatgcgatgtggcaggtgccgtcgtgagatttatcaataggtttgttgataaggtttgtaccgaaagtggcgtgacctcggatcacctcaaagggctgcatgttatggttcccgacatcgtgcagatgcacattgaaacactagaggcagtccagagggagtccagaaggctcccacctattcagaaaccaaagcttctccgacccaggctgctgccaggggaagagtgtgtgttggacggcctccgggtatacttactccctgatggtagagaggaaggagctggtgggtcggcaggggggccggccctgttgccagcggagggcgctgtgttcttgaccacttaccgagtgattttcactggtatgcccacagatccactggtcggggagcaggtcgtcgttcgatcctttcctgtggccgcactcacaaaggagaagcggataagcgtccagactccagtggatcagctgcttcaggatggactgcagcttagatcttgtacatttcagcttctgaagatggctttcgacgaagaggtgggcagcgattctgctgaactgttcagaaagcagttgcacaaactccgctacccaccagatattcgagcaacatttgcattcacgctgggatccgcacacacgccagggcggcctccaagagtgacgaaggataaaggcccaagtctccggactttatctaggaacctggtcaaaaatgcaaaaaaaaccatcggaagacagcatgtgacgcggaagaagtacaacccgcccagttgggagcatcgggggcagccccccccagaggaccaggaagatgaaatttctgtgagtgaggagctcgagccaagcaccttaacgccttcatcagcgttgaagccatcagataggatgacaatgagcagcctggtcgagagggcatgttgcagagactaccagcggctgggacttgggaccctgagcagctccctgagccgagcaaagtcagagccatttcggataagccccgtgaaccgaatgtacgctatctgtcggagttatccagggttgctgatagtgccgcagagcgtgcaggataacgccctgcagagagtttcgaggtgttatcggcaaaatcggttcccagtagtctgttggagatccggccgttccaaagcagtgctgttgcgcagtggagggttacacggaaaaggggtggtcgggctgttcaaggcgcagaacgccccaagcccgggacaaagtcaggcagattcatcttcactggaacaggaaaagtatttacaagcggtagtatcatctatgcccagatacgctgatgccagcggccggaacacactatccggtttctcttcggcccacatgggatcccacgtcccaagccccagagcaagggtgaccaccctgtccaatcccatggctgcctcagcttccaggcgaactgccccacgggggaagtggggcagcgtgcggacctcagggagaagttccgggctgggaaccgacgtgggatctagactggccggcagggacgcccttgcacccccacaggctaatggtggacccccagacccggggttcttgcgacctcagcgggcagcactgtatatcttgggggacaaggcccagcttaagggcgtccgcagcgatcctctccagcagtgggagctcgtgcccattgaggtgttcgaggcccggcaggtaaaagcgagcttcaaaaaactgctcaaggcatgcgtgcccggctgccctgccgccgaacccagccccgcctccttcctccgatcactggaggatagcgaatggctgatacagattcacaagttactgcaagtctctgttttggtagttgagctactggactcaggctcttctgtcctagtaggcctagaggacggctgggacatcactactcaagttgtttcactggtccagcttctgagcgatccattctatcggacacttgagggtttccgcctcctagtggagaaggagtggctgagctttggtcatcgcttctcccaccgaggggctcatacactcgccggacagagctctggcttcacacctgtgtttctgcaatttttggactgtgtacatcaggttcatctccagttccctatggagttcgaattctctcagttttatctaaagtttctgggataccaccatgtcagtcggagattccgcacttttctgctagacagcgactacgagcggatagaactgggcctattatacgaggaaaagggcgaaagacgaggtcaggtgccatgtcgatccgtttgggagtacgtggatagactttccaagagaacacccgtgttccataattacatgtacgcccctgaggacgccgaggtgctgaggccctacagtaacgtatcaaacctcaaagtgtgggatttctatacagaggaaacgctcgccgaaggtcccccatacgattgggaactggcgcagggtcccccggagccacccgaggaggagcgctctgatggtggcgcccctcagagtaggagaagggtggtgtggccttgctacgactcgtgtcccagggcccaacctgatgccatatcaagactcctggaagagctccagagactggagacagagctgggccagcccgctgagcgttggaaggatacctgggaccgagtcaaggcggcccagcggcttgagggaagaccggacggccgcggcacaccctcttctctccttgtctcgacagcaccccaccaccggcgctctctaggagtataccttcaggagggccccgttgggtctacattatccctttccctggactccgaccagtcatccgggagcaccacatcagggtcacggcaggctgcaaggcgatcaacctcaaccctgtatagccagtttcagactgcagaaagtgagaaccggagctacgaagggaccctttataagaagggcgctttcatgaaaccttggaaagcccggtggtttgtgctagacaagacaaagcatcagctgcgctactatgatcaccgagtagatacggagtgcaagggggtcattgatcttgcagaggtggaagcagtggctccaggcactccgacgatgggcgctcctaagactgtcgacgagaaggcctttttcgatgttaagaccacccgtcgcgtgtacaatttctgtgcccaggatgtaccgagtgcccaacagtgggtggataggattcagagttgcctgtcagatgcatag

SEQ ID NO: 204873 - DNA, 2697 bp, synthetic construct
  misc_feature 1..2697: note = Description of Artificial Sequence: Synthetic coding sequence
  source 1..2697: mol_type = other DNA
atggccgccggcacctgggccgccgccgccgccgccgccgccgccgattactttgttctggttgccttcgggccacacccacgggggagcggcgaggggcaggggcagatcctgcagcgcttcccagaaaaagactgggaggataacccatttccccagggtattgaactgttttgtcagccttccggctggcagctgtgcccggagcgaaatccccctactttctttgtggctgtcttgacagatatcaacagcgagaggcactactgtgcctgcctgaccttctgggagccggccgagccctcccagcaggaaactacacgcgtcgaggacgcaacagaaagggaagaagagggggatgaaggcggacagactcacttaagcccaaccgcgccggccccctctgcccaactgtttgcgccaaaaactctggtgttagtcagccgacttgaccataccgaggtgtttcggaattccctcggactcatttatgcaatccatgtggaagggttgaatgtctgccttgagaatgtcattggcaacctgttgacgtgcactgttcctttggcaggcggctcacagcggaccatttcactcggggccggagatcgccaagttatccagacccccctggcagattcgctccctgtctcccggtgttctgtagccttgctgtttaggcaattggggatcacaaatgtcctgtctttgttctgtgcagctctgacggaacacaaggtgctgttcttaagccggtcataccagagactggctgatgcctgtaggggcttgctggctcttctgttcccgttgagatattcctttacttacgttcccatactgcccgctcagctccttgaggtcctgagcacacccacgccttttataataggagtgaatgctgccttccaggcagagactcaagaactgttagacgtgattgttgcagacttagatggtggcacagttacaatcccagagtgcgtgcacatccctcccctgcctgaaccgctccaaagccaaacacacagcgtcctcagcatggtgctggacccagaattagagctggctgatttggcttttccgcctccaacaacctccacttcctcactcaagatgcaggataaggagctcagagctgtcttcttgcgcctgttcgcacaattgttgcagggataccggtggtgcctacatgtggtgcgaatacacccagaacccgtcattagattccacaaggccgcttttctcggacagcgcggtctcgttgaagacgatttcctgatgaaggttctggaaggtatggctttcgccgggttcgtgagcgagagaggggtgccctatcggccgactgatctcttcgatgagttggtagcacatgaggtggctaggatgagagccgacgaaaatcatccccagcgagtgttacggcatgttcaggagctcgccgagcagctctacaagaacgagaacccttaccctgcagtcgccatgcacaaggtgcagagacctggcgagagcagccacctgaggcgtgtgcccaggccattccctaggctggacgagggaactgtgcagtggattgtcgatcaggctgccgccaagatgcaaggtgctccacccgccgtgaaggcagagcggcgtactacagtcccatctgggcctccaatgacagccatcctggaacggtgctctggcttacacgtgaacagcgccaggcggcttgaggttgtgcggaactgcatttcttatgtcttcgagggcaagatgctcgaggcgaagaaactgctgcctgccgtccttcgcgcactgaaaggacgagccgctaggaggtgtctggctcaggagctgcacttgcatgtgcaacagaatcgggcggtgcttgaccatcagcaattcgacttcgtagtcaggatgatgaattgctgtctgcaggactgcacgtctctggacgaacacggcattgctgcagccctgttacctctggtaacagccttttgccggaaattgtcacctggcgtcacccagtttgcatatagttgtgtccaggaacacgtcgtgtggagcacccctcaattctgggaggccatgttctatggagacgtgcaaactcacatacgcgctctatacctcgaaccaacagaggacctcgcgcctgcccaggaggttggagaagctccgagtcaggaggatgaaaggtccgcgctggatgtcgcctcagaacaacggcgcttgtggcctacccttagccgggaaaagcaacaggagctggtacagaaggaggaatcgaccgtcttctcacaggcaattcactacgcaaaccggatgagttacctgctcctacctctggactcatccaagtccagactgcttcgggaacgtgccgggctgggggacctggagagcgcatccaatagtcttgttactaacagcatggccggcagtgtagcggagtcatatgataccgagtccggcttcgaggatgctgagacctgtgatgtcgctggcgcagttgtcaggttcataaaccgtttcgtggataaggtctgcacagagagcggagtgacatcagaccacttaaaggggctacacgtgatggtgcccgatatcgttcagatgcacattgaaactctggaagccgttcagagagagagcaggagactgcccccaatacagaagccaaagctcctgcgaccttag

SEQ ID NO: 204874 - DNA, 5682 bp, synthetic construct
  misc_feature 1..5682: note = Description of Artificial Sequence: Synthetic coding sequence
  source 1..5682: mol_type = other DNA
atggcccggctggccgactacttcgtgctggtggccttcggcccccacccaagagggtccggagagggccaggggcaaatcctccaacggttcccagagaaagactgggaggacaaccctttccctcaaggaatcgaattattctgccagcctagcggatggcagctgtgtcccgaacggaaccccccaactttctttgtggccgtgctaaccgacattaattcagagcgccattactgtgcctgcttaactttttgggagcccgccgaaccttcgcaggaaactacaagggtggaagatgcaacggaaagggaggaagagggcgatgagggaggacagactcacctgtctccgaccgcaccagcgccgtcggcacagctgtttgccccaaaaacgttggtcctggttagcagactagatcatacagaggtgttcagaaactctctgggcctgatctacgcgatccacgtggagggcctgaatgtgtgtttagaaaacgtgattggcaatttactgacctgtacagtgcctctcgctggtggatcacagcggacaatatcactgggcgccggcgataggcaggtaatccagacccccctagctgattccctgcccgtttcgagatgcagtgtggctttattattcaggcagttggggatcacaaacgtgttgagcctgttctgcgccgccctgacagagcacaaagttctttttcttagccgaagctatcagcggttagctgacgcctgtcggggcctgctggcccttctgtttccactgcgctacagctttacctacgtccccattctgcctgcccaacttctggaggtgttgtcaaccccaacaccctttatcatcggcgtgaatgcagccttccaggccgagacacaggagttactagacgtgattgtggctgatctggacggtgggacagtcactattcctgagtgcgtgcacattccacctctacccgaaccgctccagagccagacccactcggtgctgagtatggtgctggaccccgaactggaactggcagatctggccttccccccccctacaacttctacttcttcactgaagatgcaggataaggagctgcgcgccgttttccttagattgtttgcgcagcttctgcagggatatcggtggtgccttcatgtggtcagaatccaccctgaacccgtgatcagattccacaaggctgcctttctgggacagcgcggactcgtagaggatgatttcctcatgaaagtcctcgaggggatggcttttgccggctttgtgagcgagcggggggtcccctataggccaacagatcttttcgacgagttggtcgctcacgaagtcgctcggatgcgtgcggacgaaaaccacccacagagggtcctgcgtcacgtacaggaactcgctgagcagctgtataagaatgagaatccctatcctgccgtggctatgcacaaggtgcaaagaccgggtgagtcaagccacctaaggagggtccccagaccattcccaagactggacgaaggtaccgtgcagtggattgtggaccaagccgccgctaagatgcagggggccccacccgccgtgaaggctgagagacgcactaccgtgccctcaggaccccccatgactgcgatattagaaagatgttccggcctgcacgtaaactcagccagacgtctggaggtggtgcgtaactgtatctcatatgtcttcgagggcaaaatgctggaagctaaaaagttattacccgctgtgctacgagcactcaagggtcgcgctgccaggcgctgtctcgctcaggagcttcacctacacgtgcaacagaatagagcagttctcgaccaccaacagtttgactttgtggtgcgtatgatgaactgctgcttgcaggactgcacttcattggacgagcacggaatcgcagccgccctgctgcctctagtcacagcattttgccgcaagctgagtcccggagtgacccaattcgcctactcttgtgtgcaggaacacgtggtctggagcacacctcaattctgggaggctatgttctatggcgatgtgcagacccatataagggccttatacttggagcccaccgaagatctcgccccggctcaggaggtaggtgaagcaccctctcaggaagacgaacgatcggcgctggatgtggcctcagagcagagaagattatggcctactctgtccagagagaagcaacaagagctggtccagaaggaggagtcaaccgtgttctcccaggccatccactatgcaaacaggatgtcttacctcttacttcccctggattcctcaaaatcacggctgctacgtgaaagggccggactcggcgacctcgagagcgcttccaattcgctggtcacaaacagcatggctggaagcgtcgcagagtcatatgatacagagtccggcttcgaagacgccgagacttgtgatgtggccggcgctgtggttagattcatcaaccgctttgtggacaaagtgtgtactgagtcaggggtgacctcagaccatttgaagggactccacgttatggtgcccgatattgtgcaaatgcatatcgagaccctggaagccgtgcaaagggaaagcagacgccttccgccgatacagaaacccaaactgctgcgtcccagactgctgcccggcgaggagtgcgtgctcgatggactcagagtgtacctgctgccagacggtagggaagagggtgccggtgggagcgccggtggtcctgcactccttccagccgaaggggccgtgttcttgactacctatcgggtcatcttcaccggcatgcctacggacccattggtcggggagcaggtagtggtacgatcatttccagtggccgcccttaccaaggaaaagcggatctcagtgcagaccccagtggatcagctgctgcaagatggcttacaactgaggagttgcaccttccagctgctcaaaatggcgttcgatgaagaggtaggctccgattctgccgagttgttcaggaagcaattgcataagttgcgatacccccccgacatcagggctactttcgctttcaccctcggaagtgcacatacaccaggacgccctcctcgcgtgactaaggacaagggccctagcctccggactctctcgagaaatctggtgaagaacgctaagaagaccattggacgccagcacgtgacgagaaagaagtacaatccccccagctgggaacaccgcggccagccccccccggaggaccaggaggatgaaatctctgtgagtgaggaactggaaccctctactctcacccccagctcagcactgaagcccagtgatagaatgacaatgtcgagtttggtcgaacgggcctgttgccgcgactaccagaggcttggcttaggaacgctcagctctagcctgtccagagccaaaagcgagccttttagaataagccctgtaaatcggatgtacgcgatttgtagatcataccccggcttgctgattgtgccccagtccgtacaggacaatgcattgcaaagggtgtcccggtgctacagacaaaaccgttttccagtagtctgctggcgctcaggacgaagtaaagcagtcctcctccgcagcggaggccttcacggaaagggtgtcgtcggactcttcaaagcacaaaatgccccctctccaggccaatctcaggccgattcaagttccttggagcaggaaaagtacttgcaggctgtggtgtccagcatgccacgctacgctgacgcttctggacgcaatacactgagtggatttagctccgcacatatgggaagccatgtgcccagcccacgcgctcgagtgacaaccctaagtaacccaatggccgctagcgcttctaggagaaccgctccccgcgggaaatggggttcggtcagaaccagcggaagatcttctggactgggcaccgacgttggatcgaggctggcgggaagggatgcactggccccaccacaggctaacgggggaccaccagaccccggtttcctgaggccccaaagagccgccctgtatatcctgggagataaagcccagctgaagggagttcgctcggaccctctccagcagtgggagttggtgcctatcgaggtgtttgaagccagacaggtaaaggcatcatttaaaaagctcctgaaagcctgcgtgccaggatgccccgcagctgaacctagtcctgccagttttttgaggagtttagaagattccgaatggcttatccaaattcataaattgctacaggtctctgtgcttgtggtggaactcttggacagcgggtcttccgtcctggtaggcctggaggatggctgggatattacgacccaggtcgtcagtttggtccaactcctctctgatccattttacagaaccttggagggttttcggctgctcgtggaaaaggaatggctgagtttcggacatcgattctcccatagaggtgctcacacactggcaggccagtctagtgggttcactcccgtatttctccagttcctggattgtgttcatcaggttcatctgcagtttccaatggagtttgagttcagccagttttacctcaaatttctaggctaccatcacgtctcaagaaggtttcgcaccttcctgctcgattccgattatgagcggatcgagttgggccttctgtatgaggaaaagggcgagagacggggccaggtgccatgcaggagcgtgtgggagtatgttgacaggttatcaaagcgcaccccagttttccataattacatgtacgccccagaagacgccgaagtgctacgcccgtactcaaacgtttcaaacctcaaagtctgggatttctataccgaagagacattagcagaggggccaccttacgattgggagctagcccagggaccacccgagcctcccgaggaagaacggtcagacggaggcgcacctcagtcgaggaggcgggtggtatggccctgttacgactcctgtccacgggctcagccagacgccatctcccgcctgttggaagagctgcagcgcctggagacagaacttggacaacccgccgaaaggtggaaagatacttgggacagggtgaaggcagcacaacgcttggaagggaggcccgacggaagaggaacgccctcgagtctgctggtgtccaccgctccacatcacagaaggagcctaggagtctacttgcaggaggggcctgttgggtccaccctcagtctgagcctggacagcgaccagtccagcggctctaccacatcaggctctagacaggcagcgagacggtctacatcaacgctgtactcacagtttcaaacagccgaatcggagaatcgctcatacgagggcaccttgtataaaaagggagcattcatgaaaccctggaaagctcgctggttcgttctggataaaaccaaacaccagctgagatattatgatcacagagttgatactgagtgcaagggagtcatcgacctggccgaagttgaagctgttgctccaggaaccccaaccatgggtgctcctaaaaccgttgatgagaaggccttttttgacgtcaagacaacacgccgagtctacaatttctgtgctcaggatgtgccctcggctcaacagtgggtcgatcggattcagtcctgtctcagcgacgcatag

SEQ ID NO: 204875 - DNA, 5604 bp, synthetic construct
  misc_feature 1..5604: note = Description of Artificial Sequence: Synthetic coding sequence
  source 1..5604: mol_type = other DNA
atggcccggctggccgactacttcgtgctggtggccttcggcccccatccacggggatccggggaagggcaagggcaaatacttcaacggttccctgagaaggactgggaggacaaccctttcccacaggggatcgagctcttctgtcaaccctcaggctggcaattatgtcccgaacgtaatcctccgacctttttcgttgccgtactaactgacatcaattctgagcgtcattattgcgcctgtctgacgttctgggaaccagcagaaccctctcaagaaaccactcgtgtggaggacgcaacagagagagaagaggagggtgacgaggggggtcagacccacttgagccccactgccccagcaccttctgctcagctcttcgcaccgaaaacgctggtcctagtctcccgtttagaccacacggaggtcttccgaaatagtttgggattaatctacgccattcatgtcgaaggcctgaatgtgtgcttggagaatgtgattggtaatcttcttacgtgtacagttcctttggccggtggttcacagagaaccatctcactcggggctggtgaccgacaggttatccagacacccctggcggattcactccccgtatctcgatgcagtgtggcactgttgtttagacagttgggaattacaaacgtgctctctctgttctgtgcagccttgacagagcacaaggtcctgttcctaagccggagttaccagcggctggccgatgcctgccggggccttctggccctccttttcccattgcgctactctttcacatacgtgcccattctcccagcccaactccttgaagtccttagtacacccaccccattcataattggcgttaacgccgcatttcaggcagaaacccaggagttgttagatgtcatcgtggctgacttagatgggggcaccgtaactatccccgagtgtgttcatatccccccactcccagagccgcttcagtcccagactcattcagtactctcaatggtcctggatcctgaactcgagctggcagacctcgcttttcctccaccaacaacttcaaccagctcactgaagatgcaagacaaagagctgcgcgctgttttcctgagattgtttgcgcagctcctgcaggggtatagatggtgcctgcatgtggtgcgtatccatcccgagccagtaatcagatttcataaggccgctttcttaggccagcggggacttgttgaggacgacttcctgatgaaagtcctcgaaggcatggcatttgcaggatttgtgagtgaaaggggcgtgccctataggccaacagatttgtttgatgagctggtcgcgcacgaagtcgcacggatgcgggcggatgaaaaccacccacaacgtgttcttcgacatgtgcaggaactagcggaacagctttacaaaaacgaaaatccttacccggccgtcgccatgcacaaagtgcagcgtcccggcgaaagttcccacctgcggagggtccctagaccttttccaagactggatgagggcacagtccagtggattgttgaccaggccgccgcaaaaatgcagggggctcctcccgcagtgaaagccgagagaagaactacggtgcccagcggcccccctatgaccgcgatcctggaacgctgtagtggcctgcatgtgaacagcgcgaggaggctggaggttgtgagaaactgcatttcttacgttttcgaaggcaagatgctggaagcaaaaaaacttctcccagccgtgctacgcgccctgaagggacgtgctgccaggcgctgtctggcacaggagctccacttgcacgtgcaacagaacagagcagtgctggatcatcaacagttcgatttcgtggtccggatgatgaattgttgcctccaagattgcacttcactggacgagcatggtatcgcagcggccctgttacccctcgtcaccgccttttgtaggaaactctcgccgggcgtgacccagtttgcctattcttgcgtgcaggagcacgtggtgtggtcaacgccgcaattttgggaagctatgttctatggggacgtgcagacccatattcgcgcactgtacctagaacccaccgaggacctcgcacctgctcaagaagttggggaagccccgagtcaggaggatgagcggtcagcgttagacgtagcttccgaacagcggcgtctctggccaacactctcccgagagaaacagcaggaattagtccagaaagaggaaagtacagtgttctcccaggctatccactatgcgaaccgtatgagttatttattgttgccactggattccagcaagtcgaggctgcttcgtgagcgcgccggcctcggggaccttgagagtgcgtctaacagcttagtcaccaatagcatggcaggatctgtggctgaatcatacgacactgagtccggcttcgaggatgctgagacctgcgacgtagcgggggctgtggtccgctttattaacaggttcgtggataaggtgtgcaccgagagtggggtgacgtctgaccacctgaaaggactgcatgttatggtgcctgacattgtacaaatgcatatcgagaccttagaggctgtgcagcgggaatcccggcggctaccacccattcaaaaacctaaactcctacgccctaggttgctaccgggagaagagtgtgtgctggatggtcttagagtgtatctgctgcctgacggcagggaggaaggcgcgggaggaagcgctgggggaccagcactgctgcccgcagaaggggccgtgttcctgacaacttacagggttatcttcactgggatgccaaccgaccccttagttggggaacaggtggtcgtcaggagcttccctgtcgctgccctgaccaaagaaaagcgcattagcgtacagacacccgtagatcagctactgcaggacgggctgcagctccgctcctgcaccttccagctgttgaaaatggcgtttgatgaggaagtcgggtctgattccgcagaattattcaggaaacaactccataagctgcggtaccctccggacatacgcgccaccttcgccttcacattagggagcgcccacacacccgggaggcccccacgggtcacaaaggataaagggccctctctgaggacgctgtcacgaaacctagttaagaatgcaaaaaagacaatcggcaggcagcacgtgacgcgcaagaaatataatccaccatcatgggaacaccgcggacagcctccccctgaggatcaagaggacgaaattagcgtatctgaggagttagaaccctctacactcacgcctagttctgctctcaagccatccgatcgtatgactatgagcagcctcgtcgagcgcgcatgttgcagagactaccagaggcttggcctgggcaccctgagcagcagccttagtagggctaaatctgaacccttcaggatttcccccgtgaacaggatgtatgctatttgccgctcgtatccaggcctgctgattgttccacagtctgtgcaggacaacgcactgcagcgcgtctcacgctgctatcggcagaaccgatttcctgtggtctgttggaggagtggccggtccaaagccgtccttttacggtctgggggactgcacggcaagggtgtcgtaggtctgtttaaggcacagaatgcgccatcccccggacagtcccaggcggacagttctagtcttgaacaggaaaagtacctgcaggccgtcgtctcttcgatgccccggtacgcagacgcatccggtcggaataccttgtcagggttctctagtgcacatatgggaagccatgggaagtggggcagcgttcgaacctcaggtcggtcttctgggctgggcactgatgtgggttcccgactggccggtcgcgacgcactggcccccccacaagcaaacggtggcccccctgacccaggatttctacggccccagagggctgcactctacatactgggggacaaggcgcaattaaaaggggtaaggagtgaccctttgcagcagtgggagcttgtccctattgaggtatttgaggcccgccaggtcaaagccagcttcaagaagcttctcaaggcctgtgttccgggatgccctgccgccgagccaagtcccgctagcttcctacgcagcttggaagattcagagtggcttatacagattcacaagctgctccaggtgtccgtgctcgtcgtggagctactggatagcggtagtagcgtcctggtgggtctggaggacgggtgggacatcaccactcaggtcgtgtccttggtgcaactccttagtgaccctttttaccggaccctggaagggtttagactgctagtcgagaaagagtggctgtctttcggccaccggttctctcaccgcggcgcacatacactggcagggcagtctagtggcttcacacctgttttcctgcagtttcttgattgcgtccatcaggttcatctgcagttccccatggaatttgaattctctcagttctaccttaagtttctgggctaccatcatgtgtcacggcgtttcaggaccttcttgctggattcagactatgagcgcatagagctagggttgctttacgaagagaaaggcgaacgcagaggacaagtaccctgccgatccgtttgggaatatgtggatcggctttctaagcggactcccgtctttcacaattacatgtacgctcccgaggacgcggaagtactgaggccctatagtaacgtgtctaatctcaaagtctgggacttctataccgaggaaaccttggcggaaggaccgccatatgattgggagctggcgcagggcccaccagagccccccgaggaggagcggtctgacgggggggcaccccaatctcggagaagggtcgtgtggccttgctatgatagctgcccaagggcccaacccgatgcaatttctagactgttagaggaacttcagcgactggaaacagaacttggccagcccgctgagaggtggaaagacacatgggaccgtgttaaggctgcccagcgactggaggggaggcccgacggtcgggggacgcctagttccctgctcgtgtccacagcgccccaccaccgtaggagcctgggggtctacctccaggagggaccagtgggttcaacactctccttgagtctcgattccgaccagagttccggttccacaacctctggaagtcgacaggctgcccgacgcagtacaagtaccctgtacagccagtttcagacagctgagtccgaaaatagatcttacgaagggacactttacaagaagggggcctttatgaaaccctggaaggctagatggttcgtgctggacaagacaaagcatcaactacgctactacgatcaccgggtggataccgagtgtaagggcgtgatcgacctcgcggaggtagaggccgtcgcccctggcacaccaacaatgggtgctcctaagacggtcgacgagaaggccttcttcgacgtgaaaaccactaggcgggtctataacttctgcgcccaggacgtcccatcagcccaacagtgggtcgatcggattcagagctgtctgtccgatgcctag

SEQ ID NO: 204876 - DNA, 5550 bp, synthetic construct
  misc_feature 1..5550: note = Description of Artificial Sequence: Synthetic coding sequence
  source 1..5550: mol_type = other DNA
atggcccggctggccgactacttcatcgtggtgggctacgaccacgagaaaccggggtcgggcgaaggcttaggaaaaattattcaaaggtttccccaaaaggactgggacgacactcctttccctcaaggcattgaacttttctgtcagccggggggctggcagctctcacgggagcgtaagcagcctactttttttgtggtggtgctgacagacattgactccgaccgccattactgtagctgtttgacattctacgaggctgagataaacctccaaggcacaaagaaggaagagattgaaggagaagccaaggtatctggactgatacaaccggctgaggtgttcgctcctaaaagcctggtattagtctctcgcctatactatccagagatctttcgtgcatgtctgggtttgatatacaccgtgtatgtggacagtctgaacgtatcactagaaagccttattgccaatctgtgtgcatgcttagtgcccgccgcaggtggaagccaaaagctgttcagtttaggggctggagaccgacaacttatccagactccactgcacgactcacttcctattacaggaaccagcgtggctctcttatttcagcagcttggtatccaaaacgtcctgagcttattctgtgccgttttgacagagaataaggtgctcttccactccgcaagcttccaaaggttgtctgatgcctgccgggcattggaaagcctcatgttcccactgaagtatagctatccgtacatacctattctgcctgcccaattattggaggttctttcatcccccacacctttcatcataggagtgcacagcgttttcaagacagatgtgcacgagctcctggatgtcataattgcagatctcgacgggggaaccattaaaatccctgagtgcattcacttatcaagtctgccggagcccctcctgcaccagacccagagcgcactgtcattgatcctccatcctgatctcgaggtggccgatcacgcctttccgccacctaggaccgccctgtcacactctaaaatgctggacaaggaagtgcgcgctgtgttcctcagacttttcgcgcaactgtttcaaggctatcggtcatgtctacagcttattcgcatccacgccgagccagtgatccatttccacaagacagctttcctgggccagagagggttggtagaaaatgactttctgacaaaggttctatcaggtatggcctttgccggcttcgtatctgaacgaggccccccttaccggtcttgcgacttatttgacgaactggttgcctttgaggtggaaaggatcaaggtggaagagaacaaccccgtaaaaatgattaagcacgtgcgggagctcgcagaacagttgttcaaaaatgaaaatccgaatcctcatatggctttccagaaagtgccgcggcctacggagggttcccatctgcgagtgcatatactgccctttcctgaaatcaacgaggcacgggtccaggaactgatccaggagaatgtcgcgaaaaatcagaacgctcctcctgcgactaggattgagaagaaatgcgtggtgcctgccggaccacccgtggttagtatcatggacaaagtgaccacagtattcaatagtgctcagcgactggaggtggtgagaaactgcatcagtttcatcttcgaaaacaaaatcctcgagactgagaaaaccctgccagccgctctacgagccctgaaaggcaaggccgctcgacagtgccttactgacgagctcggcttgcacgttcaacagaatcgcgcgattctggaccaccagcaattcgattacattattaggatgatgaactgtacactgcaggactgttcctctctggaggaatacaatattgcggctgctctgctcccactcaccagcgcgttctataggaagctggctcccggcgtgagccagttcgcatacacctgtgtgcaggaccatccgatctggactaatcagcagttctgggagaccaccttttataacgctgtccaggaacaggtgcggtccttgtatttgtctgctaaggaagataatcatgccccccacctgaagcagaaggataagctcccagatgaccattatcaggaaaagacagccatggacctggctgccgagcaactacgcctttggccaactctgtctaagtccacacagcaggaactggtgcagcatgaggagagcacagtgttctctcaggcaatccattttgcaaacctgatggttaatttgctggtgccattggatacaagtaagaacaagctattacggacatcagctcccggggactgggagtccgggagcaatagcattgtgacaaactctattgcaggaagcgttgcggaaagctacgacaccgaatccggtttcgaagatagcgaaaataccgatattgcgaacagcgtggtgagattcattactagatttatcgataaggtttgcactgaatctggcgtgacgcaggatcatatcaagtcgctgcattgcatgatccccggaattgtggccatgcacattgagactctggaggcagtgcacagagagtccaggcgtttacctcccatccagaagccaaagattctgcggccggcgctcctcccgggggaagaaattgtatgcgagggcctgcgagtgctgctcgaccctgacgggagagaggaggctacgggggggctcttgggtgggccccaactcctacctgccgaaggagcactgtttctgactacctaccggatactgtttaggggcaccccccacgaccagttagtaggagagcaaaccgtagtgagatcctttccaatcgcctctatcaccaaagagaagaaaatcaccatgcaaaaccaacttcagcagaatatgcaggaaggacttcagattacaagtgcctccttccagttgatcaaagtggcgttcgatgaggaggtcagtcctgaggtcgtggaaattttcaaaaaacagctgatgaaatttcggtacccccaatctatcttctccactttcgccttcgcagcaggtcaaaccactcctcagattatactacccaagcagaaagaaaaaaataccagtttccgtacattttccaagactatcgtgaagggcgcaaaaagggccgggaaaatgacaatcggacgccagtatctactcaaaaagaagacagggacgattgtggaggaacgagtgaatcggcctggttggaacgaagatgatgatgtgtcagtatctgacgaatccgagctgcctacatctacaacccttaaggctagtgagaagtctaccatggagcaactcgtggaaaaggcctgcttccgtgactaccagagactgggtcttgggactatctccggcagttcttctagatcacggccagaatacttcagaataactgccagtaatcggatgtactccctttgtagatcctatccagggctgctggtagttccacaagctgtgcaggattcgagcttgcctcgagtggctagatgctaccgccacaaccgacttccagtcgtttgttggaaaaattcacgctcgggtaccttactattacggtccggaggttttcacggtaaaggtgtggtcggcctttttaagagtcagaattcaccacaggccgctcctacgtcatcccttgaaagcagtagctcaatcgagcaggagaaatatctgcaagcgttgctcaatgctgtcagcgtccaccaaaagctgcggggcaattcgacattgaccgtcaggcctgccttcgccctttctccaggagtctgggcttctctgaggagctcaacaagactcatcagctcacctacgtcctttatagatgtgggcgctcggctcgcagggaaagaccattcagcttcattcagcaactcaagctacttacagaaccaactgctgaaaaggcaggcagcattatatatatttggcgaaaagagccaactgcggaactttaaggtggagttcgctctgaactgtgagtttgtgcctgtcgagttccacgagattcgccaggtgaaggcatcctttaagaagctgatgcgcgcatgcatcccaagcacgatccccacagactctgaagtgacattcttgaaggcactcggggatagtgagtggttccctcaactccaccgcatcatgcaattggctgtggttgttagcgaggtgctggaaaacgggtcgtccgtgttagtgtgtctggaagagggctgggacataaccgcccaggtgactagcttagtgcagctgctgagcgacccattttacagaactctggagggatttcagatgctggtggagaaggagtggctcagttttggccataaatttagtcagcgctcaagcctcaccctcaactgccagggaagcggcttcgctccggtgtttttgcagtttctcgattgcgtgcaccaggtgcataaccagtatcccaccgagttcgaattcaatctgtactaccttaaattcctcgccttccactatgtgtcaaatcgattcaagacatttctgctcgacagcgactatgagcgcctggaacatggcactctcttcgatgataagggagaaaaacacgctaaaaagggcgtgtgtatctgggagtgtatcgaccggatgcataaaagatctcccattttctttaactatctctattcacccctcgaaattgaagccctaaaaccaaacgtgaatgtcagctcactcaagaagtgggattactacattgaggaaacgttgagcactggtccatcgtacgactggatgatgttgacacccaagcacttcccgtcggaggacagtgacctggccggcgaagcgggtcctagaagtcagagacggaccgtgtggccatgttacgatgacgtgtcgtgcacccagccggatgcattaacatctctgttttctgaaatcgagaagcttgagcacaagctgaaccaagcgcccgagaaatggcaacaattgtgggagcgggtaactgtggacttaaaggaagagcctcgaacagacaggtcccaaaggcatctgtcaagaagccccgggatcgtttccacaaacttacccagctatcaaaagaggtccttgctgcacctgccagattccagcatgggagaggaacagaactcatccatttcccctagcaacggggtcgagagacgcgccgccacactttacagccaatacacaagtaagaacgatgagaacagatcattcgagggtacattgtataagcgtggagccctcttaaaaggctggaagccgaggtggttcgtgctcgacgtgacgaaacatcagctccgctactacgacagtggtgaggacaccagttgcaaaggtcacattgacctcgcagaggtggagatggtaatcccggccggacccagtatgggggcccccaagcacacatccgataaagcgtttttcgatctgaaaacctcaaaaagagtttataacttctgtgcacaagacggccagagcgcccagcagtggatggataaaatccaaagctgtatcagcgacgcctag

SEQ ID NO: 204877 - DNA, 4791 bp, synthetic construct
  misc_feature 1..4791: note = Description of Artificial Sequence: Synthetic coding sequence
  source 1..4791: mol_type = other DNA
atggagagccgggagaccctgagcagcagccggcagcggggcggcgagtcagattttctgcccgtgtcatcagccaagcccccagctgctccaggctgcgcaggagagcctcttctcagcaccccaggtccaggcaagggcatcccagttgggggcgaacgcatggagcctgaggaggaagatgagctcggctcaggaagggacgtcgacagcaattcaaatgccgactccgagaaatgggtagccggggacggtttggaagaacaggaattcagcattaaggaggccaatttcactgaggggagcctgaaactgaaaatccagaccacaaagagagctaagaaacccccgaaaaatcttgagaactatatctgtcctccagagataaaaatcaccattaagcagtctggcgatcaaaaggtgtccagggccggaaagaatagcaaggccaccaaggaagaagaacggtctcactccaaaaaaaaactcctcaccgcaagcgaccttgctgctagtgacctgaaaggctttcagccccaggcctacgaaaggcctcaaaagcactccacactacattacgacacgggtctccctcaggatttcactggtgacaccctcaagcccaaacatcaacagaagtcctccagccaaaaccatatggactggagcacgaattcagactctggccccgtcacccagaactgttttatttccccggagtccgggagggagacggccagtacttccaaaattcccgctctcgagccggttgcaagcttcgctaaggcacaggggaagaagggatccgcaggcaatacatggtcccagcttagcaataacaacaaagatctgctcctggggggggttgccccctcaccttctagtcacagttcgccagctcctccctcaagttcagcggagtgcaacgggctgcagcctcttgtcgatcaagatggcggaggcaccaaggagccacctgagcctccaacagtaggttccaaaaagaagagttctaagaaggatgtgatttcccagaccattcccaaccccgatctggactgggttaagaacgctcagaaggcatttgataatacagagggcaaacgggaaggctatagtgctgatagtgctcaagaggcctcacccgcgaggcaaaatgtgagtagcgcttcaaaccctgaaaatgattccagccatgtgagaatcaccatcccaataaaggccccatccctggaccctactaaccacaagcggaagaaacggcagtcaatcaaagcggtggtggagaaaatcatgccggagaaggctttagcttcgggtataaccatgagctccgaggtggtcaaccggatcctttccaattctgaaggcaacaaaaaggacccacgcgtaccgaagcttagcaagatgatagaaaatgagtccccctccgtgggacttgagaccgggggcaacgctgagaaggtgattcccggcggcgttagtaaacctcggaaacctcctatggtgatgacccccccaacatgcaccgaccacagtccttctagaaagctgcccgagatacagcaccctaagttcgccgctaagcgccgctggacttgttcaaagccaaagccgagtacaatgttacgcgaagctgtgatggcgacctcagataagctcatgctggaacctccaagtgcttatccaatcactccttcttcccccctctacacgaacacagactctctaactgtcattaccccagtcaagaaaaagcggggtcgtcctaaaaagcagcctctgctgactgtcgagacaatccacgagggaacaagcaccagtcccgtcagccccatctctcgtgaatttccaggtacaaaaaagcggaagagacggcggaatctggcaaagctggcccaattagtccccggggaagataaacctatgtcagagatgaaatttcataaaaaagtggggaagcttggggtgcttgataaaaaaaccattaaaaccatcaataaaatgaagaccttgaaacgaaagaatattctgaatcagattctttcttgctccagctccgttgccctgaaggccaaagccccgcctgaaacttcacctggggcagcggccatcgagtcaaaactgggcaagcagatcaacgtatcgaagcggggcaccatttacatcggtaagaagagagggaggaagcctagggccgagctgccccctcccagcgaagagcccaaaactgccatcaaacacccgagacctgtgagttcacaaccagacgtgcccgctgtcccatccaattttcaaagcttggtcgcgagttcccctgctgctatgcatcctctaagcacacagcttggaggctcaaacggcaatctgtcaccagctagcacagagaccaatttttctgagctgaagaccatgcccaaccttcaacctattagcgctctgcccaccaagacacaaaaggggatccactcagggacatggaagttgagccctccgaggcttatggctaactcaccaagccacctctgtgagatcggttcccttaaggagattaccctctccccagtttccgaatcgcacagtgaggagactattccgtccgactccggcattggaacggataacaacagcaccagtgatcaggcagaaaaatcatcagagagtcgtaggcggtattcctttgacttttgctccctagacaatccggaagcgatacccagtgacacctctacaaaaaatcggcacggccatcggcaaaaacatttaattgtggataactttctcgctcacgaatcacttaaaaaacctaagcataagagaaagagaaagtcacttcagaaccgcgacgacttacagttcctcgcagatctcgaggagctgataaccaagttccaagtcttcaggatcagccatcgcagttacactttttatcacgaaaacccttatccatccattttccgaattaactttgaccactattaccctgtcccatacatccagtatgatcccctgctgtatctaaggcggacaagcgatttaaagagcaagaaaaagcgtggcagaccggcgaagacaaatgacacaatgactaaagtaccatttttacagggctttagttaccctattccatcaggcagctactatgccccttatgggatgccttacaccagtatgcccatgatgaatctaggctattatgggcaatatcccgcccctttgtatctgtcgcatactttgggggcagcctctccgtttatgcgccccacggtccccccaccacaattccacaccaattcacacgtcaagatgtccggagctgccaagcacaaagctaagcatggtgtgcacttacagggacctgtatccatgggactcggggacatgcaaccgtcattgaatcctcctaaggtgggctctgcatctctgtccagtggtcggctgcataagagaaagcacaaacacaagcacaaacacaaggaggaccgcatcctcggcacacacgacaacctttctggtctgtttgccggaaaggccacaggattcagctcccacatcttgtccgagagactgtcgagcgcggataaagagctccctttggtgtctgagaagaacaaacacaaggagaagcagaaacaccagcattccgaggccggccacaaggcctccaagaataattttgaagtggatactctgagcaccctgtctctgtccgacgcccagcactggacacaagccaaggagaagggcgacctctcaagcgaacccgtcgatagctgcactaaaagatattccggctctggtggagacggcgggtccaccaggtcggagaacctggatgtgttctccgagatgaaccccagtaacgacaagtgggactccgacgttagtggctctaagcggcgttcctatgagggatttggtacctaccgtgaaaaggatatccaggcattcaaaatgaataggaaggaaagatctagctacgattcaagcatgtcaccgggcatgccatccccgcatttaaaagtcgatcagaccgccgtgcatagcaaaaacgaaggctccgtgcccactatgatgacccggaaaaaacctgcagctgttgattctgtgacaatcccccctgcgccagtgctgagtttactcgcagcctccgctgccaccagtgacgcggtggggagttctttaaagaagaggtttaagcggagagagattgaggcaatccagtgcgaagtgaggaagatgtgcaattacacaaaaattctgtctacgaaaaagaatctcgatcatgtcaacaagattctgaaagccaagcgcctgcaacgccagtccaagaccggcaacaattttgtcaagaaacgccgtggacggcctcgtaagcagcccacccaattcgacgaggactcaagagaccagatgcctgtcctcgagaaatgtattgacctaccttctaaacgcgggcagaagccctcattgagtcctctcgttctggagcccgcagctagtcaggatacaatcatggccactattgaagccgttatacacatggctagagaagctcctcctctgcctcctccaccgcctcccccactgccgcctccacctcccccgccactgccgcccccacctccactccctaaaactccccgggggggcaaacgcaagcataaaccacaagcgcccgcccagcccccacagcaaagtccaccacagcagcctctgccccaagaggaggaagtcaaggcaaaaagacaacggaagagcagaggtagcgagtctgaggtgctgccatag

SEQ ID NO: 204878 - DNA, 729 bp, synthetic construct
  misc_feature 1..729: note = Description of Artificial Sequence: Synthetic coding sequence
  source 1..729: mol_type = other DNA
atggagagccgggagaccctgagcagcagccggcagcggggcggcgagagtgattttctccccgtgtcttctgcaaagccaccagcagcccccggttgtgccggagagccgctgttatcaacaccaggtccaggtaaaggaatcccagtgggtggggagaggatggagccagaggaggaagacgaattaggaagtggcagggacgtggattcaaactccaatgccgatagtgaaaaatgggtggcaggcgacggcctcgaggaacaagaattcagcattaaggaggcaaattttaccgagggatcccttaagctgaagatccaaacaacgaagcgcgcaaaaaagccgcctaagaacctggagaactacatatgtccacccgaaatcaagattacaattaaacagagcggagatcaaaaagtgtcacgcgccggcaagaattccaaagctacaaaggaggaagagcgctcccatagcaagaagaagctgctcactgcctcagacctggccgcatctgacttgaagggatttcagcctcagatcaaggatagcagcaaagaggaggtttggaagagacgaggaggccagggcatcccattcaagaagcagttcctgagtcaggagagggccatgtgtttctcctgtcctagaaacccctttcccgcgaaaccagggtcccttaccctgcctttccacagcgagccagcggtgtgggcccaggaagtatag

SEQ ID NO: 204879 - DNA, 414 bp, synthetic construct
  misc_feature 1..414: note = Description of Artificial Sequence: Synthetic coding sequence
  source 1..414: mol_type = other DNA
atggagagccgggagaccctgagcagcagccggcagcggggcggcgagagtgattttttacctgttagttcggcaaagccacccgccgctccaggatgtgctggggaacctcttctcagcaccccaggacctggaaaaggcataccagtaggcggcgagcggatggagccagaggaggaggatgaactgggatccggtagggatgtcgatagcaattcgaacgccgattccgagaagtgggtggcaggagatggcctcgaggagcaggaattctcaatcaaagaggccaattttacagaaggaagcttaaaattgaagattcagacgacaaagcgagccaagaagccccctaaaaatcttgaaaattacatttgccctcctgagattaaaatcactatcaagcagagtgggtag

SEQ ID NO: 204880 - DNA, 2055 bp, synthetic construct
  misc_feature 1..2055: note = Description of Artificial Sequence: Synthetic coding sequence
  source 1..2055: mol_type = other DNA
atgttcgccgaggccgccaagaccacccggccctgcggcatggccgaattcaaggagaaaccggaggcccccaccgagcagttagatgtagcttgtggccaggaaaacctgccagtgggagcttggccacccggcgcagccccggccccattccagtatacacctgatcacgttgttggaccaggcgctgatatcgaccctacccagatcacgtttcctggatgcatatgtgtaaaaaccccctgcttgcccggtacatgttcctgtcttagacatggtgagaactatgacgacaacagctgtctgcgggatattggatcaggcggtaagtatgccgagccagtctttgaatgtaatgttctttgtaggtgttctgaccactgtagaaacagggttgtgcagaagggcctgcagttccactttcaggttttcaaaacgcacaagaaaggctggggactgcgcactctcgaattcatacccaagggccgcttcgtttgtgagtacgccggcgaagtgcttggattctcggaagtgcagagaaggattcacctgcagacaaagagcgactcaaattatatcatcgccatccgcgagcacgtgtataatggtcaagtaatggaaacatttgtcgatccaacctatattggaaacatcggacgttttcttaaccatagttgtgagcctaatttgctgatgattcctgtgagaattgattccatggtccctaagctggccctcttcgccgccaaagacattgtgcctgaggaagagctctcatacgactatagcgggcgttatctgaatctgaccgtgagcgaagacaaggagcgccttgaccatgggaaactgcgtaagccttgttattgtggcgctaagtcatgtactgctttcctcccatttgacagcagcctatactgccccgtagagaagtctaatatcagctgcggcaacgagaaggagccatcaatgtgtggtagcgcccccagtgtgttccctagctgtaagagattgacactggagacgatgaaaatgatgttggacaagaaacaaatacgcgccatttttctcttcgagtttaaaatgggcaggaaggccgcagagacaaccaggaatattaataatgcctttgggccgggaacagctaatgagcgtaccgtccaatggtggttcaagaagttttgcaagggcgatgagtctttggaggacgaagagaggagtgggagacccagtgaagtggacaatgaccagctgagagcaataatcgaggctgatcccctgaccactacccgggaagtggctgaggaactgaacgtgaatcactctacagtcgtcaggcacctgaaacagatcgggaaagtgaaaaaactggataagtgggtccctcatgaactgaccgaaaaccagaagaaccggcgtttcgaagtaagttcgtctcttattctcaggaaccacaatgaaccgtttctagacagaatcgtcacatgtgacgagaaatggatcttgtatgataacaggagaaggtctgcgcagtggcttgatcaggaggaagccccaaaacattttccgaagcctatccttcatcctaagaaggtcatggtcaccatctggtggagtgctgcaggcctaatccactatagcttcttgaaccccggcgaaactatcacttcggagaagtacgcccaggagatcgacgaaatgaatcagaaactgcaacgactccaactagcactggtgaacaggaaaggaccgatcctgctgcacgacaatgctcggcctcatgtcgcccagccaacccttcagaaattgaatgaattaggatatgaggtgctgccgcaccctccatactctcctgatctcttgcccaccaactaccacgttttcaaacatcttaataatttccttcaagggaaaagatttcataatcagcaggatgctgagaacgccttccaggagtttgtcgagtcccagtccactgatttttacgccaccgggattaatcagctgatttctcggtggcaaaaatgcgtggactgtaatgggtcatactttgattag

SEQ ID NO: 204881 - DNA, 1098 bp, synthetic construct
  misc_feature 1..1098: note = Description of Artificial Sequence: Synthetic coding sequence
  source 1..1098: mol_type = other DNA
atgttcgccgaggccgccaagaccacccggccctgcggcatggccgaattcaaggagaagccagaggccccgacggagcagttggacgtggcctgcgggcaggagaacctgccagttggtgcttggccgccaggagccgcccctgcaccattccagtatacccctgaccacgtcgttgggcccggggctgacatcgatccaactcagattactttccctggctgcatttgtgtgaagacaccctgccttcccggaacctgcagctgcttgaggcacggtgagaattacgatgataatagttgtctgagagacattggttccggcggtaagtacgccgagcccgtattcgagtgtaatgtgctgtgccgctgcagtgaccattgccggaaccgagtggtgcagaaaggtctccagttccacttccaggtgttcaagacccacaaaaaggggtggggcctgcggaccctggagtttatcccaaagggacgattcgtgtgtgaatacgctggagaggtactcgggttttcagaagtgcaacgcaggattcatttgcagaccaagagtgactcaaactatatcatcgctatccgtgagcatgtgtataacgggcaggtgatggagacattcgtggatcctacatatatcggtaacatagggcggttcttgaaccactcatgcgagccaaatctgctgatgatcccggtgcgaatcgattccatggtgcccaaactcgccctgtttgccgccaaggacattgtgccagaagaggaactgagctatgattactcaggcagatacctgaacctgaccgttagcgaagacaaagaacgtttggaccacgggaaactgcgtaaaccctgctattgtggagcaaaatcctgcaccgcctttcttccattcgacagttccctctattgccctgtggagaaatcaaatatttcctgcggaaatgaaaaggagccaagcatgtgcggtagcgctccaagcgtctttccctcttgtaagcgccttactctggaggtctcattgttttcagacaaacaacttgcccctccatactccggcagacagtggctggcaagctttacctccgcctag

SEQ ID NO: 204882 - DNA, 516 bp, synthetic construct
  misc_feature 1..516: note = Description of Artificial Sequence: Synthetic coding sequence
  source 1..516: mol_type = other DNA
atgttcgccgaggccgccaagaccacccggccctgcggcatggccgaatttaaggaaaagcctgaggctcctaccgagcagcttgatgtggcctgcggacaggagaacctacccgtcggtgcgtggccacctggcgccgctccagcccctttccaatacaccccagaccacgtagtgggacctggcgcggacatcgacccaactcagataacatttccgggctgcatctgtgttaaaaccccatgccttcccggaacctgctcttgtctgcggcacggagaaaattatgatgacaattcctgtttgcgcgatatagggagcggcgggaaatacgccgagccagtgtttgaatgtaatgttctttgccgctgctctgatcactgtagaaaccgcgtggtacaaaaaggactccagttccattttcaggtgttcaagacccacaaaaaaggttggggcctgcggaccttggagttcattccaaaagggcgtaaggttgagcaccagctctggaagtag

SEQ ID NO: 204883 - DNA, 1101 bp, synthetic construct
  misc_feature 1..1101: note = Description of Artificial Sequence: Synthetic coding sequence
  source 1..1101: mol_type = other DNA
atggacagcgacgacgagatggtggaggaggccgtggagggccacctcgacgacgacggcctccctcacggcttctgtacagtgacatactccagcactgatcggttcgaaggaaactttgtgcatggcgagaagaacggcaggggcaaattcttttttttcgacggaagcacattggaagggtactatgtagacgatgctctgcagggacaaggcgtgtatacgtatgaggacggtggagtgctccagggaacttacgttgacggagagctgaatggacctgctcaggagtacgacaccgatggacgattgatttttaaaggccagtataaggacaatataaggcatggcgtctgctggatctattacccggatgggggaagtctagtgggagaagtaaacgaagacggcgaaatgaccggcgaaaagatcgcttatgtgtatcctgacgagcggaccgccctgtacggcaagtttattgacggggagatgatcgagggcaaactggccacactgatgagtaccgaggaaggacgcccacatttcgaattgatgcccggaaattctgtctatcacttcgacaagtcaacatcaagctgcatttccacaaacgcgctcctgccagacccctatgagtctgagcgggtgtacgtcgcggagtctctcatttcgtccgcgggtgaagggctgtttagcaaggtcgccgtggggcctaacaccgtgatgtcgttttataatggagtccgcatcactcaccaggaggtcgattctcgcgactgggccttaaatggaaacactttgtctttagatgaggagaccgtcatcgacgttcctgagccctataaccacgtctccaaatactgtgcttctctggggcacaaagcgaatcactccttcacccccaactgcatctacgatatgttcgtacacccccggttcgggcccatcaagtgcattcggacgctgcgcgccgtagaagccgacgaggaactgactgttgcgtatgggtatgatcactctccaccaggtaagagcggaccagaggcccctgaatggtaccaggtggagctgaaggcttttcaggccacacagcaaaaatag

SEQ ID NO: 204884 - DNA, 5124 bp, synthetic construct
  misc_feature 1..5124: note = Description of Artificial Sequence: Synthetic coding sequence
  source 1..5124: mol_type = other DNA
atggaccaggagggcggcggcgacggccagaaggcccccagcttccagtggagaaactataagctcatagtcgacccggctctggatcctgcgctgcgcaggccgagccagaaggtctatcggtacgacggggtccatttttcggtgaacgattctaagtacatccccgtggaggacctacaagaccccaggtgccacgtgcgctccaagaatagagatttcagtctgccagtacccaagttcaaattagacgaattctacatcggccaaatcccactcaaggaggtgacgtttgcccgcctgaacgacaacgtgagagagaccttcttaaaggatatgtgccggaaatacggtgaggtcgaggaagtagaaattctgctccacccaaggacacgcaagcatctgggtttggcccgagtgctattcacctccactagaggcgccaaggagaccgtaaagaacctccacctgacgagcgtcatgggaaacatcatacatgcacagcttgacatcaaaggccaacagagaatgaaatattacgaactgattgtcaatggctcttacaccccccaaacagtacctacaggaggcaaggcactttcggaaaaatttcaaggaagtggggctgcaacagagaccgcagagtcacgcaggcgcagcagtagtgacacggcggcttatccagcaggcacaaccgccgtggggacccctggaaacggaaccccgtgtagccaggacacctcattttctagttctagacaggacacacccagtagcttcggtcagttcacccctcagtcaagtcaaggaactccttataccagccggggttccacgccttattctcaggactcagcatactcttcaagtacaacgagtacttcctttaagccaaggcgctccgaaaatagttaccaagacgccttctccagaaggcatttctcagcttcaagcgccagcaccactgctagcaccgccattgcagccacgacggccgccacagcctcctcttcagcatcttcttcaagcctgagttcctcatccagtagcagcagctccagttcctcatcccagttccgcagcagtgatgcaaattacccagcctactatgaaagttggaatcggtatcaaagacacacatcatatccgcctcggcgtgcgacaagagaggagccacctggggcacctttcgcggagaataccgccgagagattccctccctcttatactagctatcttcctcccgagccaagcagaccaaccgatcaggactacagaccccccgcctcagaagctccaccacccgaacctccagagcctgggggaggaggcggcggcggtggtccatcaccggagcgtgaagaagtgcggacctcacctaggcccgcaagtcctgctcggagtggctcccctgcaccagagaccaccaatgagtccgtccccttcgctcagcatagctcactggacagccgcattgagatgctcctcaaggagcagaggtctaagttcagctttctcgccagtgataccgaggaggaggaagagaactccagcatggttctgggtgcccgtgacacaggaagtgaggtgccatccggctcaggccacggaccttgcacacctccccctgcccctgccaactttgaggatgttgctccaactggttccggggaacctggcgctacccgggagtctcctaaagccaatgggcagaatcaagcatccccttgtagcagtggagatgacatggaaatatctgacgatgaccggggtggctctcctcccccagccccgactcctccccagcaaccgccacccccccctccacctcctccaccgcctccaccatatctcgctagcctgcccctcggctatcctcctcaccagccggcctacctgctccctccccgtcccgacgggccccccccccccgaataccctccacccccaccgccccccccccatatttatgactttgttaattcactggagctgatggaccggctgggagctcagtggggaggtatgccaatgtcattccagatgcagacacagatgctgaccaggttgcatcaactcagacaggggaaaggactcatcgccgcatccgccgggccccctggaggagctttcggcgaagcttttctcccctttccgcccccccaggaagccgcctatgggctcccttatgccttatacgcccagggtcaggagggacgcggtgcctacagccgggaagcttatcatctccccatgcctatggctgctgaacctctgccctcatcctcagtgtccggggaagaggcccgtctgcctccccgggaagaggccgaactggctgaaggaaagactctgccaacggccgggacagttggtcgggtactcgccatgcttgtgcaagaaatgaagagcatcatgcagagagacctaaatcgaaaaatggtggagaatgttgctttcggggctttcgaccagtggtgggagagtaaggaggagaaagctaagccatttcaaaatgccgccaaacaacaggcgaaagaggaggacaaagagaaaacaaagctgaaggaacctggtctcctaagcctggttgactgggctaagtccggcggcactaccggtattgaagcattcgcgttcggctccgggcttagaggtgccctgcgactcccgtcgtttaaagtgaagagaaaggaacccagcgagattagcgaggccagcgaagagaaacggcctcgcccttctacccccgctgaggaggacgaagacgacccagagcaggagaaggaagcaggcgagcccggaaggcctggaaccaaacccccaaaacgagatgaagaacgcgggaagactcaggggaagcatcggaaatcatttgctctggattccgagggggaggaggcctctcaggagtcctcctcggagaaggatgaagaagatgatgaggaggatgaggaagacgaggacagggaggaagccgtggatactactaagaaagaaaccgaagtgagcgacggtgaagatgaggagtctgacagctcatccaaatgctctctatatgccgattcagacggagagaatgatagcacctccgacagcgagtcttcttcatcctcttcttccagttcatccagcagctctagcagtagctcatcttccagttcgtccagctccgagtcatccagcgaggacgaggaggaagaagagaggccagcagctctacccagtgcctccccaccgccgagggaagtgcccgttccaactcctgcccccgttgaggtccctgtgcctgagcgcgtggccgggagtcccgtgaccccgctccctgagcaagaggcttcaccagctcgcccagccggccccacggaggagtcgcctccgagtgcccccctacgcccgccagagccacctgccgggcctcctgccccagcaccccgccctgacgaacggccttccagccccatcccactgctcccccctccaaagaagaggagaaaaaccgtgagtttctccgcaatagaggtggtgccagccccggaaccgccccctgctactcccccccaggccaagtttcctgggcccgcctcacggaaagcccctcgaggagtggaacggaccattcgtaacctgcctctggaccacgctagcctggtgaagagctggcctgaggaagtgtctcgcggcggacggtccagagctggtggtcgcggaagacttactgaggaagaggaggccgaaccaggaaccgaagtggatctggcggtgctcgccgatttggccttgacccctgcccgaaggggccttcccgctctgccggccgtggaggattccgaggccacagagacgtcagacgaagcggaaagaccaaggcctttgctgtcacatatcctcttggaacataattatgcactggccgtgaaacccacccctcctgccccagctttgcgacctcctgagccagttccagctcctgctgcactgttttcctccccagccgatgaagtcctagaggcacccgaagtcgtcgtggctgaggcagaggagccaaagccccagcagctgcagcagcaacgcgaagagggagaggaggagggcgaagaggagggagaagaggaagaggaggagagtagtgattcctctagttcatccgacggagaaggcgcattaaggcggcgatcactgaggtctcacgcccggaggcggcggcccccgcccccccctccacctccacccccaagggcctacgaaccaaggtccgagttcgagcagatgacaatcctttatgacatttggaatagcggactggactccgaagacatgagttatcttcgtctcacttacgagcggctactccagcaaacaagcggggcggattggcttaacgacacccactgggtccaccacacaatcaccaatttaacgacacccaagcgcaagaggcgcccccaggacggcccgcgcgaacatcagacagggagcgccaggtccgagggttactaccccatatctaagaaagagaaggacaagtatctggacgtgtgtccggtgtcagcaaggcaactggagggggtggatacccaggggacaaatcgggtcctgtccgagcggcggagcgaacagcgacggctactgtcggccatcgggaccagtgccatcatggacagcgatctgctgaagctcaaccagctcaagttccgaaagaagaaactgcgcttcgggaggagccggattcacgagtggggccttttcgccatggagcccatcgcagcggatgagatggttattgagtacgtcggacagaacatcaggcagatggttgcggacatgcgggagaagcggtacgtgcaagaggggataggtagttcctatctgttccgcgtggatcacgatacaattatcgacgccacgaagtgcggaaacctcgctcgctttatcaaccactgttgcacgcctaactgttatgccaaggtgatcacgattgagtcacaaaagaaaattgtgatttattccaagcagccaattggcgtggacgaagaaattacttatgattataagtttcctctggaggataacaagatcccatgtctgtgcggaacagagtcttgtaggggatctttgaattag

SEQ ID NO: 204885 - DNA, 213 bp, synthetic construct
  misc_feature 1..213: note = Description of Artificial Sequence: Synthetic coding sequence
  source 1..213: mol_type = other DNA
atggaccaggagggcggcggcgacggccagaaggcccccagcttccagtggcgaaactacaagctcattgtagatcctgctctggatccggccttgcgcaggccctctcagaaagtttacaggtacgacggagtgcacttctccgttaacgatagcaaatacatacccgtggaggacctgcaagacccaaggtgccacgtccgctctaaatag

SEQ ID NO: 204886 - DNA, 744 bp, synthetic construct
  misc_feature 1..744: note = Description of Artificial Sequence: Synthetic coding sequence
  source 1..744: mol_type = other DNA
atggaccaggagggcggcggcgacggccagaaggcccccagcttccagtggcgtaattacaaactgattgtcgaccccgccctcgatcctgcactgcgaagaccttctcagaaggtatacagatatgacggcgtccatttttcagttaatgatagcaagtatatccccgtggaagacctgcaggatccccgatgccacgtgcggtctaaaaacagagacttcagcctacccgtgcccaagttcaaattagacgagttttacattgggcagataccgctgaaggaggtgaccttcgccagactgaacgacaatgtgagggaaacctttttaaaagacatgtgccgcaaatatggggaagttgaggaggtcgagattctcctccacccacggacccggaaacacctcggacttgcccgggttctgttcacatccacacgcggcgccaaagaaactgtgaaaaatttgcacttaacctcagttatgggtaacataatacatgcccagttggatattaaaggccaacagcgaatgaaatactacgaactgatcgtgaatggctcctacacgcctcagaccgtacctacaggcggtaaagcactctccgaaaaatttcagggttccggtgctgcaactgagacagccgaatctaggagacgcagttcatcagatacagccgcgtacccggcggggaccaccgcagtgggaactcccggaaacggaaccccctgttcccaagacacttag

SEQ ID NO: 204887 - DNA, 5772 bp, synthetic construct
  misc_feature 1..5772: note = Description of Artificial Sequence: Synthetic coding sequence
  source 1..5772: mol_type = other DNA
atggagaacagccaccccccccaccaccaccaccagcagcccccccctcagcccgggccttctggggaacgcaggaatcatcactggcgctcctacaagctgatgattgatcccgctctgaagaagggacaccacaagttgtatcgatacgacggccagcacttctctctcgccatgagctctaatagacccgtagaaattgtagaagacccccgcgtggtcggcatctggacaaagaacaaagaacttgaactcagcgtccctaaatttaaaatcgatgaattttacgtggggccagttccaccaaagcaggttacctttgctaagttaaatgacaacatccgggaaaactttctgcgagatatgtgtaagaaatacggggaggtggaagaagtcgagatcctatataaccctaagaccaagaaacacctcgggatcgctaaagtagtcttcgctacagtcagaggggctaaagatgccgttcagcatctgcacagcaccagcgtgatgggaaatattatccatgtggaattagacacgaagggcgagacgagaatgagattctacgagcttctcgtaactggtcgatatacacctcagaccttgcctgtgggcgaactggacgccgtctctcccatagtgaacgaaaccctccaactgagcgacgccctgaagcggctaaaggacggtgggctgtccgcgggctgcggcagcggatcatcttccgtcacacccaactctgggggcacaccattcagtcaggatacagcatactccagctgccgcctagacacacctaattcatatggccagggcacaccactcacgcctcggctggggacaccattttcacaagacagtagctatagtagtcgccagcccacgccctcatatttgttttcccaggatcccgccgtgaccttcaaggcacgaagacatgaatctaaatttactgacgcatacaaccgcagacacgaacaccattatgtgcacaactccccggccgtcacggcggtggccggagctacggctgcttttaggggcagctctgatcttcccttcggggccgtggggggcacgggcgggtcatctggtccccctttcaaggcccagccacaagacagtgccaccttcgcccacaccccccctccagcccaggctaccccagctcctggctttaaatcagcattcagcccgtaccaaacacccgtggcccacttccctccaccacccgaggagccgaccgccaccgcagcattcggggctcgggattctggtgagttcaggagagctccagcccccccaccattaccaccagctgagcccttagccaaagagaaacccgggacacctcccggaccgcctcctcccgatactaatagtatggagctgggagggaggccgacgtttggttggtcccccgagccctgcgatagccctggaacacccacgctggagagctcgccggccggcccggagaagccccatgactccttggattctcgaatcgagatgttgttaaaagagcaacgcaccaagctgctttttctgcgtgagcctgattcggatacagagttgcagatggagggaagccctatttccagctcttcctctcagctgtctcctttagcacctttcggaactaactcccagccagggtttcgcgggcccacacccccatcttcacggcccagctctaccgggctagaggacatctcccctacgccattaccggactccgatgaggatgaggagctggatctgggactgggccctagaccaccacccgaaccaggcccccccgaccccgccgggttgttgtcacaaaccgctgaggtggcgctggacttagttggcgacaggactccgacctccgaaaagatggacgagggtcagcagtcatccggcgaggacatggaaatctccgatgacgagatgccgtctgcgcctataacatccgctgactgccctaaacccatggtcgttaccccaggggctgcagctgtggcagccccttcagtgttagctccgacactccctctgcctcccccgccaggcttcccacctctcccccctccaccaccaccaccaccacctcaaccaggcttcccgatgcccccacccttaccgcctcccccaccgcctcccccaccagcccacccagcggtgactgttcctccaccgcccttgcccgccccacccggggtgccaccgccacctattttgcctccgctgcctccgtttcctccggggctgtttccagttatgcaggttgatatgtctcatgtactggggggccaatggggcgggatgccaatgagttttcagatgcagacccaggtgctcagcagactcatgaccggacaaggagcgtgcccctatccccctttcatggcagctgccgcagctgcagcctctgctggcttacagtttgtgaatctcccaccgtatagaggacctttttctctatcaaacagcggccctggacgcgggcagcattggccccccctgcccaaattcgaccccagtgtgccccctccaggatacatgccccggcaggaagatccacacaaggctacagttgatggtgtgctactggtcgtacttaaagagctaaaagcaattatgaagagagacttgaaccgcaaaatggtcgaggtggttgccttcagggcctttgatgagtggtgggacaaaaaagagcggatggcaaaggcctcactgaccccagtgaagtccggggagcacaaagatgaggacagaccaaagcccaaagatcgcatcgccagctgcctactggagagctggggtaagggagaagggttggggtacgagggcctgggtctcggcattgggttgcggggcgccatcagactgcccagctttaaggtgaaaagaaaggaaccacctgatacgacgtcgtccggcgatcaaaaacgcttgagacccagcacatcagtagacgaggaagacgaagagtccgagagagagagagaccgcgacatggctgatactccctgtgagctggccaagcgggatcctaagggagtgggagtgagacggagaccagcgcgacccctagaactggacagtggaggagaagaagatgaaaaagaaagtctgtccgaggagcaggaatccacagaagaagaggaagaggccgaagaggaggaggaagaagaagatgacgacgacgacgatagcgatgaccgagacgagtcagagaacgatgatgaggataccgccctctctgaagcttctgaaaaggatgagggggatagcgacgaggaggagacagtctctattgtgacatccaaggccgaagcaacctcttcttccgagtctagtgagagcagcgagttcgagagcagctctgagtctagcccttcctcttcagaggatgaggaggaggttgtggcccgcgaggaggaggaggaggaggaggaagaggagatggtagccgaggagagtatggcttctgccggacccgaagattttgaacaggacggcgaggaagcagctttggcccctggcgccccggccgtagattcccttggcatggaggaggaggtggacattgaaaccgaggccgtggccccagaggaaagaccaagtatgctggatgagccacctctccccgtgggggtcgaagagcccgccgattccagagagccgcccgaggagccaggtctgagccaggaaggcgcgatgctcctcagccccgagccccctgcgaaagaggttgaggctcgacctccactgagccctgagagggctcctgaacacgacctcgaagttgagcctgaaccccctatgatgcttcctctccccttgcaaccacctctaccaccacctagaccccccagacctcctagccctcctccagaaccggaaacaacggacgcttcccaccctagcgtccccccagaacctctcgccgaagatcacccaccgcacactcctgggctgtgcggatcgctggccaagagccagtccacagagacagtccccgctacgccgggcggcgagccacccctctctggaggctcatccggcctctctttgagctccccccaggtgccaggcagcccgttctcataccctgccccgagtcccagtcttagctcgggtggtttgcctcggacccctgggcgagacttctctttcacgccaaccttttccgagccatcgggacctctgctgctgcctgtatgccctctgcctacgggccgccgagacgagcgctctgggcctttagctagcccagttctgctcgagaccggcttgccactgccgctgccccttcccctacccctaccccttgccttgcccgctgtgctgcgcgcccaggccagagcccccacacccctgcccccactcctccccgcccctctcgcttcttgtccccctcccatgaagcgaaaacccggacgcccacgcaggagccctccatctatgctgtcactcgacggaccactggtgcggcctcctgccggtgctgctttaggcagggagttactgctacttccagggcaaccccagactcccgtctttccctctactcacgatcctcgtactgtcacactggatttcagaaacgcagggattcccgctcccccccctcccttacctccccagccacccccgcctcctcccccacccccagtggaacctacaaaattgccttttaaggaactcgataaccagtggcccagcgaggctatcccacccgggccccggggtcgcgacgaagttacagaagaatatatggaactggccaaaagcaggggcccttggaggagaccccctaagaagagacacgaggacctggtgcccccggccggatcaccggaactctccccgcctcagcctctgttcaggccacgcagtgagttcgaggagatgacaattctttatgatatatggaatggtgggattgatgaagaagatataaggttcctgtgtgtgacttacgaacgacttctgcagcaggataacggcatggactggctgaatgatacactgtgggtgtaccaccccagcacctcactgtcctctgccaagaagaagaaaagagacgacgggatccgggagcacgtaactgggtgcgcccgctcagaaggcttctacacaatcgataaaaaggataagttgcgctatttaaatagcagccgggcttcaacggacgagcctcctgccgacactcaaggcatgtccatacctgcccagccccacgcttctactcgagccgggtccgaacgaaggtccgagcagcggaggctgctttcctcgtttaccgggtcctgcgactcagatctgttgaagtttaaccagttgaagtttcggaaaaagaaactcaaattctgcaaaagccatattcatgactggggcttatttgctatggagccaatcgctgcggatgagatggtgatagagtatgtcgggcaaaacatccgacaagtcattgccgacatgcgagaaaaaaggtacgaggacgagggaatcggcagcagttatatgttcagagtggaccacgatactattattgatgccaccaagtgtggtaactttgctcgcttcattaaccattcgtgtaatcctaattgctatgccaaggtgataaccgtggagagccagaaaaagatagttatttattccaaacagcatattaatgtcaacgaggaaataacatacgactacaagtttccaatcgaggacgtaaagataccttgtctctgtggcagcgagaactgtcgcggtactctgaattag

SEQ ID NO: 204888 - DNA, 5772 bp, synthetic construct
  misc_feature 1..5772: note = Description of Artificial Sequence: Synthetic coding sequence
  source 1..5772: mol_type = other DNA
atggagaacagccaccccccccaccaccaccaccagcagccccccccacaacccggtccatctggagagaggagaaaccaccattggcggtcttacaagctgatgatcgaccctgctctgaaaaaagggcaccataagctatatcggtacgacggtcaacactttagtttggccatgtccagtaaccgtcccgttgaaatcgtggaggatcccagagtcgttggaatttggaccaaaaacaaggagttggagctttctgtgcctaaatttaagatcgacgaattttatgttggtcccgtacccccaaagcaggtgactttcgcgaagctgaacgataacatcagggaaaattttctgcgcgatatgtgcaaaaaatatggagaggttgaggaagttgagatcctgtacaacccgaagacaaagaaacatttaggaatcgcaaaagtggtgttcgccaccgttagaggcgcaaaagacgctgtgcagcatctgcactctacctcggtcatgggtaatatcatccacgtcgaactggataccaagggagaaaccagaatgaggttttatgaactgctggtgactgggagatacacaccccagacactgccagtgggtgaactggatgcggtatcgccaattgttaatgaaacactgcagttatccgacgcgctgaagcgcctaaaggacggcggactgtcggcaggatgtggatctgggagttctagcgtaacacccaactccggaggaactcccttctctcaagataccgcctattcaagctgtagactggacacgcccaacagctatggacaggggacccctctgacccccaggctcggtacaccttttagccaagatagctcatattcctcaaggcaaccgactccttcctacctattttcccaagaccctgccgtaacatttaaggcaagacggcacgaatctaagttcacagacgcatacaatcgccgccatgaacaccactatgttcacaattctcccgccgtgactgctgttgctggagcaaccgccgctttccgcgggagcagtgatcttccttttggcgccgtcggaggcactggagggagctccggcccacccttcaaagcccagcctcaggatagcgcgacattcgcccatacgcccccccctgcacaggcaacccccgcccccgggttcaaaagtgctttttctccctaccagacccccgtggcccattttccaccaccccccgaagagcccactgcaacagcggcgttcggtgcccgcgattcaggggaattccgacgggctccggcaccacctcctctgccgcccgctgagccacttgcaaaggaaaagccagggactcctccaggtcctcctccccctgataccaacagtatggaactcggaggcagacctacctttggctggtcaccggaaccttgtgactcccccggcacaccaactctggaaagctcgcccgccggcccagagaagccacatgacagtcttgatagcaggatcgaaatgctcttgaaagaacagcgcactaaattgctgttcttaagagagcccgattctgatacagaactgcagatggagggctcacccatttcctcatcctccagtcagctgtccccgctcgctccgttcggaactaattctcagcccggatttcgaggcccgacccccccatctagccgaccaagttccacaggtctcgaggacataagcccgacccccctcccggactcagacgaggacgaagagctcgaccttggtcttgggcccagaccaccccctgagccggggcccccagatcctgccggacttctgagtcaaaccgccgaagtagcacttgatttggtgggagaccgcaccccaacaagcgaaaagatggatgaagggcagcagtcctctggcgaggacatggaaatatcagatgacgaaatgccatccgctcccataacaagtgctgactgtccgaaacctatggtcgttactcccggcgccgccgcggtggcagcgcctagcgtgttggccccaactctcccccttcccccacctcccggctttccacccctgccacctcccccgccccctccccctccccagccgggattcccaatgccaccccccctacctcctccccccccccctccccctccggcccatcccgcagtgacagtgccaccacctcccttacctgcgcctccgggggtcccgccgccccccattttaccaccgctgccccctttccctcccgggttgtttcccgtcatgcaggtagacatgagtcacgtgttgggcggacagtggggaggaatgccgatgtccttccagatgcaaacgcaggttctgagtagactgatgacagggcagggagcttgcccgtacccaccattcatggcagcagcggcggccgccgcgtctgcaggcctccagttcgtgaatctgcctccctatcgcggaccttttagcttgagcaactccggtcctgggagggggcagcactggccacctctccccaagtttgacccttctgtgcccccacctggatacatgccccggcaagaagatccacacaaggctacagtcgatggcgtactgctcgttgtcttaaaggagctgaaggcgatcatgaagcgggatctgaaccggaagatggtggaggttgtcgccttccgagccttcgacgaatggtgggacaaaaaggagaggatggccaaagcatcccttacacctgtcaaaagcggagaacacaaggatgaggaccgacccaagcccaaggaccgcatcgctagttgtcttctggagtcttggggtaaaggtgaggggttaggatacgaagggttgggacttggcattggcctgcggggggctattcgccttcccagttttaaggtaaaaagaaaagaaccccccgacacaacaagctctggggatcagaagcggctgcgcccttcgacgagcgtcgatgaggaggacgaggaaagtgagcgggagcgtgaccgggacatggccgacacgccctgtgagctagccaagcgggatcccaaaggggtgggggtgagaaggagacccgctagacctctcgaactcgattccggcggggaagaggatgagaaagaaagcctctctgaggagcaggagtctaccgaggaggaagaggaggctgaagaagaagaggaggaggaagacgatgatgatgacgactcagacgacagggatgaaagcgaaaacgatgatgaggataccgcactgagcgaagcctctgagaaagacgaaggagacagcgacgaagaggagactgtgagtatagtcacatccaaggccgaggctacgtcctcctcagagtctagtgagagcagcgagttcgaatccagttcagaatcaagccccagctcatcggaggatgaggaggaggtggttgctagggaggaagaagaggaagaagaggaggaggagatggtggctgaagagtctatggccagcgccgggcctgaagattttgaacaggatggagaggaggccgcattggcacctggggctccggccgtcgacagcctgggaatggaagaagaagtggacatcgaaacagaggctgtggcgccagaggaaagaccctccatgcttgatgagccaccactgccggtgggagtggaggagcccgccgactccagggagccccctgaagaacctgggctctcacaggaaggcgcaatgctgctgagccctgagccaccagctaaggaagtggaagcccgtcctccactcagccccgagcgcgccccagagcacgatttagaggtggaaccagagccgccaatgatgcttccccttcccctccagcctcctctgccacctcctcgaccaccccgacctccatccccgcccccagaacctgagacaactgacgcttcgcatccctcagtgccaccggagccactggccgaggaccacccgcctcacacccccggcctttgtgggagcctcgctaaaagtcagtcaacggagaccgtgcctgccacaccaggcggcgagccacctctgtccggcggcagtagcgggctcagcttgtctagtccacaagttcctggctcccccttctcttaccccgccccctcaccctccctgtcatcaggcggtctgccccgaacgccagggagggatttctccttcacacctaccttcagcgaaccaagcggaccactgctcttgcccgtttgcccattgcccaccgggaggagagatgagcgcagcggtcccctggcttctccggtgctgctcgaaaccggactcccccttcctctacctctaccactgcctctcccactggctctgccagccgtactcagagcccaagcgcgcgccccaactcccttacccccactgctgccagcgcctctcgccagctgtcctccaccgatgaaacggaagcctggccgtccccgccggtcgcccccaagcatgctgagtctggacggcccgctggtgcgccccccggccggtgccgccttgggccgggaattgctgctcctgcctggccagccccagaccccagtgtttcctagcacgcacgaccctcgaaccgtgacactagatttccgcaatgccgggattccagccccccccccaccgctccctccacagcctccaccacccccaccgccgccccctgtagaacccacgaagctgccttttaaggagttggacaatcagtggccttcagaggctatccctcccggacccaggggccgggatgaggtgaccgaagaatacatggaactcgccaagagccgtggaccttggcgccggcctcccaagaagcgccacgaggacctagttccacctgcagggtcacccgagctcagccctcctcagcccttattccgccctaggtctgagtttgaggaaatgactatcctgtacgacatctggaatgggggcattgacgaggaggacataagattcctctgcgtaacgtatgaaagactccttcagcaggacaacggcatggactggctgaatgacaccttgtgggtgtatcacccttcaacatcactgtcttcagctaaaaagaagaagcgagacgacgggattagggagcatgtgacagggtgcgcgagatctgaaggtttctatacaatcgataaaaaagataaactaagatacctcaacagttcccgcgccagcaccgacgaaccccctgctgacactcagggtatgtcaatcccagctcagccccacgcgagcacccgcgccggctcagaacggagatcagagcagcgccgactcctctcctccttcaccgggagctgcgattctgacttgcttaaatttaaccagctaaaatttaggaagaaaaaactgaagttttgtaagtctcacattcatgattgggggttgttcgccatggagcccatcgcggcggatgagatggtaatcgaatatgtggggcagaacatcaggcaagttatcgccgacatgcgggagaagagatacgaggatgagggcataggtagctcttacatgtttcgggtggaccatgacacgatcattgacgctacgaagtgtgggaacttcgccaggtttataaaccactcctgcaacccaaattgctatgctaaagttatcacagttgagagccagaaaaaaattgtcatttactctaaacagcacattaatgtgaacgaggaaataacatacgattataaatttcccattgaggacgttaaaataccctgcttgtgcggctcagagaactgtaggggcacgttgaattag

SEQ ID NO: 204889 - DNA, 7695 bp, synthetic construct
  misc_feature 1..7695: note = Description of Artificial Sequence: Synthetic coding sequence
  source 1..7695: mol_type = other DNA
atgaagcagctgcagccccagcccccccccaagatgggcgacttctacgaccctgaacatccgacccctgaggaggaagagaatgaggccaagatcgagaatgtgcaaaagactgggttcataaaaggccccatgtttaagggcgtcgcaagcagtcggtttctgcccaagggaactaagaccaaggttaatctggaggaacagggcagacagaaggtttctttttcattcagcttgaccaagaaaacgctgcagaataggttcttgactgccctgggcaatgagaagcagtccgacacaccaaatccccccgccgtgccactgcaggtcgactcaactcccaaaatgaagatggagatcggcgacactctgagcacagcagaggagagctctcctcccaagtcccgcgtggaactcggaaagatccacttcaagaagcacctcctgcatgtaacctcgcgaccactactagccacaacgaccgctgtcgccagcccccccacacatgctgctcccctccctgctgtgatcgccgagtccaccacagtggattcccccccttcaagccctcctccgcccccacctcccgcccaggccaccacactgtcctctcccgccccagttactgagccagtagctctccctcacacacctatcacggtcttgatggcggctcctgtgcctttgccagtcgatgtcgctgtccgtagcctcaaggaacctcctattattattgtaccagagtcgctggaggcagacacgaaacaagatacaatcagcaattccctggaggagcatgtgacgcagatattgaatgagcaggctgacatctccagtaaaaaagaggactctcatatcggaaaggacgaggaaatccccgattcttcaaaaatcagcctgtcctgtaagaagacagggtcaaagaagaagagctctcaaagcgagggcatttttttggggtcggaatctgatgaggacagcgttcggacctcctcctcgcagaggtcacatgacctgaaatttagcgcctctatagagaaggagagagattttaaaaagtcttctgcaccgttaaagtccgaggacttagggaagcctagtagatccaaaactgatcgcgatgataagtatttcagctacagcaaactggagagggatacacggtatgtttcctccaggtgtcgatctgagcgagaacggcgcagatctcgctcacatagtcgctctgaaagaggtagtcgaacaaacctcagctatagtcgcagtgaaagaagtcattactacgattctgaccgccggtaccatagatcctctccttacagagaaagaaccaggtactcgaggccctatactgacaatagggcgcgtgagtcctcagactccgaggaggagtacaagaaaacttacagcagacgaacgtctagccactcctctagctaccgggatctgaggactagctcttacagcaagagtgatagggattgtaagacagaaacgtcatacctggaaatggagaggagaggaaaatactctagcaaattggagagagaatcaaaacgcacatccgaaaacgaagcaattaagcggtgctgcagccccccaaacgaactgggctttcggcgggggtccagctactccaagcacgattctagtgcctctaggtataaatccacattgtccaagcccattcccaaatcagataaattcaagaattcgttttgctgtacagaactgaacgaggaaatcaagcaaagtcattcatttagtctgcagacaccatgctccaaaggaagcgaactccgaatgataaataagaatcccgaaagggagaaggctggcagcccggccccctcgaatcgtctcaatgacagccccacccttaaaaagctggatgagctgcccatcttcaaaagtgagttcataactcatgactcacatgattcaattaaagagttggacagcttgagcaaggtgaagaatgaccagctgaggagcttttgtcccattgaacttaacataaatgggtcccccggcgccgaaagtgatctcgctaccttctgcacatccaagactgacgccgtgctcatgacatctgacgacagcgtcaccgggtcggaactgtcacctctggtaaaagcttgcatgctgtcctcaaatggatttcagaatatcagtcgctgtaaagagaaagacctagacgatacttgtatgttgcataagaagtccgagtcaccgttccgtgagactgaaccccttgtgtcgccccaccaggacaagttgatgtctatgcccgtgatgactgtagattattcaaagaccgttgtaaaagaacccgtggatacacgcgtgtcatgttgtaagacaaaggactccgacatttactgtaccctgaatgattcgaatccatcattgtgtaacagcgaggcggagaatatagaaccctcagtgatgaaaattagcagcaattcctttatgaacgtgcacttggagagtaaacctgtgatttgcgactctagaaacctgaccgaccattccaagttcgcctgcgaagaatataagcagagtattggctctacctcatccgcttctgtgaaccatttcgacgatctgtatcagccaattggtagctctgggatcgcctcgagcctacagtctttgcctcccgggatcaaggtggactctctgacgctgctgaagtgtggcgagaacacatctcctgttcttgatgctgtactgaagtctaaaaagagtagcgagtttctcaagcatgccgggaaagagaccattgtcgaggtgggttcagatctgcctgattcagggaagggatttgcttcccgggaaaacagacggaacaacgggctgagcggcaaatgtttgcaggaggctcaggaagaaggcaacagcattctacccgagaggcgggggaggcccgaaatcagtcttgacgagcggggcgagggtggacacgtgcatacatcagatgacagcgaggtggtgtttagttcttgcgacctcaacttaaccatggaagatagcgacggcgtgacctatgccttaaagtgtgacagttccggacacgcgcccgaaatcgtgagcacagtgcacgaggactactctggcagcagcgagtctagcaatgatgaaagcgattccgaagacaccgactcagatgatagctccattccccgtaacaggctccaatctgtggtagttgttcctaagaatagcaccttgcccatggaagagactagtccatgtagtagtcgctcaagccaatcctacaggcattacagcgatcactgggaggatgagcgcctagaatcgcgcaggcacctgtacgaagaaaaatttgaatctattgccagtaaagcttgccctcagactgataaattctttcttcacaaaggtactgagaaaaatccagagatctcatttacacagtctagccgaaaacagattgacaaccggctacccgaattgagtcaccctcagtccgatggcgttgactccaccagtcataccgatgtgaaaagtgacccactcggacatcccaactccgaggagacagtgaaggctaaaatccccagcaggcagcaagaagaattaccgatttacagctcggattttgaggacgttcccaataagtcctggcagcaaactaccttccagaatagaccggactcccggctgggtaagaccgagctaagttttagtagctcctgtgagattccccatgtcgatgggctgcatagctccgaggagctgaggaacctgggatgggatttttcacaggagaagccatctaccacctaccaacagccggactcttcctatggcgcgtgtggtggacacaaatatcagcaaaatgcagagcagtatgggggcaccagagactactggcaaggaaatgggtactgggatcctcgttctgggagacccccagggacaggagtggtgtatgacaggactcagggccaagtcccggacagtctgaccgacgatcgggaggaggaagaaaactgggatcagcaggacggaagccatttctccgaccagtcagacaagttcttgctttccctccagaaggataaaggttccgtccaagcacctgagataagcagtaatagtatcaaagacacattggccgtgaatgaaaaaaaggatttctccaaaaatcttgagaagaacgacatcaaggatagaggccctctgaaaaagcgtcggcaagaaatagaaagtgattctgagtccgatggagagctccaggaccggaagaaggtgcgggtggaagtggaacagggggagacttcagtacctcctgggagtgctttggtaggtccaagctgcgtcatggatgactttcgtgatccccaacgctggaaggagtgcgccaagcagggaaagatgccttgttacttcgacttaatagaagaaaatgtctatctgacagagcgaaagaaaaataaatcacacagggatatcaaacgcatgcagtgtgagtgcactcccctatctaaagacgagcgggcccaaggagaaattgcctgtggagaagattgtctcaataggctcttgatgatcgaatgtagcagcagatgcccaaacggagattactgctccaatcgtagatttcaaaggaaacagcatgctgacgttgaagtgattctaactgaaaagaagggatgggggctgagggctgccaaagatttgccttccaatacttttgttctggaatactgcggagaggttctggaccataaggagtttaaagccagagttaaagagtacgctagaaacaagaatattcactattactttatggcgctgaagaatgacgagataattgacgctacacagaagggaaattgttctagattcatgaatcatagctgtgaacccaattgtgaaacccagaagtggaccgtcaacggacaactgcgggtcggcttctttacaactaaactggtgccgtctggttccgagctgacttttgattaccagtttcagcggtatggaaaagaagcgcagaagtgtttttgcggatccgcaaactgccgcggatacctgggcggagagaatcgcgtctctattcgtgcagctggcggtaagatgaaaaaggaacgtagtcgcaaaaaggactcagtagacggcgaactggaggcccttatggagaatggagaagggctatccgacaagaaccaggtactgagtctctctaggctgatggttcgaatcgagactctggagcaaaagctgacctgcctcgaactgattcaaaatacccacagtcagtcatgtttaaaatctttcctggaacggcatggattgtccctgttgtggatctggatggcggagttaggcgacggcagagaatcaaaccagaagttacaagaggagattatcaagactcttgaacacttgcctatccccacaaaaaacatgctggaggagtccaaggtgctgcccattatccagagatggagccagacgaagaccgccgttccaccgctgagcgaaggggatggctactcatcagagaatacctcccgggcccacacacccctcaatacacctgatccctccaccaagctgagcacggaggcggacacagacacacccaaaaaactgatgttccgtcgcttgaagataatatccgagaacagcatggacagtgccatttcagacgccaccagcgaactggagggcaaagatggaaaggaagacctggaccagctggagaatgtgcctgtcgaagaagaggaagagcttcagagccagcagctgctgccacagcagctacctgagtgcaaggtcgatagcgagacaaatatcgaggcttccaagctccccacatcggagcccgaggcggacgccgagatagagcctaaggaatctaatgggacgaagctggaagagcctatcaacgaggagacaccaagccaggacgaggaggaaggcgtttcggacgttgagagcgagagaagtcaggagcaaccagacaagaccgtggacataagcgacctcgctaccaagttactcgactcctggaaagatctcaaggaggtctacagaattccaaaaaagtcgcagacagagaaggaaaacacaaccacagagcgagggagagatgccgtcggcttccgcgatcaaactccagcaccaaagacccctaaccggtcacgggagcgggatcccgataagcagacccaaaacaaggaaaagcgaaagcgtcgctcctcgctcagtccaccaagctccgcatacgagagggggaccaagcgccctgatgaccggtacgatacaccaacttccaagaaaaaggttaggataaaagaccggaataagctgagtacagaagaacggaggaagctgtttgaacaggaagttgctcagagagaagcacagaaacagcagcagcagatgcagaacctaggcatgaccagccctttgccctacgattcacttgggtataacgcccctcatcacccatttgcagggtatcctcccgggtatcctatgcaggcatatgtcgaccctagcaatcctaatgccggtaaggtgcttctgcccaccccatcaatggatccggtatgttcacctgctccctatgaccacgcccagcccctcgttggtcacagtacggaacccctatcagctcccccccctgtacctgtggttccccacgtggccgctcctgttgaagtgtcatcatcgcagtacgtagcccagtctgatggcgtggttcaccaagatagcagtgtggccgtactgccagttcccgcacctggtccagttcaggggcagaattactccgtctgggactcaaatcagcaatctgtatctgtgcaacagcagtacagcccggcccaatcccaagccaccatatactatcaggggcagacctgccccacagtgtatggcgtgactagcccctacagccaaaccaccccaccaattgtgcagagttacgctcaaccaagtctgcagtatattcaggggcaacaaatcttcacggcccacccacagggtgtggttgtacagcccgcggcggctgtcaccacaatcgtggcccccggtcagcctcaacctctgcagccgtccgaaatggtggtcaccaataaccttttggacctgccccccccatcgcctcccaaacccaagaccattgtgttacctcccaactggaaaactgccagagatcctgagggtaagatatattactatcatgtaatcactcggcagacccagtgggatccccccacgtgggaatcccccggcgatgatgcctctttggaacacgaggccgagatggacctcggaacacctacgtacgatgagaacccaatgaaggcctccaagaaaccgaagacggccgaagctgatacgagctcggagttagctaaaaagagtaaagaggttttccggaaagaaatgtcccagtttatcgtacagtgtcttaatccatatagaaagccagactgcaaagtcggaaggattaccaccacagaagactttaaacatctagcgcggaagctgactcacggagtcatgaacaaggaactgaagtattgcaaaaatcccgaggacctcgaatgtaacgagaatgtcaagcacaaaacgaaggaatatatcaagaagtatatgcaaaagtttggggcggtgtataagcctaaagaggataccgaactggagtag

SEQ ID NO: 204890 - DNA, 7695 bp, synthetic construct
  misc_feature 1..7695: note = Description of Artificial Sequence: Synthetic coding sequence
  source 1..7695: mol_type = other DNA
atgaagcagctgcagccccagcccccccccaagatgggcgacttctacgaccccgagcaccctaccccggaagaacaggaaccagaggctaagatagaaaacgttcaaaagaccgggttcatcaaaggaccaatgtttaagggggtcgcctctagcagattcctgccaaagggcaccaaaaccaaagttaatttagaggagcagggcagacagaaagtctcattctcctttagtttgaccaaaaagaccctccagaatcgcttcctgaccgcgttagggaacgaaaaacagagcgatactccaaaccccccagctgtgccattgcaagttgattctacccccaaaatgaagatggagataggagatacactgagcaccgcagaagagagctccccgccaaagagcagagtcgaacttgggaagatccacttcaagaagcatctcctgcacgtcacgtcaaggccactcctcgcgactactacagccgtggctagtccccctacccatgctgcacctttgcctgctgtgatcgccgaatcaacaactgttgactctcctcccagtagcccacctccccctccgccccccgctcaagcgactactttgagcagcccagcccccgtgactgaaccagtggccctgcctcacactcccattactgtgcttatggccgcacctgtgcccttaccagtggacgtggccgttcggtcactaaaggaacctccgatcatcatcgtccccgagtccttagaggccgatacaaagcaggacacaatctcgaattctcttgaggagcatgtcacccagatcctgaacgaacaggccgatatctcctccaagaaagaagattcccacatcggaaaagacgaagagattcccgacagctctaagatatcgctgagctgcaaaaaaactgggagcaagaaaaagtcttcccagtctgagggcatctttctgggttccgagtccgatgaggattccgtacgtacatcctcatcacagagatctcacgaccttaagtttagtgccagcatagaaaaagagcgagattttaagaagagctccgcccctttaaaaagtgaggatctcggaaaaccaagtcgttctaaaacagatcgagatgacaaatacttttcttactcaaaactggaaagagatacacgctatgtgtcaagtcgttgccggagtgagagggagagaaggagatcccgctctcacagcagaagcgaacgaggatctcggaccaacctgagctacagcaggagtgagagatcacattactacgatagcgacagaagatatcacaggtcatccccttacagagagcgtactcgctattcaaggccttacactgataacagagctagagagtcctctgactccgaagaggaatacaaaaagacttactccagacgtactagtagccatagcagtagttatcgagacctaagaacatcatcttatagcaaatccgatcgggactgcaaaaccgagacaagctacctagaaatggagaggcgtggcaagtattccagcaagctggagcgtgaaagcaagagaaccagtgaaaatgaagccatcaaaagatgctgctctccgcctaacgaactgggcttccgacgtgggtctagctacagcaagcatgactcatcagcttccagatataagagcacactctccaaaccaatccccaagtccgacaaattcaaaaattctttctgttgcactgagctgaacgaggagattaaacagagccatagcttcagtctccagactccttgctcgaaggggtctgagctgcggatgatcaataaaaatcctgagcgtgagaaagctgggtctcctgcccccagcaatcggttgaacgacagccctaccctgaagaagctggatgaactccccatcttcaaatcagaattcataactcatgacagccatgactctataaaggagttagactccctgtctaaagtgaagaacgaccagttgcggtcattctgtcccatcgagctgaatatcaatggaagtcctggcgccgagagcgacctagccacattctgtaccagcaaaactgatgcagtgctgatgaccagcgacgattctgtcacggggtccgaacttagtcccttagtaaaggcatgcatgctttctagcaacggctttcagaatatctctcgttgtaaagaaaaggatttggatgacacttgtatgctacacaaaaaaagtgaaagccccttcagagaaaccgagcctttggtgtctcctcatcaggacaaactgatgagtatgcctgtgatgactgtggactattcaaagactgtcgtgaaggagcctgtcgacacccgtgtgagttgctgcaagacgaaggattccgacatctattgtacgctgaatgacagcaatccctccttgtgcaattccgaagctgaaaacattgagccatccgtgatgaagatctcctccaacagtttcatgaacgtgcacctcgagtccaagccagtgatctgcgatagcaggaatctaacagatcactctaaatttgcttgcgaggagtacaaacaatcaataggcagtacaagctcagcttccgttaatcattttgatgacctgtatcagcccatcggctcaagtggcattgcaagctctctccagtcactgccaccaggaatcaaagtggattccctcactctcctgaaatgtggagaaaacacgagccccgttctggacgctgtcctgaaatccaaaaagtcttcagaatttctcaagcatgcaggcaaagagaccatcgttgaagtgggatctgatctgccagattcaggtaaaggctttgctagccgcgagaataggcgtaacaatggtctgtccgggaagtgcctgcaggaggcgcaagaggagggcaacagcatacttccagaacgcaggggaaggccagagatttccctcgacgagcgaggggagggcggtcatgtacatacctcagacgactcggaggtggtgttttccagctgtgacctgaacctgactatggaagactctgatggagtcacatacgctctgaagtgcgatagctcagggcacgcacccgaaattgtgagtaccgtccatgaggattattctggatcttccgagtcctccaatgacgagagtgattctgaggacaccgacagcgatgactcaagtatcccaaggaaccgtctgcagtcggtggtagtggtcccaaaaaactccacactgcctatggaggaaacctcaccgtgttcttcacgctcatctcaatcatatcgccactattccgaccattgggaagacgagcgcctggagtccaggcggcatctttacgaagaaaagttcgagtcaatagcctcgaaagcctgtccccagacagataaattcttcctgcataagggtacagaaaaaaatcccgagattagctttacgcagtccagtcggaagcagattgacaacaggctgcccgagctgagtcatccgcagtctgacggcgttgacagtacatctcacacagacgttaagtcagaccccctgggccaccctaatagcgaagaaacagtaaaggctaagataccctcgcgacagcaggaggagctgcctatttacagtagcgattttgaggatgtcccaaataaatcttggcagcagacaacatttcagaaccgaccggacagccggttgggaaaaactgaattaagcttcagctcttcctgtgagatcccccacgtcgacggcctgcatagctccgaggagctgaggaacctggggtgggatttttctcaggaaaagccgagcaccacctatcaacagcccgattcttcatatggtgcctgcggaggacataagtaccagcagaacgccgagcagtacggagggactcgcgactattggcagggaaacggttactgggatcctagatcaggccgtcctccgggaaccggagtggtgtacgatcggacgcaaggacaggtacctgattcactcactgatgaccgcgaagaagaagagaattgggaccagcaagatggaagtcacttctcggaccagtccgataaattcttgctgagcctgcaaaaagacaaggggtctgtccaggcccctgaaattagctccaactcaattaaagatactctggcagtgaatgaaaagaaggatttttctaaaaacctggagaagaacgacattaaggacagggggccacttaagaagaggaggcaggagattgaatccgatagcgagagcgatggcgagctacaggatcgtaaaaaggtccgggtcgaagttgagcagggtgagacttccgtgccccctggatcagccctcgtggggccttcctgcgtaatggatgactttcgagacccacagcgctggaaagagtgcgccaagcaggggaaaatgccatgctatttcgaccttatagaagagaatgtttatctgacagagaggaaaaaaaacaagagccatcgggatattaaacggatgcagtgtgagtgcactccacttagcaaagatgagcgcgcccagggagaaatcgcctgcggcgaagactgcctgaaccggctcctgatgatagaatgttcgagcagatgcccgaatggcgactactgctcaaacagaagattccaacggaagcaacacgctgacgtggaagtcattcttacagaaaagaaagggtggggtctccgagcagccaaggatcttccgtccaacaccttcgtgctcgaatattgtggagaggtattagaccacaaggagttcaaggcccgagtaaaagagtacgcacgaaataaaaatattcattattactttatggccctgaagaatgacgaaataatcgatgctactcagaaaggaaactgctcccgtttcatgaatcatagttgtgaacccaactgcgagactcagaaatggactgtgaacgggcaactgagagttggtttttttaccaccaaactggtgccttccgggtcagagttgacctttgactaccagttccaacgctatggcaaggaagctcagaagtgtttttgcggcagtgccaattgccgtggatatctgggcggagaaaaccgggtctcaattcgcgccgcaggggggaagatgaaaaaggaacggtcacggaagaaagactctgtcgatggagagctcgaagcgctgatggagaatggagaaggcttgtccgacaagaatcaagttctttccctgagtagactgatggtgagaatagagacccttgagcaaaagctcacctgtttagaactgattcaaaatactcattctcagagctgccttaaaagttttctggaaagacacggactgtccctgctctggatctggatggctgaactgggcgacgggagggagagcaatcagaaattgcaggaggaaatcataaagactctagaacacctgcccattcccactaagaacatgttagaagagtcaaaggttcttcctatcattcaacggtggagccagaccaagactgctgttcctccactcagcgagggtgatgggtacagttccgagaacacttcccgtgcacacactccattgaacacccctgacccgtctacgaaactctctacggaagccgacaccgacacccctaagaaactgatgttcaggcggttaaagattatctctgagaactcaatggattccgcaatatctgatgctacgtcagaactagaaggaaaggacgggaaagaggatctagatcagctcgaaaacgtaccagtcgaagaggaagaagagttgcagagccaacagctactgccccaacagctgcctgaatgtaaggttgacagcgaaacaaacatagaggcctcaaagttacctacttctgaaccggaggctgacgctgagatagaaccgaaggagtcaaatggcacaaaattggaggagcccattaacgaagaaacaccctcccaggacgaggaggaaggtgtgagcgacgttgagtctgaacgaagccaggagcagcccgataaaaccgtcgatatttccgacctggctactaagctactggattcatggaaggacctgaaagaagtgtaccggattccaaaaaagtcccaaaccgagaaggagaatacaaccaccgaaagaggcagagacgcagtggggtttcgggatcaaaccccagcaccaaaaacaccaaatcgctcacgagaacgtgacccagacaagcagacccagaataaagagaagcgcaagagaaggagctcactgtcccccccctccagtgcctacgaacggggaacaaaaaggcccgacgacagatacgatactcccacctctaagaaaaaggtacgcatcaaagacagaaacaaactttctaccgaagagaggaggaagttgttcgagcaggaagtcgcccagagggaggctcagaagcagcagcagcagatgcagaatttgggcatgacaagccctctaccatacgattctcttggctacaacgcccctcaccatccgttcgcaggataccccccaggttaccctatgcaggcctatgtcgacccttcaaacccaaatgccggaaaggtgctgttaccaactccatccatggacccagtctgttccccagcgccctatgatcacgcccagccattagtggggcactccactgaacccctctccgctccaccgcctgttccggtggtgccacacgttgctgctccggtcgaagtgagttcgagtcagtatgtggcccaatccgacggcgtggtgcatcaagactcttctgtggcagtcctgcccgtccccgccccgggacctgtgcaaggacagaattacagcgtgtgggacagtaatcagcagtccgtaagcgtccaacagcagtactctccagcgcagtctcaagccaccatctattatcaagggcaaacatgcccaacagtatacggcgtcactagcccatatagtcaaaccacgccccccatcgtgcagagctatgcgcagccatccctgcagtatatccaagggcagcaaatctttactgcacaccctcagggcgtggtggtgcagccagccgcggctgtgacaacgattgtggcgccaggccagccacagccactccagccaagtgagatggtagtgaccaataacttgctggacttgcctcctccatctccaccaaagcccaaaacaatagtgctgcctcctaactggaaaaccgcaagagatcctgagggcaaaatctactattatcacgtcatcactcgtcagacacagtgggatccacccacctgggagtccccaggcgacgatgccagtcttgagcacgaagcggaaatggatttgggaaccccaacctacgatgagaacccaatgaaggccagtaaaaagcctaaaactgcggaggctgatacttctagcgagctggccaaaaaatctaaggaggtgtttcggaaggagatgtcccagttcatagttcagtgtctaaacccttaccggaagcccgactgtaaagtgggcagaatcacaactacagaggacttcaagcacttggctcgaaagctcacgcatggggtcatgaacaaggaattaaaatattgtaaaaacccagaggacctggaatgtaacgaaaacgtgaaacataagactaaagaatacattaagaagtatatgcaaaaattcggcgccgtttacaaacctaaagaggatacggaactggaatag

SEQ ID NO: 204891 - DNA, 5145 bp, synthetic construct
  misc_feature 1..5145: note = Description of Artificial Sequence: Synthetic coding sequence
  source 1..5145: mol_type = other DNA
atgaagcagctgcagccccagcccccccccaagatgggcgacttctacgaccccgaacatccaacacccgagaaaaaggaacgggaggccaaaattgaaaatgttcagaagaccggcttcatcaagggtccaatgttcaagggagtggcatcaagccgcttcctgccgaagggtaccaagactaaggttaatctcgaggaacagggccgccaaaaggtttccttcagtttctcactgacgaaaaaaacccttcagaatagattcctgactgccctcggcaacgagaagcagagcgatacccccaatcctcccgctgttcccttacaagtggatagtacaccgaagatgaagatggagatcggggacacactgagcacagctgaggaatctagtcctcctaaaagcagggtggagcttgggaaaatacacttcaaaaaacacctgctgcacgtgacatcgcgtcctctgctggctaccactacagccgtggccagtccacccactcacgcagccccgttgccagccgtgattgctgaaagcacgacagtggatagtcccccctcaagccccccgcctcctccaccacccgcgcaggcaaccactctgtcctcccctgctcctgtaacagagcctgtggctctgcctcacactccgattactgtgttgatggcggcgcctgtgccacttcccgtggatgtcgccgttcggagtcttaaagaaccccccatcattattgtcccagagtcactcgaagctgacacaaaacaagacaccatctctaattcccttgaggagcacgtgactcagatcctaaatgagcaggctgatatatcatccaaaaaggaagattcgcacataggaaaagacgaagagattcccgactccagcaaaatcagtctgtcttgcaaaaaaacgggttcgaaaaaaaagtccagtcaatctgaggggatcttcctcggctccgagagcgacgaagacagtgtccgtacgagtagctcccagcgatcgcatgatttaaagttctcagcctctattgaaaaagagcgcgacttcaagaagagctccgcccccctaaaatcagaggatttgggaaagcctagcagatcaaaaacagaccgcgacgacaagtatttttcctacagcaagcttgagagagacacgagatatgtatccagtaggtgccgatccgagagggagcgccgacggagcagatcccatagccgaagtgaacgaggctcaaggacaaatcttagctacagtcggtcagagaggagccactactacgactccgatagaagataccatagatctagtccttaccgtgaacgtacacgatactctagaccctacactgacaacagggccagggagagctctgacagcgaagaggaatacaagaagacgtattctaggaggacctcctcccattcctcttcttacagagacctgaggacatcctcctactcaaagtctgacagagactgcaagactgagacatcctatctcgaaatggaaaggagaggcaagtacagtagcaagctggagagggagagcaagcgtacatctgaaaacgaagctattaagcgctgttgcagtcctccaaacgagctggggttcagaagaggaagctcttattccaaacatgatagctccgcgtctagatataagtctaccctgagtaaaccgattcccaagagcgataaatttaagaatagtttctgctgcacagagctgaatgaggaaatcaagcagagccacagcttctcactccaaacgccttgttcaaagggaagtgaactgcggatgatcaataaaaaccccgaaagagagaaggctggctcacctgcacccagtaacaggctcaacgattcccccacacttaagaagcttgatgagttacccatctttaaaagcgagtttataactcatgattctcatgacagcatcaaagagcttgactccttgtctaaggtcaaaaatgatcaactgcggtcattctgtcccatcgagctgaatatcaatgggtctccaggagccgagagcgacctggcgaccttttgtacctccaagaccgacgccgtcttaatgacttcagatgattcagtcacaggatccgagctttcaccactcgtcaaggcctgcatgttaagctctaacggcttccaaaatataagcagatgtaaggagaaggatttagatgacacctgcatgctgcacaaaaaaagcgagagccctttccgcgagacggagccactcgtgtcgcctcaccaggacaaactgatgagtatgcctgtgatgaccgtggactatagcaagaccgtggttaaggaaccagtggacacccgtgtaagctgttgcaagactaaagacagtgacatctactgcacactgaacgattcaaatccaagcttatgtaacagcgaagccgagaatattgaaccaagcgtcatgaagatctcatctaattcttttatgaacgtccacctggaaagcaagcctgtgatctgtgatagccggaatctaaccgatcacagcaagtttgcatgtgaggagtataagcaatccattggctccacctcttcagcgagcgtcaaccattttgatgacctgtatcaacccattggcagtagcggtattgccagtagtctgcaaagccttccgcctggtattaaagttgacagtctgacactcttgaagtgtggtgaaaacacttcgcccgtgctagacgctgtcctgaagagcaagaaaagctcagaatttctaaaacatgccggcaaggaaacaatcgttgaagtgggctctgatctccccgattctggaaaaggattcgcgtctagagagaataggagaaacaatggactgtcagggaaatgtctgcaggaggcccaagaggaaggaaacagtatcctgcctgagcgtagaggtaggccagaaattagtttagacgagagaggtgaaggtggacatgtccacacctcagatgacagcgaggtcgttttctcaagttgcgacctgaacttaactatggaggatagcgacggcgttacctatgcattgaagtgtgactcgagcggacatgcaccggaaatagtgagtacagtgcacgaggactatagcggatccagcgagtcgtcgaacgatgaatctgacagtgaagataccgatagcgacgattctagtatcccacgcaacaggctccagtccgtggtggtggtgcccaagaactccaccctcccaatggaggagacctccccgtgctccagcaggagttcccagtcatatagacattactccgatcactgggaggatgaaagacttgaatcacgccgtcatctgtatgaagaaaaattcgaatctattgctagtaaggcctgccctcagaccgacaaattctttctgcacaagggaactgagaaaaacccagagatttcatttacacagagctctaggaaacagatcgataatcggctgcccgagctatctcacccccaatctgacggcgtggacagcacatcgcacaccgacgttaaaagcgaccccctggggcaccccaacagcgaggaaaccgtaaaagccaaaattccttcccgccagcaggaagaattgccaatttactccagcgattttgaagatgttccaaacaagtcctggcagcagaccacatttcagaataggccagactctcgactggggaaaaccgaactaagctttagtagctcctgtgagatcccccatgttgacggactccactcgtcagaggaactccgtaatcttggatgggatttttcacaggaaaagccaagcacaacatatcagcagccagatagtagctacggtgcctgcggtgggcataagtatcagcagaacgctgagcagtacggtggtacccgcgactactggcagggcaatggttactgggaccctcggtccggacgaccacccggcacaggagtggtttacgaccggacacaagggcaggtgcctgattctttgacagatgacagggaagaggaggaaaattgggatcaacaggatggaagccacttttcagaccaaagtgataagtttctgctgagcctgcaaaaggacaagggtagcgtgcaagcgcccgagatctcatcaaacagcatcaaagatactctcgctgttaatgagaaaaaggacttcagcaaaaatttagagaagaatgacatcaaggatcgtggccccctgaaaaaacggcgccaagaaatagaatctgacagtgaatcggacggggagttgcaggatcggaaaaaggttcgcgtggaggttgaacaaggcgagaccagtgtcccccccgggagtgcattagtgggaccttcctgcgtgatggatgactttagagatccacagagatggaaggagtgcgccaaacaggggaaaatgccatgttacttcgacctgattgaagaaaacgtgtacctaaccgagagaaaaaagaacaaaagccatcgagacattaagagaatgcagtgcgagtgcacccctctttcgaaagatgaacgggcacagggtgaaattgcctgcggcgaagattgtctgaataggctgctgatgatcgaatgctcatctcgctgtccaaacggggactactgctcgaatcgccgattccaaagaaagcagcatgctgatgtcgaagtcattctaactgagaaaaaaggatgggggctaagggccgccaaggatttacctagtaatacattcgtgctcgagtactgcggggaggtcctcgatcacaaggagttcaaggcccgggtgaaggagtatgcaagaaataagaacatccactactactttatggctctcaaaaacgacgagatcattgatgctacccagaagggtaattgttctagatttatgaatcatagctgtgagccaaactgcgagacccagaaatggacggttaatggtcagctaagggttggcttcttcacgactaagctcgtgccctccggaagtgaactgacctttgactaccagttccagcgatacggtaaggaagcacagaagtgcttttgtggaagcgctaattgtcggggatacctaggcggcgagaatcgggtctccattcgggcagccggggggaagatgaagaaagaacggtcaaggaagaaggactcttag

SEQ ID NO: 204892 - DNA, 3876 bp, synthetic construct
  misc_feature 1..3876: note = Description of Artificial Sequence: Synthetic coding sequence
  source 1..3876: mol_type = other DNA
atgagcagcctgcccggctgcatcggcctggacgccgccaccgccacggtcgagtccgaggaaattgcagagcttcagcaagcagttgtcgaagagctcggaattagcatggaggagcttaggcacttcattgacgaggagttggaaaaaatggactgtgtacaacaaaggaagaaacagctagcagaattggaaacgtgggtgatccagaaggagagtgaggttgctcatgtggaccagctgttcgatgacgcctcccgcgctgttactaattgtgagtctctggtgaaagacttttacagcaaactcggacttcagtacagggacagctcttcagaagacgaatcttcacggccgacagaaattatcgagatccctgacgaagatgatgacgtgctctccatcgactcaggtgacgctggcagcaggaccccaaaggaccagaaactgagagaggccatggccgctttgcgtaaatccgcccaggatgttcagaagttcatggatgccgtgaacaagaagtcaagctcacaagacctgcataagggcaccttaagtcagatgtctggcgagttaagcaaggacggcgatctaatcgtgtccatgaggatcctcggcaagaagcgcaccaaaacctggcataaggggaccctgatagcaattcaaactgtgggccccggtaaaaaatacaaggtcaaattcgataacaaaggtaagagccttcttagcggtaatcatatcgcctatgactaccacccaccagcggataaactgtatgtcggctcgagggtggtagccaagtacaaggacggcaaccaggtgtggctctacgccggcatagtggccgaaacgccaaacgtgaagaacaagctgagattcttgatcttcttcgacgatgggtatgcaagctacgtgacccaatctgaattataccccatatgtagaccgctgaagaaaacgtgggaagatatcgaggacatttcctgcagagactttatagaggagtacgtgaccgcataccccaatcgccccatggtacttttaaagtccggacagctgatcaaaacagagtgggagggcacttggtggaagagccgggtagaggaggttgacgggagcctggtacgcatcctcttccttgacgacaagagatgtgaatggatttaccggggtagtacacgcctggagccaatgttcagtatgaagacctccagcgcctctgccctggaaaaaaagcaaggccaacttaggacccgccctaacatgggggccgtgagatccaagggccccgtcgtccagtacactcaagaccttacaggcaccggaactcagtttaagcccgtagagccaccacaacccactgccccccctgcacctccattcccgcctgcacctccactctctccacaagcaggagacagcgatctggagtctcagttagcccagtcgcgtaaacaagtcgccaagaagtctacatccttccgcccaggatctgttggatctgggcatagcagcccaaccagtcccgccctaagcgagaacgtgtcaggaggcaagcctgggattaaccagacatacagatccccactgggcagcactgcctctgcccctgctcccagcgctctgccggccccacctgccccccctgtattccatggaatgcttgagcgcgctcctgcggagccatcgtatagagccccaatggaaaagctgttttacctgcctcatgtttgttcttatacctgtctgagccgtgtcagaccaatgcgcaatgaacagtaccgcggtaaaaaccccctcctggtccccttgctctatgactttcggcgcatgacagcgcgccggcgagttaacagaaaaatgggtttccacgttatctataagacgccctgcggtctttgtctgagaacgatgcaggagatcgagaggtatctgtttgaaacaggctgcgacttccttttcctggagatgttctgcctcgatccgtatgttctcgtagaccgtaagttccagccttacaaaccgttctactacattttggacatcacttatggaaaggaagacgtaccactaagctgcgtgaacgaaatcgataccacccccccccctcaggttgcgtacagtaaagagaggattcccgggaaaggcgtattcatcaacacgggccctgagttcctcgtaggttgtgattgcaaagacggatgtcgagataagtctaaatgtgcatgccaccaacttaccatacaggctacggcctgcacgcctggtggacaaatcaacccaaactccggctaccagtataaacggctcgaggagtgcctcccaaccggcgtttatgagtgcaataagcgctgtaaatgtgacccaaacatgtgcactaatcgcctcgtgcaacacggccttcaggtcagattacaacttttcaagacgcaaaacaaaggctggggaattagatgccttgatgatatagccaagggcagctttgtgtgtatttatgctggcaagattctgaccgacgactttgccgataaagagggcctcgagatgggcgatgaatactttgcgaaccttgatcacattgagtccgttgaaaacttcaaagagggatacgaatccgatgccccttgctccagcgatagttcgggagtggatctaaaggatcaagaagacgggaattccggaacggaggatccggaggagtccaatgacgactcgtcagatgacaacttttgtaaggacgaagacttttctacttcatctgtctggaggagttatgccacccgcagacagaccaggggccagaaagaaaatggactgtccgaaaccacttctaaggactctcatccacccgatcttggtcccccacacattcctgtaccaccctcaatacccgtgggaggatgcaatccccccagctctgaggagactccaaagaacaaggtggctagctggctgagctgcaactccgtgagtgaaggcggattcgccgattccgattctcacagttctttcaagaccaacgagggtggagaagggagggctggtggctctcggatggaggccgagaaagcctctacaagcggcctggggatcaaggacgagggggacataaagcaggcaaagaaggaggataccgacgaccgcaataagatgagtgtagtaacagagagttcccggaattacggctataaccccagccccgttaagccggagggcctccgccggccgccttctaagacatctatgcatcagagtcggaggcttatggcatccgcccagtctaatcccgatgacgttctgaccctatcgtcatccactgagtccgaaggggagagcggtacttccaggaagcccactgccgggcaaaccagcgcgacagccgtggactctgacgacatacagacaatttccagtggatccgagggcgatgactttgaagacaaaaaaaatatgacgggcccaatgaagcgacaggttgctgtaaaatctacccgagggttcgcgctcaagtcgacccacggcatagccattaaatcaactaatatggcctccgtggacaagggagaatctgcccccgtgcgaaagaacaccaggcagttctatgacggcgaggagtcctgctacatcatagacgccaagctggagggcaatcttgggcggtaccttaaccattcctgcagcccaaatttattcgtgcagaatgttttcgtagacacacatgatctgagattcccttgggtggcgttcttcgccagtaagaggatacgcgcagggacagagctaacgtgggattacaactacgaagtgggtagtgtcgaggggaaagagctgctttgctgttgcggcgccatcgagtgcagaggccggctgctgtag

SEQ ID NO: 204893 - DNA, 1194 bp, synthetic construct
  misc_feature 1..1194: note = Description of Artificial Sequence: Synthetic coding sequence
  source 1..1194: mol_type = other DNA
atgagcagcctgcccggctgcatcggcctggacgccgccaccgccacagtcgagtccgaggagattgccgaattgcagcaggctgttgtggaggagctcggaatcagtatggaggaactgcggcattttatcgatgaagaacttgagaagatggattgtgtgcagcagagaaaaaaacagctggccgaattggagacctgggtgatccagaaagagagcgaggtggcccatgtggaccagctgttcgacgatgcatcaagagcggtaactaactgtgagtccctcgtcaaggatttctattccaagcttggtctgcaatacagggactcctctagcgaagatgagtcctcccgaccaaccgagatcatagagatacctgacgaggacgacgatgtcctaagcattgacagcggggacgctggcagtaggacaccaaaagatcagaaactcagggaggcaatggccgccttgagaaaatctgcccaggatgtccagaagttcatggatgccgtgaacaaaaagagcagctcgcaagacttgcacaaaggtacgctgtctcagatgagcggggagttgtcaaaagacggtgacctgattgtgagtatgaggatcctgggcaagaagagaacaaaaacatggcacaagggcacgctcatcgcaatccagacagtcggacccggcaagaagtacaaggtcaagtttgacaataagggcaagtctctgctgtctgggaatcatattgcttatgattatcatccgcctgcagacaagttatatgtcggctctagggtcgtggccaaatacaaagacggcaaccaagtatggctgtacgccgggatcgtcgctgaaactccgaacgtaaaaaacaagcttaggtttctcatatttttcgatgatggatatgcaagctatgttacccaaagcgagctttaccccatatgccggccactgaaaaaaacatgggaagatatcgaggacatttcctgtagggactttattgaggagtacgtcactgcataccctaaccgacctatggtgctgttgaaatcaggccaactcatcaagactgaatgggagggtacctggtggaagagcagggttgaagaggttgacggtagtttggtgcggatcctcttcctagtcctcttcttctccactatactggaggccgaagttgggggaggaggaacatag

SEQ ID NO: 204894 - DNA, 750 bp, synthetic construct
  misc_feature 1..750: note = Description of Artificial Sequence: Synthetic coding sequence
  source 1..750: mol_type = other DNA
atgagcagcctgcccggctgcatcggcctggacgccgccaccgccactgtggagtctgaagagatcgccgaactgcaacaggccgtcgttgaggagttgggcatcagtatggaggaactgcggcactttatcgacgaggaactggagaaaatggattgtgtgcagcagcgcaaaaagcagctcgcggagctggagacttgggtgattcagaaggaaagtgaagttgcccacgttgatcagctgttcgacgacgcttcaagagcagtgaccaactgtgagagcctggtgaaggacttctattccaagctaggcctccagtaccgtgatagttcgtcagaggatgagtcctcccgccccacagaaatcatagaaattccagatgaggatgatgatgtgctgagtatagattctggagacgccggatctcgaacaccaaaagatcaaaaactgcgggaggccatggctgcactccggaagagtgcccaggacgtacagaaatttatggatgcggtgaacaaaaaatcttcaagccaggacttacacaaaggtacactcagtcaaatgtcaggtgagctctctaaggatggcgacctgattgtgtctatgaggattttaggaaaaaaacgcactaagacctggcataaggggactctgattgccatccagaccgtcggatttagtttcagtctcatgatggctatgctgcctatgtctcatagccgcaactgcattcccttcgccggtcactag

SEQ ID NO: 204895 - DNA, 3873 bp, synthetic construct
  misc_feature 1..3873: note = Description of Artificial Sequence: Synthetic coding sequence
  source 1..3873: mol_type = other DNA
atgagcagcctgcccggctgcatcggcctggacgccgccaccgccaccgtggaaagcgaagaaatcgccgaactgcagcaggcagttgtagaagagctcggaatcagcatggaagaactcaggcacttcatcgatgaagaactggagaaaatggattgtgtgcaacagcgcaaaaaacagctcgctgagctggaaacctgggtcattcagaaggaatcagaagtcgctcacgttgatcagctgtttgacgacgcctcgcgtgcagtcacaaattgcgagagcctcgtcaaagacttctacagcaaactcgggctccaataccgcgacagttcaagcgaggatgagagctcccggccaacagagattattgagatccctgacgaggacgatgacgttttgtcaattgactccggcgatgccggcagtcggacgcccaaggatcagaagttgcgggaggcaatggccgctctcaggaaaagcgcacaggatgtgcagaaattcatggatgccgttaacaagaagagctcctcgcaagatctccacaaagggacactctctcagatgtccggggaattaagtaaagatggagacctaatcgtttctatgcgcatcttaggaaagaagcgcacaaaaacgtggcacaaaggaactctgatcgcaattcagacagtaggccccggaaagaagtataaggtcaaattcgataacaagggcaaatctcttctgagtggaaaccacatcgcctacgactaccacccccccgcagacaaactatatgtgggatcacgcgttgtcgctaagtataaagatgggaaccaggtatggttgtacgctggaatagtggcagagacacccaacgtaaaaaataagctacgatttttaatcttctttgacgacggatacgcatcctacgttactcagtcagagttgtaccccatttgtagacctctgaaaaagacctgggaagatatagaggatatctcttgccgggactttatcgaagagtacgttacagcgtatcccaatagacctatggtgcttctcaagtccgggcagcttattaaaactgagtgggagggaacctggtggaagagtcgagttgaagaggtagacggttcactggtgcgtatcctgtttctggatgataagcggtgcgagtggatttaccgtgggtcaacacggttggagcccatgtttagcatgaaaacctccagtgcttctgccctggaaaaaaagcagggacagctgcgcacacgaccaaacatgggagccgtgcgctccaaagggccggtggtgcaatacacccaggatttgactgggacaggaacccaatttaaacccgtggaacctcctcagcctaccgcaccccctgcaccccctttcccccccgccccccctctgtcacctcaggctggcgactccgatttggagtcccagctggctcaaagccggaaacaagtggccaaaaagagcacaagcttcaggcctggcagcgtgggttccggtcactcatcgcccacttctcctgccctaagcgagaatgtgtccgggggcaagccggggatcaaccagacgtataggtcccctcttggcagcactgcttctgccccagccccaagtgccttgcctgcgccccctgctcccccagtgtttcacggaatgcttgagagggctcctgctgagccttcataccgggcaccaatggagaagctcttttatctccctcatgtctgcagttatacgtgtctctctagagtgcgaccgatgcgtaacgagcagtacagagggaagaatcccctgcttgtgcccctcttgtatgacttccggcggatgaccgcccgtaggcgggtcaatagaaagatggggtttcatgtcatctacaagaccccttgcggtctatgtttaaggacaatgcaggaaatagagcgttacctctttgaaactggatgtgattttctcttcttggagatgttttgcctcgacccgtacgtcctggtggaccgcaagttccaaccttacaagcccttctactatatccttgatatcacctatgggaaagaagatgtgccgctgtcatgcgtcaacgagatagacaccaccccacccccgcaagttgcatactcaaaagaaaggatccccggcaagggggtgttcatcaataccggtcccgagttccttgttggttgtgattgcaaggatggctgcagggataaaagcaagtgcgcctgccatcagttgaccattcaagccactgcgtgtacccctggagggcagatcaaccctaactcggggtatcagtataagagactggaggaatgtttacccactggagtttatgagtgtaacaaaagatgtaagtgtgaccctaatatgtgtaccaataggctggtgcagcacggcttgcaggtcagactgcagctgttcaaaacacaaaataaggggtggggaattaggtgtctcgacgacattgcaaaaggaagtttcgtgtgcatttacgcgggcaaaattctgaccgatgactttgcggacaaagaaggactagaaatgggggatgaatacttcgccaaccttgatcacatagaatccgtggaaaattttaaggagggttatgaaagcgacgcaccctgcagcagcgatagttccggtgtggacctaaaggatcaagaagatgggaatagcggcacggaggaccctgaagaaagcaacgatgatagctccgatgataacttctgtaaagacgaagacttcagtacctcctccgtgtggcgcagctatgcgactcggagacagacaagagggcaaaaagaaaacggtctctctgagaccacaagtaaagactcacacccccctgatttagggcctcctcacattcccgtccctcccagcatccccgttggtgggtgtaatccaccctcttccgaggaaacccctaagaataaagtagctagctggctgagttgtaactcggtgagtgagggcgggtttgcggactccgactcacactcttcatttaagaccaacgagggtggggagggtcgggccggtggctcacgtatggaggcagagaaagcttctaccagtggattgggaattaaggatgagggcgacatcaagcaggctaagaaagaagacactgacgacagaaataaaatgtcggtggtaacagagtccagtcgtaactatggctataacccatcgcccgttaaaccagagggccttcgcaggccaccatccaagacaagtatgcaccagtctcgcaggctgatggcctccgctcagtcaaatcccgacgatgtgctcaccctgtcatcatccaccgagtcagaaggcgagtcaggaaccagcaggaaaccaacagcggggcaaacctcagcgactgccgttgactccgatgacatccagaccatttcaagtgggagtgagggggatgacttcgaggacaagaaaaatatgacaggtcccatgaaaagacaggtggccgtgaaatcgacgcgcggctttgcgttaaagtctacacatggtattgccattaagagtacaaacatggctagcgtggacaaaggagagtctgcacctgtgcgcaagaatacccggcaattttacgacggggaagagagttgctatatcatcgacgccaaactggaaggtaatcttggcagatacctgaatcatagctgttcgccgaatcttttcgtgcagaatgtgttcgtggacacacatgacctcagattcccatgggttgccttcttcgccagcaagattagagcagggaccgaactcacctgggactataattacgaggtgggatcagttgagggcaaggagctgctgtgttgctgcggggcgatcgaatgccggggtaggctgctatag

SEQ ID NO: 204896 - DNA, 504 bp, synthetic construct
  misc_feature 1..504: note = Description of Artificial Sequence: Synthetic coding sequence
  source 1..504: mol_type = other DNA
atgagcagcctgcccggctgcatcggcctggacgccgccaccgccactgtggaaagcgaagagattgctgagttgcagcaggctgtggtagaggaacttggaatttctatggaggagctccggcattttatcgatgaggagttagagaagatggattgtgtgcaacaaaggaaaaagcagctagcagagctggagactgtaggaccaggcaaaaaatacaaggtgaagtttgacaataagggcaaatctctgctgtctggcaatcacattgcgtacgactatcaccctccggctgacaaactgtatgtgggttctcgggttgtggctaagtataaggacggaaatcaggtttggctctacgcaggcatcgtggcagaaacgcccaatgtcaagaataaactgcgcttcctcatattcttcgacgatggctacgccagctatgtgacacaatctgaactgtacccgatttgccgcccccgggagtgtttttcccttattccctag

SEQ ID NO: 204897 - DNA, 471 bp, synthetic construct
  misc_feature 1..471: note = Description of Artificial Sequence: Synthetic coding sequence
  source 1..471: mol_type = other DNA
atgagcagcctgcccggctgcatcggcctggacgccgccaccgccaccgtcgaatccgaagagatcgcagagcttcagcaggcagttgttgaagaactgggtatctccatggaggagctgcgccacttcatcgacgaggagctggagaaaatggattgtgtccagcagagaaagaagcagctcgccgagctagagacttgggttattcagaaagaaagcgaagtggctcacgtggatcagcttttcgacgacgcctcccgggcagtgacgaactgtgagagtctagtcaaagatttctattcaaaactcggcctgcagtaccgcgacagttcgagtgaggatgaatctagtcggcctacagaaatcatcgagatccccgatgaggacgacgacgttctgtcgattgattcaggggacgccggttctcggaccccaaaggatcaaaaactccgcgaagcaatggccgcttag

SEQ ID NO: 204898 - DNA, 3780 bp, synthetic construct
  misc_feature 1..3780: note = Description of Artificial Sequence: Synthetic coding sequence
  source 1..3780: mol_type = other DNA
atgagcagcctgcccggctgcatcggcctggacgccgccaccgccacggtggagtccgaggaaatcgctgagctgcagcaggctgtggtggaggaactgggtatttcaatggaggaacttcgccactttattgacgaagagcttgaaaagatggactgcgtgcagcagcgcaagaaacagttggccgagctggaaacatgggtgatacagaaagaatctgaggtggcccatgtcgatcagctcttcgatgacgcctctagggccgtcacaaattgcgagagcttggttaaagacttttatagtaaacttgggctccaataccgcgacagtagctcagaagacgaatcttctcggcctacggaaatcatcgaaatcccggacgaagacgacgacgtgctgagcatcgattccggagatgccggttctaggactccaaaggaccagaaactgagggaggccatggccgctctgcgtaagagcgctcaggacgtacagaagttcatggacgctgtcaacaagaagagctctagccaagacctgcataagggcaccttgtctcaaatgagtggtgaactttctaaagatggagatcttatcgtgtcgatgcggatcctgggcaagaagaggaccaaaacgtggcacaagggaaccctgatagctattcagaccgtgggacctgggaagaaatacaaagtgaaatttgataacaagggcaagagtcttctcagcggcaatcacatcgcctatgactaccaccctcccgcggataagctatatgttggctcgcgagttgttgctaagtataaggatggaaaccaagtttggttgtacgcgggaatcgtagcggagactcccaatgtgaagaataaattgagatttctaatcttcttcgacgatggttacgccagctacgtgacacaatctgaactgtatcccatttgccgcccccttaaaaaaacctgggaagatatagaggatatctcttgccgggatttcatcgaggagtatgtgacggcatacccaaatcgtcctatggttcttttaaagtccggtcaactgatcaaaaccgagtgggagggaacatggtggaaatccagggtcgaggaggtcgatggcagtctcgtgagaattctgttcctggatgacaagaggtgtgagtggatctatcgcggaagtacacggctggagccaatgttcagcatgaagacaagctccgctagtgccctcgaaaaaaaacaaggccagctgcgcacacgtccgaacatgggggccgtgcggtccaagggccccgtagtgcaatacacgcaggatctgactggaaccggaacccagttcaaacctgtggaacctccccagcccactgcgcctcccgctccaccttttcctcccgcccctccactgagcccgcaggcaggcgatagcgacctcgagtcccagttagcccagtctagaaagcaggtggccaagaagtctacctcgttccgacccggatccgttggctctggccatagcagcccaacctctcccgccctctcagagaatgtttccgggggaaagccaggcatcaaccaaacttaccgatctcctctgggatccactgcctcagctcccgccccatccgccctgcctgctcccccagctcctccagtttttcacgggatgctggagcgagcaccggccgagccaagctaccgtgcacccatggaaaaactgttttacttgccacacgtttgcagctacacctgcctgtctagagtgaggccaatgcggaatgagcaataccggggaaagaacccacttctcgtacccctcttgtacgacttcagacgtatgactgctcgcaggagagtcaatcgcaagatggggttccatgtcatatataaaacaccttgcggactgtgtctccggactatgcaagaaattgagaggtatctgtttgagactggctgcgatttcctgtttctcgagatgttttgcttggatccatatgtgttagtggaccgcaagttccagccttataagccattctattatattctcgacatcacctacggcaaggaggatgttccgctgagttgcgtcaacgaaattgatacaacacctcccccccaggtcgcatattcaaaggaaagaatacctgggaaaggagtgtttattaacaccggccccgagttcctcgtggggtgtgactgcaaggatggctgtcgcgacaaatccaaatgtgcctgccatcagctgacgatccaagccacggcttgcacacctggaggacagattaatccaaacagcggctatcaatataagcgcctcgaagagtgtcttccaactggggtctacgaatgcaataaacggtgtaagtgcgaccctaacatgtgtactaaccggctcgtccagcatggactgcaggtacggctccaattgttcaaaacccagaacaagggttggggcatcaggtgcctggacgatatagccaaaggttcctttgtttgcatttacgcagggaagattctcacagacgatttcgcagacaaagagggcttggaaatgggcgatgagtactttgcaaacctcgaccacattgagtccgtagagaactttaaagaaggctacgagtcagacgccccatgctctagcgactccagtggggtcgacctaaaggatcaggaagatggaaacagtggcactgaagaccccgaggagtcaaatgacgacagcagcgacgataacttttgtaaagacgaagacttcagtacgtccagcgtttggaggtcatacgccactaggcgtcagacacggggccagaaggagaacggactctccgagaccacatccaaggactcccaccctcctgacctggggcccccacacattcctgtgcccccaagtatccctgtagggggctgcaacccaccttcttctgaagagacccccaaaaacaaggtagcatcctggctgagttgcaactcagtgtcagaagggggcttcgccgacagcgacagccactcatcgtttaagaccaacgaaggtggtgagggacgcgcggggggatcgagaatggaagctgagaaggcgtctacaagcgggctggggatcaaagacgagggcgacatcaaacaggccaagaaggaggataccgatgatagaaacaaaatgagtgtggttactgagtcaagccgcaactacgggtacaaccccagtcccgttaagcctgaggggctgagacggcctccatcaaaaactagcatgcatcagtctagacgtctgatggcctcggcacagtccaaccccgacgacgttctgacgttatcttcttccaccgaaagcgaaggcgaatcaggaaccagtagaaagcctactgccgggcagacaagcgcaaccgcagtggattccgacgacatccagaccattagttccggaagcgagggcgacgacttcgaagataaaaaaaacatgacaggtccgatgaaaaggcaggtcgccgtgaaaagtacccggggctttgccctcaagtcaacacatggaatcgcaatcaaaagtactaacatggcaagcgtggataaaggcgagagcgctccggttcggaagaacacgcgccagttttatgacggcgaggaatcatgttacattatcgacgcaaaactcgagggaaatctggggcggtatctcaacgttaggcccctatccccccctctggatgccggcctctcgcatgggcctcagatttcctttaatatcctttacaaacctttttcttgttacaagctgttaatttctaagtag

SEQ ID NO: 204899 - DNA, 492 bp, synthetic construct
  misc_feature 1..492: note = Description of Artificial Sequence: Synthetic coding sequence
  source 1..492: mol_type = other DNA
atgagcagcctgcccggctgcatcggcctggacgccgccaccgccacggtggagtctgaggagattgctgagttgcagcaggccgtcgttgaagaacttggtatctcgatggaagagctcagacactttattgacgaagaactggagaagatggactgtgtccagcagcggaaaaagcagctagcagagctagagacttgggtcattcagaaggagtccgaagtagcacacgtcgaccagttgttcgatgatgccagtcgggctgtgaccaactgcgaaagtttggtcaaggacttctatagcaagctgggccttcaataccgagatagctccagcgaagacgagtcaagtcggccgaccgagatcatagaaattcccgatgaggacgacgacgtgttgtccatcgattcaggcgacgcagggagccgcaccccaaaagatcaaaagctaagggaagctatggcggctctgagaaaatccgcacaggactag

SEQ ID NO: 204900 - DNA, 1911 bp, synthetic construct
  misc_feature 1..1911: note = Description of Artificial Sequence: Synthetic coding sequence
  source 1..1911: mol_type = other DNA
atgagcagcctgcccggctgcatcggcctggacgccgccaccgccactgttgagagcgaggaaatcgcagaactgcagcaagcggtggtcgaagaactggggatatctatggaagagctcaggcacttcatagacgaggaactggaaaaaatggattgcgtgcagcaacggaaaaaacagcttgccgaactcgaaacgtgggtgattcagaaggagtccgaggtggctcacgtagaccagttatttgacgatgcctcaagagccgtaacaaattgcgagtccctggttaaggatttctatagcaaacttggcctgcaatacagagactcttccagcgaggatgagtccagcaggccaactgagatcatcgagatcccggacgaggatgatgatgtcctgagtatcgacagcggcgacgctgggtctcgaacgcccaaggaccagaagttaagagaggccatggctgccctgagaaaaagtgcacaggatgtgcagaaattcatggatgccgtgaacaaaaagtccagttcccaggacctgcacaagggcacactcagccaaatgtccggggaattatccaaagacggcgatctgattgtctctatgcgcatattaggcaagaaacggactaaaacatggcataaaggcaccctgattgccattcagactgttgggcctggtaaaaagtataaagtcaagttcgataacaaaggaaagagtctgctgtctggtaatcacatcgcatacgactatcaccctccagctgataaactgtacgtaggatcacgggtggtggccaagtacaaagacggtaatcaggtgtggttgtatgcaggtattgtcgccgagacacctaacgtcaagaataagctgaggttcctcatttttttcgacgatggttacgcgagctacgtaacccagtctgagctgtacccgatttgcaggccccttaaaaagacatgggaggatatagaggatatatcgtgtcgcgattttatcgaagaatatgtcactgcttatcccaacaggcctatggtactactaaaatctggacagctgatcaagaccgaatgggagggaacctggtggaagagccgcgtggaagaggttgatggctctctggtacgcatactgttcctagatgacaaacgatgtgagtggatatatagaggttccactagattggagccaatgttttccatgaagacatctagtgcctccgcgcttgaaaagaagcagggccagttgcgaactaggcctaacatgggagccgttcgctcaaaggggccagtagttcagtatacacaagacctgaccggaacgggcactcagtttaagcctgttgaacccccacagcctacagccccacccgcaccgccttttccaccagcccctccgctgtcaccccaggccggcgactctgaatctcttgagagtcagctggcgcagagtaggaagcaggtggctaagaaatcaacttcttttcgcccaggctcagtcggctctgggcactcctctcctacatcaccggctcttagtgaaaacgtctctggggggaaacccggtattaatcaaacctatcgaagccctttgggatcaactgcgagtgcccctgcgccatcagccctgcccgcgccaccagctcctcctgttttccacggcatgttggaacgcgctcccgccgaaccatcatatagagcacccatggagaagctgttctatctcccgcacgtatgttcttatacctgtcttagccgggtccgccccatgagaaatgaacaatatcgaggaaaaaatccactcctagtgcctctactgtatgattttcggagaatgacagcccggcggagggttaaccgaaaaatgggattccatgtgatctataagacaccatgtggtctgtgtctgtag

SEQ ID NO: 204901 - DNA, 2160 bp, synthetic construct
  misc_feature 1..2160: note = Description of Artificial Sequence: Synthetic coding sequence
  source 1..2160: mol_type = other DNA
atgggcgagaagaacggcgacgccaagaccttctggatggagctggaagatgatggtaaggtcgacttcatttttgaacaggtgcagaacgtactacagtcattgaaacagaaaataaaggacgggtctgcgactaataaggaatacattcaggcgatgattctagtgaacgaagccaccatcatcaactcttctacctcgattaaaggcgcctcccagaaagaagtaaacgcacagagctccgaccccatgcctgttactcagaaagagcaggagaacaagagcaacgcctttcctagcacctcctgtgagaattcattcccagaagactgtacattcttaaccactgaaaacaaagagattctttcactggaggataaggtggttgattttagggagaaggactcctcctcaaatctgtcctaccagagtcatgattgttcaggagcatgcttgatgaaaatgccattgaatctgaagggcgagaatcccctgcagctcccaattaagtgccactttcagaggagacatgcaaagaccaacagccatagctccgctctgcatgtttcctataagaccccctgcggacgcagcctgcggaatgtggaagaagtgttcaggtatttattggagactgaatgcaacttcctgtttaccgacaatttttcttttaacacctatgtgcagctggctaggaactatcccaaacagaaagaggttgtgtccgatgtggacatatcaaacggggtggagagcgttcctatctccttttgcaatgagatcgacagccggaaattaccccagtttaagtataggaagacggtttggcctagggcatacaaccttactaatttcagttctatgtttaccgattcatgcgattgctccgaagggtgtatcgacatcacaaaatgcgcatgcttgcagctaacagccagaaacgccaaaacatcgccgctgtcatccgataagatcacaactgggtataagtacaaaaggcttcagcgccagattcccaccggcatctacgaatgtagtctgctgtgtaagtgtaaccgacaactctgccagaatagagtcgtacagcacggaccacaggtcaggcttcaggtgtttaaaacggagcaaaaggggtggggagttagatgtttagacgacattgatcggggtacgtttgtgtgtatttatagcggccgcttgctgtctcgcgcaaatactgagaagagctatggcatcgacgaaaatggccgcgacgagaatacgatgaaaaacatcttctctaagaagcggaagttagaggttgcctgttccgattgtgaagtcgaggtgctgccactcgggctcgagacgcaccctaggacagcgaaaaccgaaaagtgcccgcctaagttttcaaataatcccaaggagctgacggtggaaaccaagtatgacaatatttctcgcatccagtaccactcagtgatccgcgatcctgaatccaaaactgccatcttccagcacaacggaaagaaaatggagtttgtctcctctgagagtgttacccctgaggacaatgacggcttcaagcctcccagggagcacctgaacagtaaaaccaagggtgcacagaaagattccagttctaaccacgtcgatgaatttgaggacaatctcctcatcgaatcagatgtgatcgatattaccaagtaccgggaagaaaccccccctagaagtcgatgcaaccaagctacgacactcgataaccagaatataaaaaaggccatcgaggtccagattcagaagccacaggaaggccgaagcacggcctgtcaacgccagcaggtgttctgcgacgaagaattgctctcggaaacaaagaatactagttccgacagcttaacaaagtttaacaaagggaatgtgtttttactggatgccacaaaagagggcaacgttggtagatttcttaaccattcatgctgccctaatttattggtgcagaacgtgtttgtggaaacccataatcgcaactttccccttgtcgcattttttactaataggtatgtgaaggctcgaacagagctgacatgggactacgggtatgaagcaggcactgtgcctgaaaaagaaatattttgccaatgtggcgttaacaagtgtaggaagaagattctctag

SEQ ID NO: 204902 - DNA, 2124 bp, synthetic construct
  misc_feature 1..2124: note = Description of Artificial Sequence: Synthetic coding sequence
  source 1..2124: mol_type = other DNA
atgggcgagaagaacggcgacgccaagaccttctggatggagctggaggatgatggcaaagtagacttcattttcgaacaggtgcagaatgtgttgcagtctctgaagcaaaagatcaaagacgggtctgctactaacaaggagtacattcaagctatgatcctcgtcaatgaagccaccataatcaactccagcacctccataaaggaccctatgccagtgacccaaaaggagcaagagaataaatcgaatgcatttcccagcacctcgtgtgaaaactccttccccgaggattgcacctttctgacgacagaaaataaggagatactcagcttagaggataaagtagtggatttccgcgagaaagactccagttcgaatctgagctatcagagccatgactgctctggtgcctgtcttatgaagatgccgctgaatttaaaaggcgaaaatcccctccagctgccaatcaaatgtcacttccagcgccgccacgccaagacaaactcacactcaagcgctctgcacgtgagctacaagaccccctgtggaaggtcactgagaaacgtagaggaggtgttccgatatctgctggagaccgagtgtaattttctttttaccgacaatttttctttcaatacctacgtccagttagcaagaaattatcctaagcagaaggaagtggtcagcgatgtcgatattagcaacggcgtggagagcgtcccaatttctttctgcaatgagatcgattcccggaagctacctcagtttaagtatcgcaagacggtttggccccgtgcttacaacctgacaaatttttcgagcatgttcacagattcatgcgattgttcagagggctgtatcgatattacgaagtgcgcttgtctgcaactgacagccagaaacgctaaaacctcccctctcagctcagataaaatcactacagggtacaaatacaagcgactgcaaaggcagatccccaccggcatttacgaatgttccctgctgtgtaaatgcaacagacagctctgccagaaccgagtagtccagcacggtccacaggtacggctacaggttttcaaaacggaacagaagggttggggagtgaggtgcttggacgatatagatcgcggtacgtttgtgtgcatttatagcggacggctcctatcccgtgctaacacggaaaagagctacgggatagatgagaacggtcgggacgagaacacgatgaagaatatatttagcaagaaacggaaactggaagtggcgtgctcagattgtgaggtcgaggtattgcctctgggcctggagacacatccaagaacggcgaaaacagagaagtgtccaccaaaattctccaacaaccctaaagaattaactgtggagacaaaatatgataatatctcaagaatccagtaccatagcgtcatccgggaccccgagtcaaaaacggccattttccaacataatggtaaaaagatggaatttgtgtcctccgaaagtgtgactcctgaggataatgatggcttcaaaccacctcgcgaacacctgaattctaagaccaaaggcgctcaaaaggactccagcagcaaccacgtggacgaatttgaagataatttactaattgagtcggatgttatcgatatcactaagtatcgtgaggagaccccacctagatcaaggtgcaatcaagctacaacgctggataatcagaatataaagaaggcgattgaggtacagatccagaagccacaggagggacggagtaccgcttgtcagaggcaacaagttttttgcgacgaggaactcctgtccgaaaccaagaacacatcctctgatagcctcacgaagtttaacaaggggaacgtgtttttactggatgcgacaaaggagggcaacgtcgggagatttcttaaccattcctgttgtccgaacttgctcgtgcagaatgtttttgtggaaactcataacagaaacttcccgttggtagcattttttaccaacagatacgtgaaggccaggaccgagctaacttgggactacggctatgaggcagggactgttccagagaaggaaattttctgtcagtgtggggtaaataagtgtcgtaaaaagatcctgtag

SEQ ID NO: 204903 - DNA, 975 bp, synthetic construct
  misc_feature 1..975: note = Description of Artificial Sequence: Synthetic coding sequence
  source 1..975: mol_type = other DNA
atgagccggcccagcagcaccggccccagcgccaacaagccctgctcaaagcaacctcctcctcagccccagcatactccaagtcccgctgcccctcctgccgcagcaaccatcagcgcggcgggcccaggcagttcggctgtgcctgcagccgctgcagtgatctcaggacctgggggcggcggcggggcaggtcctgtctctccccaacatcacgagttgacgtcactgttcgaatgccctgtgtgttttgactacgtgttgcctcctattctccagtgccaggccggacatttggtttgcaatcagtgccggcagaagctgagctgttgccccacgtgtcggggtgccctgactcccagtatcaggaatttagcgatggaaaaagtcgcatcagctgtgctctttccatgtaagtatgccaccacaggatgcagtctgaccctgcaccataccgaaaaacccgagcatgaggatatatgcgagtaccgaccatacagttgtccctgtccgggagccagctgtaaatggcagggatccctggaggccgtaatgagccacctcatgcacgcacacaagtccatcacaactctacaaggagaggacatcgtgttcctggcaactgacattaatctgcccggggccgtggattgggtaatgatgcagtcctgtttcggacaccatttcatgctcgttctggagaagcaggagaagtatgagggccaccagcagtttttcgccatagtcctcctgatcggcaccagaaaacaagccgagaacttcgcttatagattagaactgaacggtaaccggcggaggctgacctgggaggctacgccgaggtccatccacgatggagtcgctgctgccatcatgaacagtgactgcctcgtgtttgacacagccatcgcccatctcttcgccgacaatggtaatttgggtataaatgtgacgatcagcacctgttgtccatag

SEQ ID NO: 204904 - DNA, 990 bp, synthetic construct
  misc_feature 1..990: note = Description of Artificial Sequence: Synthetic coding sequence
  source 1..990: mol_type = other DNA
atgatgagcaacagcagcagcgagatcgacgtgatcaagacccggataccaacatacgatgaagacgataacacaatcctgtatgcctacgaaacgaagcccgagtttgtcaacaaagagccaaacatagtctcggacgcatcctgcaataccgaggagcaattaaagactgtggatgacgtcctgatacactgtcaagtgatttacgatgccctgcagaacttggacaaaaaaatcgacgtcatacggagaaaagtgagcaagatccaacgcttccatgctagatccctgtggacaaatcacaaacggtacggatacaagaaacactcttatcggctggtaaagaaactgaaactccagaaaatgaagaaaaatgaggtttatgagaccttttcctaccctgagtcatattctcccactctgcccgtttcccggcgtgaaaacaattctccatccaatttgccccggccctctttctgtatggaagaataccaacgagctgagctcgaggaagaccccatattgtcacgtacgcccagtcccgttcaccccagcgacttctccgagcataattgccaaccttattatgctagtgacggtgctacatatgggagttcctcgggcttgtgcctgggaaaccccagagccgacagcattcataacacttattcaaccgatcacgcatctgccgcccccccctcggttaccaggtccccggtagaaaacgacggttatatcgaagaagggagcattaccaagcatccctctacgtggtcagttgaggctgtggtgttgttcctcaaacagaccgacccccttgctctgtgcccactcgtcgacttgtttcggtcacacgagatcgacggtaaggcgctgctactcctaacatctgatgtgctgctgaaacacctcggggtgaagttgggtacagctgtgaagctgtgctactatattgacaggctgaagcaaggtaaatgttttgaaaattag

SEQ ID NO: 204905 - DNA, 909 bp, synthetic construct
  misc_feature 1..909: note = Description of Artificial Sequence: Synthetic coding sequence
  source 1..909: mol_type = other DNA
atgatgagcaacagcagcagcgagatcgacgtgcaggagcccaacatagtgtctgacgctagctgcaataccgaggagcaacttaagacagtggatgatgtgctgatacactgccaggttatctacgatgctctgcaaaaccttgacaagaagatcgatgttattaggaggaaagtcagcaagattcaaagatttcacgcccggtcgctgtggaccaatcataaacgctatggctacaagaagcacagctataggctcgtaaagaagttgaaactgcagaaaatgaagaaaaatgaagtgtacgaaacttttagctatcctgagtcctactcccctaccctgcctgtctcaagacgtgagaacaattctccttccaatttaccacgcccctccttctgtatggaggagtaccaaagggctgagctggaggaagatcccatcctctcacggaccccctctcccgttcatccatctgatttttccgaacacaattgccagccatactacgcaagcgatggcgccacttacggcagttcctctggactgtgtcttggaaaccctcgcgccgatagcattcacaatacttactcaactgaccacgccagtgccgccccacctagtgtgacccgctctcctgtggagaacgacggctacatcgaggaggggagcatcaccaagcacccgtctacctggtccgtcgaagctgtcgttctcttccttaagcaaaccgacccgcttgcgctgtgtcccctggtcgacctctttagatcccatgaaatcgacggaaaggccctcctactcctgactagtgatgtattgttaaaacatttaggtgtcaagctgggaaccgcagtgaaactgtgttattacatcgacaggttgaaacaagggaagtgttttgagaattag

SEQ ID NO: 204906 - DNA, 627 bp, synthetic construct
  misc_feature 1..627: note = Description of Artificial Sequence: Synthetic coding sequence
  source 1..627: mol_type = other DNA
atgaagaagaacgaggtgtacgagaccttcagctaccccgagagctacagcccaacacttcctgtaagcagacgagagaataatagcccgagcaatcttccacgtccctctttctgtatggaagaataccagcgcgcggaattggaggaggatccaattctttcgagaacaccatccccggtgcacccatcagacttctctgagcataactgccagccttactacgctagtgatggcgcaacgtacggatctagctccggactttgcctggggaatccgcgcgcagattctatccataacacttatagcaccgatcacgctagcgcggcaccaccttccgtgacacgcagccccgtagagaacgatggctacatagaggaggggtccatcacgaagcacccaagcacatggagcgtggaggcggttgttttgtttctgaaacagacagaccctttagccctgtgcccgctggtggacctctttcgctcccatgaaattgacggaaaagcactgctgctgttgacctcagatgtgctcttgaaacatttgggggtgaagctggggaccgcggttaagttgtgctactatatcgacagactgaaacagggaaagtgcttcgagaattag

SEQ ID NO: 204907 - DNA, 627 bp, synthetic construct
  misc_feature 1..627: note = Description of Artificial Sequence: Synthetic coding sequence
  source 1..627: mol_type = other DNA
atgaagaagaacgaggtgtacgagaccttcagctaccccgagagctattctccaacgctaccagtgagtaggcgagaaaacaactctccttctaacctcccgcgtcctagcttttgtatggaagagtaccagcgggccgagctcgaagaggacccaatcctgtctcggaccccgtccccagtacaccccagcgacttcagcgagcacaactgccaaccatactacgcatcggatggcgccacatacggctcttcgtctgggctttgtctggggaatccccgggccgactcaatccacaacacttattcgaccgatcatgcgtccgccgccccacctagcgtgacccgatctcccgtggaaaatgacggatatatcgaggagggcagcatcactaaacacccatcgacttggagcgtagaggccgtcgttcttttcctgaaacagaccgatcctctggctttgtgcccgttggttgatctgttccgctcccatgagatcgatgggaaggctttgctgctcctcacatcggatgtgctgttgaagcatctcggcgtgaaactgggcactgccgtgaaactctgttactatatcgaccgtctgaaacagggtaagtgcttcgaaaattag

SEQ ID NO: 204908 - DNA, 447 bp, synthetic construct
  misc_feature 1..447: note = Description of Artificial Sequence: Synthetic coding sequence
  source 1..447: mol_type = other DNA
atgatgagcaacagcagcagcgagatcgacgtgcaggagcccaacattgtcagcgatgctagttgtaatactgaagagcagctgaagacagtggacgacgttttgatccactgtcaggtgatctatgatgctcttcaaaatctggataaaaaaatcgatgttataagaaggaaggtgagcaaaatacaacgctttcatgcaaggtcactttggacgaaccataagcggtatggctacaagaagcactcctacaggctcgtgaaaaaactgaaattacagaaaatgaagaaaaacgaggtatacgagacgtttagctatcccgagtcatattccccaactttacccgtcagccgccgcgaaaataacagtccctctaacttaccacgcccctcgttctgcatggaggaatatcagcgcgccgaactggaggaagaccctattctttag

SEQ ID NO: 204909 - DNA, 2103 bp, synthetic construct
  misc_feature 1..2103: note = Description of Artificial Sequence: Synthetic coding sequence
  source 1..2103: mol_type = other DNA
atgggccagaccgtgaacgaggacagcatggacgtgaagaaggagaaccaggaaaaaacgccacagagcagcacctccagcgtgcaaagggatgacttccactgggaggagtatctgaaagagaccggatctatctccgccccatcagagtgtttccgacaatctcaaattccccccgttaacgatttcaaagtgggaatgaagcttgaggcccgtgacccccgaaacgccacttctgtgtgcattgcgacggttattggcatcacaggcgcgagattacgactccggcttgacggcagcgacaacagaaacgatttttggcggctcgtagatagccccgacatccaacccgtaggcacctgcgagaaagaaggcgaccttcttcagccccctctgggttaccagatgaacacaagcagttggccaatgtttctcctgaagacgttaaacgggagcgaaatggccagtgccactcttttcaaaaaggaacctcctaagccccctcttaataatttcaaggttggcatgaagctcgaggccatagacaaaaaaaacccatatctcatttgccccgctactatcggtgacgtaaagggagatgaggttcatatcacttttgacggctggagtggcgcatttgactactggtgtaaatacgattccagagacattttccccgcagggtggtgtcggctgacaggagacgttctgcagccaccgggcacaagcgtcccgattgtcaagaatatcgccaagaccgagagctctccgtccgaggcttcccagcattccatgcagagccctcagaagacaacgttaatcctgcccacacagcaggttcgtagaagcagccgcatcaaacctcctgggccaaccgcggttcctaaacggagttccagcgttaaaaacattactcccagaaagaaaggacctaacagcgggaagaaggaaaagccactcccagtgatttgttctacatccgctgcaagtctgaagagtctgacacgcgatcgggggatgctgtacaaagacgtggctagcggcccatgtaaaatcgtgatgtccaccgtatgtgtatatgtgaacaaacatggtaatttcggaccccatctggatcccaagcgtatccagcagctgcctgaccattttgggcccggaccagttaatgtggtcttgaggagaatagttcaggcttgcgtggactgtgctctggagactaagaccgtgtttggttacctcaagcccgataatagagggggcgaagtcattactgctagtttcgatggggagactcactctatccagctaccgcctgtaaatagcgccagctttgccctccgctttctggagaatttttgccacagccttcagtgcgacaacctgttaagtagccagcctttttcctcaagccgaggccacacccatagttcagctgaacacgacaagaatcagtccgccaaggaggacgttacggaaagacagagcacaaagcgctcccctcagcagaccgtcccctatgtggtgcccttaagccctaagctgcctaagactaaggaatacgcaagcgagggtgaaccactgtttgctggaggttctgctatacctaaagaggagaacttgtctgaggatagtaaaagcagcagccttaactcaggcaactacctgaaccccgcttgtaggaatcctatgtacattcacactagcgtatctcaggacttcagtcgcagtgttcccggcacaacttcttccccactcgtcggagatatcagtcccaaaagctctcctcatgaggtcaaattccaaatgcagcgtaaatcagaagccccatcatacatcgccgtcccagatccgtccgtgctcaaacagggctttagtaaagacccttccacttggtctgttgacgaagtgatccaattcatgaaacacacagatcctcaaatcagtggccctctggccgatctattccggcagcacgagattgatggaaaagccttattcctgctgaagagcgatgtaatgatgaagtacatgggcctgaagctggggccagccctcaaactctgttactacattgagaagctcaaagagggtaaatattcatag

SEQ ID NO: 204910 - DNA, 1038 bp, synthetic construct
  misc_feature 1..1038: note = Description of Artificial Sequence: Synthetic coding sequence
  source 1..1038: mol_type = other DNA
atgcagagcccccagaagaccaccctgatcctgcccacccagcaggtcagacgaagttcgcgcatcaagcccccaggaccaacagccgttcctaagaggtcttcctctgtgaagaacataacccctcgaaaaaaaggcccaaactccggaaagaaggaaaagccgttgcccgtgatctgctcgacctctgcggcctcattaaagtctcttaccagagaccgagggatgctgtataaggatgtggcctctggaccatgcaaaattgtgatgagtaccgtttgtgtttatgtcaacaaacacggaaattttggcccgcatcttgaccccaagcggatccagcaactcccagatcacttcgggccgggacccgtgaacgtcgtgttacggcgcatcgtgcaggcctgtgtcgattgcgctctagagaccaaaaccgtgtttgggtaccttaaacccgacaacaggggtggggaagtgatcacagccagttttgacggcgaaacacacagcatccagctccctcctgtgaactctgcctccttcgcactgcggttcctggaaaatttctgccacagcttgcaatgcgacaatctcctgtcaagtcagcccttttcttcgagtagaggacacacgcactcttccgccgagcacgataagaaccagtccgccaaggaagacgtgactgagcgccagtcaaccaagaggtccccacagcagacagtgccatatgtcgtccccttaagtccaaagcttcccaaaaccaaagagtatgctagcgagggcgaacccctgtttgccggggggagcgctatacccaaagaggaaaacctgtcggaggactctaagtcaagcagccttaacagtggaaactaccttaacccagcatgcagaaatcccatgtacatccatacctctgtgtcacaggacttttcaaggtccgtccctggcacgacttcaagcccccttgtgggcgacatcagccccaaatcttccccccatgaggttaaattccagatgcagcgcaagtcagagggtaattag

SEQ ID NO: 204911 - DNA, 378 bp, synthetic construct
  misc_feature 1..378: note = Description of Artificial Sequence: Synthetic coding sequence
  source 1..378: mol_type = other DNA
tgagccaaggaggacgtgaccgagcggcagagcaccaagcggagcccccagcagacagtcccatacgtggtgcctctgagccctaaactgcccaaaactaaggagtatgcaagtgagggagaacctctcttcgcagggggaagcgctattcccaaggaggaaaacttatcagaggattcaaaatcttcgtctctgaattccgggaactaccttaatccggcctgtcgcaatcccatgtatattcatactagtgtaagccaggatttcagtagatctgtgccagggaccactagttcaccactggtgggcgacatatctcccaagtcttccccacacgaagtgaagtttcaaatgcagcgtaaatcagaaggcaattag

SEQ ID NO: 204912 - DNA, 1734 bp, synthetic construct
  misc_feature 1..1734: note = Description of Artificial Sequence: Synthetic coding sequence
  source 1..1734: mol_type = other DNA
atgggccagaccgtgaacgaggacagcatggacgtgaagaaggagaatcaagaaaagacaccccaaagccagatcccgcccgtcaacgattttaaagtggggatgaagcttgaagctcgtgatcctcgcaatgcaacttctgtgtgcatcgccaccgtgatcggcatcacaggtgccaggctgcggcttcggctcgatggctctgataatagaaacgatttctggagattggttgatagccctgatatccagcctgtgggaacgtgcgagaaagagggagacctgctgcaacctcctctggggtaccagatgaacacttcaagttggcccatgttcctgcttaaaacacttaacggtagtgagatggcctctgcgacgctgtttaaaaaggagcctcctaaaccaccccttaataacttcaaagtcggaatgaaactagaagccatagataagaaaaacccatacctgatctgccctgctaccattggcgacgtcaagggtgatgaagtccatatcacattcgacgggtggtcaggagcctttgactactggtgcaagtacgatagccgcgatatcttccctgcaggatggtgccgactaaccggagatgtcctacagcccccagggacttctgtgcccatcgtgaaaaatattgctaaaacagaaagctcgccaagcgaggccagccagcatagcatgcagtccccccaaaaaaccaccctgattctgcctacccagcaggtccgcaggtctagtcggattaagccaccgggtcctaccgccgtccccaaacgctcttcatccgtcaagaacattacaccacggaaaaaggggccaaacagtggcaagaaagaaaagcctctgccagttatctgcagtacttctgctgccagtctgaagtctcttacccgagaccgtgggatgctgtataaagacgtggcctcaggcccgtgcaagattgttatgagcacagtgtgcgtatatgtgaacaagcacgggaattttggtccgcacttggatccgaaaaggattcagcagctgccagaccactttggtccggggccagttaacgttgtgcttagacgaattgtgcaagcctgtgtggattgcgcccttgagaccaagacggtgttcgggtacctgaaaccagataacagaggaggcgaggtaatcacagctagcttcgatggggaaacgcattctattcaactccccccagtaaattcagcttcctttgcactgcgcttcttggagaatttctgtcactcccttcagtgcgataacctgttatctagccagccattttcatcctcacgcgggcacacacattcatcagccgagcacgacaagaaccagtctgctaaagaggacgttacagagagacagagcaccaaacgcagcccccagcagaccgttccctacgtcgtgccgctgtctcccaaactaccaaagacaaaggagtatgccagtgaaggtgaaccactctttgccggcgggtccgctatcccaaaggaggagaatctatccgaggattctaaatctagctcccttaactctgggaactacctgaatcccgcttgtcgcaaccccatgtatatccacacttctgtctctcaggacttcagcagaagcgtacccgggaccactagttctcccctggtgggggacatctcacccaagtcatcacctcatgaagtgaagtttcaaatgcagaggaaatccgaaggaaactag

SEQ ID NO: 204913 - DNA, 615 bp, synthetic construct
  misc_feature 1..615: note = Description of Artificial Sequence: Synthetic coding sequence
  source 1..615: mol_type = other DNA
atgcagagctacgccagcgccatgctgagcgtgttcaacagcgacgactacagtccggcagtgcaggaaaatattcctgccttgaggcgatcaagctcctttttatgtactgagtcttgcaactcaaaataccagtgtgaaactggtgaaaatagcaaaggaaatgtgcaggaccgggtcaaacggccgatgaatgctttcatcgtatggagccgagatcagcggcggaagatggctctcgagaatccccgcatgcggaacagtgagatcagcaaacaactagggtaccaatggaaaatgctgacagaagccgagaagtggcccttttttcaggaagcccagaaactgcaggccatgcatcgggagaaatacccaaactacaagtacaggcctaggcggaaggctaaaatgctgccaaaaaattgctctctcctgcccgctgaccccgcatccgtcctttgcagcgaagtccagttggataacagactttaccgagacgactgtaccaaggctacccactcacggatggaacaccagctgggtcacctgccccctatcaatgccgcctctagtccccagcagcgagatagatattcacactggactaaattgtag

SEQ ID NO: 204914 - DNA, 594 bp, synthetic construct
  misc_feature 1..594: note = Description of Artificial Sequence: Synthetic coding sequence
  source 1..594: mol_type = other DNA
atgcagagctacgccagcgccatgctgagcgtgttcaacagcgacgattactccccagcggtacaggagaacatccccgctctccgaaggtcatccagctttctctgcactgaaagctgcaattccaagtaccagtgcgaaaccggtgagaattctaagggcaatgtgcaagaccgcgtaaaacgccctatgaatgcattcattgtgtggtctagggaccagagaaggaaaatggcccttgagaatccgcgcatgcgcaatagcgagatcagcaagcagttgggatatcaatggaagatgctgacagaggccgaaaagtggcccttttttcaggaagctcaaaagcttcaagccatgcaccgggagaaatatccgaattacaagtaccgaccaagacgcaaggcaaagatgctgccaaagaactgctccctcctgccagccgacccagctagcgtgctgtgtagcgaggtgcagctggacaaccgactgtaccgagatgattgcaccaaagctacccatagccgcatggagcaccagctgggccatttacctccgattaacgctgccagcgctgccactggacccttgcaatag

SEQ ID NO: 204915 - DNA, 498 bp, synthetic construct
  misc_feature 1..498: note = Description of Artificial Sequence: Synthetic coding sequence
  source 1..498: mol_type = other DNA
atgcagagctacgccagcgccatgctgagcgtgttcaacagcgacgattacagccccgccgtacaggaaaacatacctgcccttagaagaagtagtagttttctctgtaccgaaagctgtaatagtaaataccaatgtgaaactggggagaacagtaagggaaacgtacaggacagagtgaagcggccaatgaacgccttcatagtatggtcccgagaccagcggcgcaagatggctcttgagaatccacgaatgagaaactccgagatttccaagcagctaggctaccagtggaagatgttgaccgaagcggagaagtggcctttctttcaggaagcccaaaagctccaggcgatgcacagagaaaaatatccaaactacaagtatcggccacgacgaaaggctaaaatgttgccgaaaaactgctcactcttgcctgccgatccagcctcggtcctttgtagtgaagtgcagggacagcaagtggttcagggctag

SEQ ID NO: 204916 - DNA, 3729 bp, synthetic construct
  misc_feature 1..3729: note = Description of Artificial Sequence: Synthetic coding sequence
  source 1..3729: mol_type = other DNA
atgaagaacctgctgaccgagaagtgcatcagcagccacaacttccaccaaaaagtgatcaagcagcggatggaaaagaaggttgactctaggtattttaaagacggggccgtaaagaaaccttacagcgctaaaaccctctctaataagaagagcagtgcaagctttggcatccgtagggaacttccaagtactagtcatctggttcagtatcgaggaactcatacatgcacaagacagggtcgcttgcgagagttgcggatccgatgcgtcgcccggaaatttttgtacctgtggattaggatgacatttgggagagtttttccctccaaggccagattttactacgagcagagactgcttcgcaaggtgttcgaagagtggaaagaggagtggtgggtcttccaacacgagtggaagctgtgcgtacgggccgattgccactacaggtattacctgtacaacctcatgttccaaacctggaagacctacgtgcgacagcaacaagaaatgcggaacaagtacattagggccgaagtgcacgacgcaaagcaaaagatgcggcaggcatggaagagctggctgatctacgtggtggtccgaaggaccaaactccagatgcaaacaaccgcactggaattcagacagcgcatcatcctgcgggtgtggtggagtacctggcggcagcggctcggtcaggtgagggtaagccgcgccctccatgcttcagctctgaagcaccgggccctctccttacaggtccaggcctggtcccagtggcgcgaacagttgctgtatgtgcaaaaggagaaacagaaggtcgttagcgccgtgaagcatcatcaacattggcaaaagcgacgctttctgaaagcgtggctggagtatctgcaggttagaagagtgaagcgtcagcaaaatgagatggctgagagatttcatcatgtgaccgtactgcagatttatttctgcgattggcaacaagcttgggaacgccgggaatcactatatgctcaccacgcccaagtcgagaagcttgctcgcaaaatggcgttgcgacgagctttcacacactggaaacactacatgctgctgtgcgcagaagaagcagcccagttcgaaatggctgaagagcatcacagacattcacagctgtacttttgctttcgcgcacttaaggataacgtgacacacgcccatcttcaacagattaggcgtaacttggctcaccagcagcatggggtgacgttgctacaccgcttctggaatctttggcggagtcagatagagcagaaaaaagaaagagagttgctccccttactccacgcagcttgggatcactacaggatagcacttctgtgcaaatgtattgagctctggctgcagtacacccagaagcggaggtataagcagcttctgcaagctagagctgacggccatttccagcagagagctctcccggcagccttccacacatggaatcgcctttggaggtggcgtcatcaggaaaacgtactgagtgctcgcgctaccaggttccaccgtgaaacgttggaaaagcaggtgttttctttatggagacagaagatgtttcagcaccgggagaataggttagctgaaagaatggctatcctgcacgcagaaagacagttactctatcgcagctggtttatgtggcaccaacaggccgctgctaggcatcaggaacaggaatggcagaccgtggcatgcgctcaccacaggcatggccggttgaagaaggcattttgcctgtggcgcgaaagtgcccagggtctgaggaccgagcgcacgggtagggttcgcgcagcagagttccatatggcccaactgctgagatgggcctggtctcaatggagagagtgccttgcgttacggggcgccgaacggcagaaactgatgcgcgcggacctgcatcaccagcactctgttttacatcgtgccttgcaggcctgggtgacctatcaaggtagggttcggagtattctaagggaggtggcagcacgggaaagtcaacataataggcagctgctgcgaggcgctctccgcaggtggaaggagaataccatggctagggtggacgaggccaaaaagacgttccaggcctccacccattatcgaagaactatttgctccaaagttctggtccagtggagggaagccgtgtcagtgcagatgtactatagacaacaggaggactgtgccatttgggaagcacagaaggtgcttgaccgtggatgcctccggacttggtttcagaggtggtgggactgtagccgacgttcagcccagcagagactccaattagaacgggcagttcagcaccatcaccgccagctgctgttggagggcttagccagatggaagacccatcacctgcaatgcgtgcggaagcgacttttgcaccgccagtccactcagctgctggcacagagattgagtcgtacctgcttccgccagtggagacagcagctcgcagcgagaagacaagaacagcgtgccaccgtacgggccctctggttctgggccttctctttgcaggccaaagtatgggcaacgtggctggcattcgtactggagcggcggcgaaagaaagctcgcttacagtgggcactccaggcctatcagggacagttgttgcaggagggcgctaccaggctgttgagatttgctgcatccatgaaagcatcccgtcagcagctgcaggctcaacaacaggtgcaagctgctcactccctgcacagagccgtgcggcgatgcgccaccctgtggaaacagaaagtcctgggcaggggggggaagccacagccccttgctgcgatcgccccttccagaaaggtcacctttgagggtccacttttgaatcggatcgcggccggtgccggcgatggaactttagaaacgaaaagacctcaagcgtcccgcccactgggggccctggggcggctcgccgccgaagagcctcacgcattagagctgaacactgctcactcagcgaggaagcagcctcggcgcccacacttcttgctcgaaccagcgcagagtcagagaccccagaaaccgcaagagcacggtttaggaatggcccagcctgcagccccctctctgaccagacccttcctagcagaggccccaactgccttagtgccgcactccccccttcctggcgctctgtcaagtgctcctggccctaagcagccacccactgcctccaccggccctgagctcctcctgctgccactttcctcctttatgccatgtggcgcagctgcacctgctcgcgtctctgcccagagggcaacaccaagagataaaccgcccgtgccatctagcctcgcctcagttcctgatcctcatttactgctgcctggagacttctcagctacaagggctggccccgggctgtctactgcagggagtcttgacttggaggctgagcttgaggagatccagcagcagctattgcactaccaaactactaaacagaacctctggagctgcaggagacaggcgtcatccctcaggaggtggctagagctgaacagggaagagcctggccctgaggatcaggaagttgagcagcaggtgcagaaagagctggagcaggtggagatgcagattcagcttcttgccgaggaactgcaagcacagcggcaaccaatcggcgcctgtgtagcccgcatacaggctctccgtcaggctttatgttag

SEQ ID NO: 204917 - DNA, 3483 bp, synthetic construct
  misc_feature 1..3483: note = Description of Artificial Sequence: Synthetic coding sequence
  source 1..3483: mol_type = other DNA
atgaagaacctgctgaccgagaagtgcatcagcagccacaacttccaccaaaaggtgattaaacagcgaatggagaagaaggtggacagcaggttttattatgagcagcgtttactacggaaggtcttcgaggaatggaaggaagagtggtgggtattccagcatgagtggaagctctgcgtccgagccgattgccattatcgatattacctctacaacctgatgtttcagacatggaagacttacgtgagacagcagcaagaaatgcgcaataagtatatcagggcagaggtccatgacgccaagcaaaaaatgaggcaggcttggaagtcatggctgatctatgtggtggtgagaaggactaagcttcagatgcaaacgacagcgttagaatttcgccaacgaattatactgagagtctggtggagcacatggcggcagcggctagggcaagttcgcgttagcagggccctccacgcctccgcactgaagcacagagctctgtccctccaggtacaggcctggagccagtggcgcgagcaactgctctacgtccaaaaggaaaaacagaaagtcgtgagtgctgtgaagcaccaccagcactggcagaagagaaggtttctgaaggcctggcttgaatatctgcaggtgcgccgtgtaaaaaggcaacagaatgagatggctgagcggttccaccatgtgacagttctccagatttatttttgcgattggcagcaagcatgggagcgaagggaaagcctttacgcacaccatgctcaggtggaaaagctcgccagaaagatggccctgcgaagagccttcactcactggaaacactatatgttgctctgtgcagaggaggctgcacagttcgaaatggcagaagaacaccataggcactctcaactgtacttctgcttccgcgccttaaaggacaacgtcacacacgcgcacttacagcagatccgacgaaacctggctcatcaacaacacggtgtaaccctgctccaccgtttctggaatctgtggcggtcgcagatcgaacagaaaaaagaacgggaattactcccattgttgcacgctgcgtgggatcactaccggatcgccctcctttgtaagtgcatagagttgtggttgcagtacactcagaagaggaggtataaacagctactgcaggcccgcgctgacgggcatttccagcagagggctctccccgcggcatttcatacctggaatcggctgtggagatggcgccaccaagaaaatgtgcttagcgcacgggcaacgcgattccatagagaaaccttggagaagcaggtctttagtttatggaggcagaaaatgtttcagcacagggagaacaggttagccgagaggatggccatccttcacgccgagcgtcagcttctgtatagaagctggttcatgtggcatcagcaagcagctgctaggcaccaggagcaggaatggcaaacagtcgcgtgtgctcaccaccgccatggcaggctgaaaaaggccttttgtctgtggagggaaagtgctcaaggcctgagaactgaacgcacagggcgggtgagagccgccgagttccacatggcccagctactgcgctgggcatggagccagtggagggagtgtctggcattgcgcggggccgaacgccagaagttaatgagagccgacctgcaccatcaacacagtgtcctgcacagagctctgcaggcctgggtgacttatcaaggaagggtgcgctctatcctgagggaggtcgccgctagggagtcccagcataatcgccagttattgcgaggggctttacgccgatggaaggagaacacaatggcacgggtggacgaagctaagaaaacgtttcaagccagcactcattaccggaggaccatttgctccaaagtgctggtccagtggagagaggccgtgagcgtgcagatgtattacaggcaacaggaagattgcgccatttgggaagctcagaaggtcttagaccgagggtgccttaggacttggtttcagcgttggtgggattgcagccgaagatcagcacaacaaagactccagctggagcgcgcggttcaacaccatcaccggcagttattgctggagggacttgcacgctggaagactcaccacctgcagtgcgttcggaaaaggcttcttcaccggcagagcactcaactcctggctcagcgtttaagtcgaacttgcttcagacaatggagacagcaattggccgcccggcgccaggaacagcgagctaccgtcagggcactgtggttttgggccttctcgctccaggctaaagtatgggcaacctggctggcctttgtgctcgaacggaggcgcaaaaaggcccgactgcagtgggctctgcaagcataccaagggcagctcctccaggagggtgcaacacgattactccgttttgctgcgagtatgaaagccagccggcagcagctccaggctcagcagcaggtccaggcggctcactccctacaccgcgccgtccgtagatgtgccaccctgtggaagcagaaggtgctgggccgtggcggcaagcctcagcctctcgctgccatcgccccatcacggaaggtgactttcgaagggcctctgttgaacaggatcgctgctggagccggggacggaaccctggaaacgaaaaggccacaagcctcccggcctctgggggccctcggacgtctggctgccgaggagccccacgcgttggagcttaatactgcccactcagcccgcaaacagccgcggcgcccccactttctgctagagccagcccagtctcagcggccacaaaagccacaggaacatggcttaggcatggcacagcctgccgctccgagtcttacacgaccattccttgctgaggcgcctacggccctggtcccacatagcccccttcctggagctctttcatccgcaccaggcccaaagcaaccccccacagcctcaaccggacctgagttgctcttgctacctctgagctcctttatgccgtgcggcgcagctgcgcctgcaagggttagcgcccaacgagctactccccgggacaaaccgcccgttccgtctagcctagcgagcgtacccgatccccacctattgctcccaggagacttttcagctacccgtgcagggcctggcctttctaccgcgggctcactcgacctcgaggcagaattggaagagatccagcagcagctgttacattaccagaccacaaagcaaaacctgtggagctgtcggcggcaggcctcaagcctgcgccgttggctggagcttaacagagaagagcctggcccggaggaccaggaggttgaacagcaggtgcagaaggagttggagcaggtggaaatgcagatacagctgttagccgaagaactgcaggcccaaagacagccaattggtgcgtgtgtcgcacggatccaggccctgcggcaagcgctctgctag

SEQ ID NO: 204918 - DNA, 3096 bp, synthetic construct
  misc_feature 1..3096: note = Description of Artificial Sequence: Synthetic coding sequence
  source 1..3096: mol_type = other DNA
atgaagaacctgctgaccgagaagtgcatcagcagccacaacttccaccagaaggttataaagcagcgcatggaaaagaaagtggactctcgcttctattatgagcagaggctgctccggaaagtatttgaagaatggaaggaggagtggtgggtattccagcacgagtggaaactctgcgtgagagcggattgccactaccgagtctggtggagcacctggaggcagaggctcgggcaggttagagttagccgggcgctccatgcctcagcattaaagcaccgagccttgtcccttcaggttcaagcatggagccagtggcgggaacagttactgtatgttcagaaggagaagcagaaggtcgtgtctgctgtgaagcatcatcaacactggcagaagagacgcttcctgaaggcctggctggagtacctgcaggtaaggagagtaaaaaggcagcagaacgaaatggcagaacggttccaccacgttactgtattgcagatctatttctgtgattggcaacaggcgtgggagcgcagggagtccctgtacgcccaccacgcccaggtggagaagctcgcacgcaagatggctttgcgcagagcgttcacccattggaagcactacatgttactgtgcgccgaagaggctgcccagtttgaaatggccgaggagcaccatcgccattcacagctctatttttgtttccgagcactgaaggataatgttacccatgcacatctccagcagataaggaggaacctcgcacaccagcagcacggtgtcactctcttgcacagattttggaatctgtggcgcagccagatcgaacaaaagaaggaaagagagctactcccactactgcacgccgcgtgggaccattaccggatcgctctcttgtgtaagtgtattgaactgtggctgcagtacacccagaagcgtcggtacaagcagctcctgcaggcccgcgctgacggccacttccagcagcgcgcgcttcccgccgcattccacacatggaaccgtctgtggcgttggcgccatcaggagaatgtgctgtcagctcgcgccacccgcttccaccgtgaaaccttggagaagcaggttttctcattatggaggcaaaagatgtttcagcatagagagaataggctggcggagagaatggccatcttgcatgcagagcgacagttgctgtataggagctggtttatgtggcaccagcaggcagcagcacgccatcaagaacaggaatggcagactgtcgcctgcgcacatcatcgacacgggcgcttaaaaaaggcattttgcctctggagagagagcgcccagggtctgcgaacagagcggaccggaagggtccgggcagcagagtttcacatggcacagcttctcaggtgggcctggagtcagtggagagagtgtctcgccctacgcggagctgaacggcagaagctcatgcgtgccgacctgcaccatcagcactccgtgctccatcgcgctctccaagcgtgggtgacctaccaaggcagggtgcgatcaattctgcgtgaagtggcagcaagggagtcccagcacaacagacaactcttgcgaggcgctctaagaagatggaaagaaaatacaatggcccgcgtcgatgaggcaaagaagacctttcaagctagcacacactacagaagaaccatctgtagcaaggtgctcgtgcagtggcgcgaggccgtgtctgttcagatgtactacaggcaacaagaggattgcgctatttgggaagctcagaaggtgctggaccgcggatgtctccgcacgtggttccagagatggtgggactgctccagacgatctgcccagcagaggctgcaattggaaagagccgtccagcaccaccatcgacaattgctgctggaggggctcgcaaggtggaaaacacatcacctgcaatgtgtgagaaagaggctgttgcatcggcagagcacccagttactggctcaacggctgtcccgaacctgcttccgtcaatggcggcagcaacttgcagcgcggcgccaggaacaacgtgctacggtgcgggccctgtggttctgggctttctctctacaggcaaaggtgtgggccacatggctggcattcgtactggaacgccgacgtaaaaaagcccgcctccagtgggccctgcaggcctatcaaggacagctccttcaggaaggcgctacacgcttgttgagatttgccgccagcatgaaggcctcgcgtcaacaactgcaggctcagcagcaggtccaggccgctcattctctgcaccgagccgtgaggagatgcgccacattgtggaagcagaaagtcctaggaagaggtggcaagcctcagcccttggcagccattgccccctctaggaaggtgaccttcgagggccctttgctcaataggattgcggcaggagctggggatggcacgctcgaaactaagcgtccacaggcttctagacccctcggcgccctcggcagactggctgctgaggaaccacacgctttggaattaaatacggcacatagcgcgcggaagcagccaagacgcccgcatttcctgttggagccggcccagagtcagcgcccccagaagccacaggagcatggattggggatggcccagcccgcggctccctcactcacccgccccttcctcgctgaggcacccaccgccctcgtcccccactcccccctaccaggcgccctcagctctgcaccaggtccaaagcagccccccactgcctcaaccgggcccgagctcctcctgcttcccctgagctcgttcatgccttgcggcgccgccgcacctgcacgcgtgagcgctcagagagccacgccccgagataaacccccagtgccgtcctcactagcaagcgtacccgatcctcatctcctgttgcccggagacttcagcgccacaagggctggccctggactgtccacagcagcatggaccctgcggctcaatctccgtcggagctcatctaactattgtacaacacgacccccgtcccgtactagcggccctgttggtggcaagagagctgcctgtgccggcggctggtcctag

SEQ ID NO: 204919 - DNA, 2976 bp, synthetic construct
  misc_feature 1..2976: note = Description of Artificial Sequence: Synthetic coding sequence
  source 1..2976: mol_type = other DNA
atgaagaacctgctgaccgagaagtgcatcagcagccacaacttccatcagaaggtcattaagcagagaatggagaagaaggtggacagtagatatttcaaggatggagctgtcaaaaaaccctattccgctaaaacgctgtcaaacaaaaagagcagcgcgtcatttgggatcagaagagaactgccaagcacgtctcatctggtgcagtaccgcggcacacacacctgcacgaggcaaggaaggttacgtgagctgcgcatcagattttactacgagcagcgcctccttcggaaggtatttgaggaatggaaggaggagtggtgggtgttccaacatgaatggaagctgtgcgtgcgcgctgactgccactacaggtactatttgtacaacctcatgttccagacctggaaaacctatgtccggcagcaacaggagatgaggaataagtacattcgagcggaggtgcatgatgcaaagcagaaaatgcggcaggcttggaaaagctggctaatctatgtcgtggtgaggcgaaccaagttgcagatgcaaaccacagctctcgaatttaggcagagaatcattttgcgcgtctggtggagcacctggcgccagagactcgggcaggtgagagttagtagagctctgcacgcgagcgctcttaaacaccgggcgctgtcgctacaggtacaggcttggtcccagtggagggagcagctcctgtatgtgcaaaaggagaagcagaaggtagtgagtgccgtaaagcaccatcaacattggcagaagaggcgattcctgaaggcatggctcgaatacctccaagtgcgaagagtcaagcgacagcaaaatgaaatggctgaacgtttccaccacgtcaccgtcctccagatctatttttgcgattggcagcaggcctgggagcgccgcgaaagtctgtacgcccatcacgctcaggtagagaaattagcccggaaaatggctctccggcgcgccttcactcattggaaacactatatgctcctgtgcgccgaagaagccgcccaatttgaaatggccgaagagcaccacaggcattctcagttgtacttctgttttcgagccctcaaagataacgttacccatgcccacctgcagcagatccgcaggaacttggcccaccagcaacatggcgttaccctgttgcatcgcttttggaatctctggcgctcccagatcgagcagaagaaggaaagggagctcctgcccctgctgcacgcagcttgggatcactaccgaatagctctgctatgcaaatgcatagaactttggttacagtacactcagaagagaaggtataaacagctgctgcaggcaagggctgatggtcactttcagcagagagccctgccggccgcctttcacacttggaatcgcctctggagatggcgccaccaggagaacgttctatctgcccgagccacgcgctttcatcgtgaaactctagaaaaacaagtattctccctgtggcggcagaagatgtttcaacaccgggaaaatagacttgctgagcgcatggccattctccacgccgaacgtcagctgctgtacagatcctggttcatgtggcatcagcaggcggccgcaaggcaccaagaacaggaatggcaaaccgtcgcttgcgctcatcaccgccacggcaggctgaagaaggccttctgtctgtggagggaaagcgctcagggccttaggacggagcgaaccggccgcgtcagagcagccgagttccacatggcccagttgctcagatgggcctggtcccagtggcgagaatgtctggctctccggggcgcggagaggcaaaaattgatgagagcagatctgcaccatcagcatagcgtgctgcatcgagccctccaagcgtgggtgacctatcagggacgggtcaggtcaatacttcgggaggtcgcagcacgtgaaagccaacagctgcaagcccagcagcaggtgcaagcagcacactccctccatagagcggtccgtcgatgtgccaccttgtggaagcagaaggtcctcgggagaggggggaagccccagcctctggccgccatcgctccttcgcggaaggtgacatttgaaggacctcttctaaacagaattgcagcgggggcgggagacggcaccctcgagacaaagagaccacaggcctcacgtcctcttggcgcgctgggtcggctcgctgccgaagagcctcatgcgctggagctgaataccgcacactctgctcgaaaacagccgcgacgtcctcacttcctactagagccggcgcagtctcaaagaccccagaaaccccaggagcatggcctgggcatggcccagcccgctgccccttcacttacccgtcctttccttgcagaagcaccaacagcactggtgccacactcaccacttccaggagctctgtcctctgcccccgggccgaagcagccaccgacagcttccacaggacctgagctgttgctgctgccactcagttccttcatgccatgcggggccgcggcaccagcccgggtgagcgcccagagggctacacctagggataagccgcccgtgccttcttccctggcatccgtacccgatccccacctcttattacccggagactttagcgctaccagagcgggtcctggcttgtctaccgcaggatccctggatctggaggctgagttggaagaaattcagcagcagttactgcattatcagaccacaaagcagaacttgtggtcctgtagaaggcaggcctccagtcttcggcgatggttggaattgaatcgggaagagccaggacctgaggaccaagaggtggagcagcaggtacaaaaagagctagagcaggtcgaaatgcagatccagttgttggcagaagagctccaagcgcaacgccagccaattggcgcctgtgtcgcccgcatccaggcactgcgccaagctctatgttag

SEQ ID NO: 204920 - DNA, 3636 bp, synthetic construct
  misc_feature 1..3636: note = Description of Artificial Sequence: Synthetic coding sequence
  source 1..3636: mol_type = other DNA
atgaagaacctgctgaccgagaagtgcatcagcagccacaacttccaccaaaaggtgatcaagcagaggatggagaagaaagtagatagtaggtacttcaaagatggggccgtaaaaaaaccttactccgccaagaccctgagtaacaagaaatcatctgccagttttgggattagacgtgagctgccctctacttcccacctagtgcagtaccggggcactcacacatgtacacgacagggccgcctgagagaactccgcataaggtgtgtggctcgtaaatttctgtacctgtggattcgcatgacctttggcagggtgttcccctccaaagcccgtttttattacgaacagcggcttttgcggaaggtgtttgaagagtggaaggaagagtggtgggtgtttcagcatgaatggaaattgtgcgtcagagctgattgccactataggtactatctatacaatctgatgttccaaacttggaaaacctacgtaagacagcagcaagaaatgagaaacaagtatatccgcgcagaggtgcatgatgctaaacagaaaatgaggcaggcttggaaatcgtggttgatttatgtggtggtccgaaggaccaagctgcagatgcagactaccgccctggaatttaggcagaggattatcctacgcgtctggtggtctacctggcgacagcgactcggtcaagtgagggtgtctcgcgctctacatgcttctgccctaaagcaccgggcactgtctttacaggtccaggcctggtctcaatggagagagcagctgctgtacgtgcaaaaagagaagcagaaagttgttagcgccgtgaaacaccaccagcactggcagaaaagacgatttctgaaagcttggctggagtaccttcaggtgcgccgggtaaagaggcaacagaacgagatggccgagcgtttccaccacgttacagtgctgcagatttacttttgcgattggcaacaggcatgggagcggagggagtccttgtatgcccaccacgcccaggttgagaaattagcccgcaaaatggcccttcgcagggctttcactcactggaagcactacatgctgctgtgtgccgaggaagctgctcagtttgagatggcagaggagcatcatcgtcattcacaactacttctgcacagattctggaacctctggaggtcacagatcgagcagaagaaagagagggagttgctgcccctccttcatgcagcctgggaccactaccgaatcgcccttctgtgtaaatgtatcgaactgtggctgcagtacacgcaaaaacgccgatataaacagctgctgcaggctcgcgcggatggccacttccagcagcgagcattgcccgcagcattccacacgtggaatcgactttggcggtggagacaccaggagaatgtgctatccgcacgcgccacgaggttccacagggaaactctggaaaagcaggtcttctccctgtggagacagaaaatgttccagcacagagaaaaccggctcgcagagcgcatggcaatcctgcatgcagagcgccagttgctgtaccggagctggtttatgtggcaccagcaggcagccgccaggcatcaagagcaggagtggcaaaccgtggcctgtgctcaccaccgccatggtaggttgaagaaggcgttttgcctgtggcgcgaaagcgcccagggcctccgtaccgagagaaccggcagagtccgagctgcggaattccacatggctcagcttttgcgatgggcttggtcgcagtggcgtgaatgtttggcccttaggggagccgagcggcagaaactgatgagggccgacctgcatcaccaacacagcgtccttcacagggctttgcaagcgtgggtgacctaccaaggaagggtgagatctatccttcgcgaagtggccgcccgcgagtcacagcacaatagacaactactgaggggcgccctccggaggtggaaggagaatacgatggccagagtcgatgaggctaaaaaaactttccaagcctctacgcattacagacgcacaatctgcagtaaggtccttgtccagtggcgcgaggccgtttctgtccagatgtattataggcagcaggaggactgcgcaatctgggaagcccagaaggtgttagacaggggctgtctgagaacgtggttccagcggtggtgggattgttcaagaagaagtgctcagcagcgcctccaattggagcgagcagtgcagcaccaccacagacaactgctcttagaaggccttgcaaggtggaagacccaccatctgcaatgcgtgcggaaaagactgctgcacaggcagtccacccagctgttagcccagaggctaagccgaacatgttttcgccaatggagacagcaactggcggcgagaagacaggaacagcgtgccacagtgagggcgctgtggttctgggccttctctttgcaggccaaggtgtgggccacctggcttgcttttgtcttagagagaaggaggaagaaggctcggctgcaatgggccctgcaggcatatcagggacagctcctgcaagaaggagccacccgactcctgagatttgccgcttctatgaaggcctcacgacaacagctacaagctcaacagcaggtgcaggcagctcacagcctgcacagagcagtgcggaggtgcgccacgctttggaagcaaaaagtgctcggtcgtggcggcaaaccccagcccctggccgccattgctccctcaaggaaggtaaccttcgaaggaccccttcttaataggatagcagctggtgctggcgacggcaccttggagaccaaaaggccccaggcatcaagaccgctcggcgctctgggccggctggccgcagaagagcctcacgctctggaacttaacacagctcacagtgcccgtaagcaacctaggcgaccccactttctgctagagcctgcccaaagccagagaccccaaaagccccaagagcatggccttgggatggcccagcccgctgcccccagcttgacccgaccattccttgccgaggctcctacggccctagtaccacactcgcccctgcccggggctttatcaagcgctcctggacctaagcagcctccaacagctagtaccggcccagaactgcttctgttgcctctatcgagtttcatgccctgcggcgctgcagcccccgctagagttagtgctcaacgcgctacgcctagagacaagcccccggtgcctagtagcctggcttcagttccggaccctcacctgctgcttcctggagatttcagtgccactcgcgcgggcccaggcctgtcaactgcagggtcactggacttagaagccgaactggaggaaatccaacagcaactgttgcactaccagactaccaaacagaacctctggagctgtcgacgccaggctagtagtctgcgacgctggttagagctcaacagagaggagcccgggccagaggatcaggaggtcgagcagcaggtgcagaaggaattagagcaggtggaaatgcagattcagcttttggctgaggagttacaggctcagcggcagccaattggcgcctgcgttgcacgaatccaggctttgaggcaggccctgtgctag

SEQ ID NO: 204921 - DNA, 3483 bp, synthetic construct
  misc_feature 1..3483: note = Description of Artificial Sequence: Synthetic coding sequence
  source 1..3483: mol_type = other DNA
atgaagaacctgctgaccgagaagtgcatcagcagccacaacttccaccagaaagtgattaagcagcggatggaaaaaaaggtggacagtaggttctactatgagcagaggttactgcgcaaagtatttgaggagtggaaggaagagtggtgggtgtttcagcacgaatggaaactttgcgtgcgggctgattgccactaccgttactacctttacaatctcatgtttcagacttggaaaacctacgtacgtcagcagcaggagatgaggaacaagtatatccgagccgaagttcacgatgcaaagcagaagatgagacaggcttggaagtcgtggctgatttatgtggttgtgcgccgtactaagttacagatgcaaacgacagccttggaatttcgtcagagaattattctgcgtgtgtggtggtccacctggaggcaacggctgggacaggtgcgagtctcacgcgctctacacgcatccgctctgaagcatagggctctctcgctgcaagtgcaagcttggagccagtggcgggagcaactgctgtacgttcagaaagaaaaacagaaagtcgtttccgcagtgaaacaccatcaacactggcaaaagaggaggtttctcaaggcttggctggagtacctccaggtgcgaagagtgaagcggcagcagaacgaaatggcagaacggttccatcatgtcacggtgctccaaatctatttctgtgactggcagcaggcctgggagcggagggaatctctttatgcccatcacgcccaggttgagaaactggctcgcaagatggctctccggcgggcttttacacattggaagcattatatgctactctgcgctgaggaggcggcccagttcgagatggccgaggagcaccaccggcactcacagctgtacttctgctttcgcgccctgaaggacaacgtgactcacgcacatctgcagcaaatacgccgaaacctcgcccaccagcaacatggggtgaccctccttcaccggttctggaacttatggaggtcgcagattgaacagaagaaagaaagagaacttctgcctctcttgcacgccgcatgggaccactacagaattgccttgctctgtaaatgcattgaactctggttgcagtatacacagaaaagacgttacaagcagctgctccaagctagggcggatggtcacttccagcagcgagcactcccagcagcatttcacacgtggaatagactgtggcgatggcgccaccaggaaaacgtgctctctgcacgagccacacgattccacagagaaacgttagaaaagcaagttttctccctgtggagacagaaaatgttccaacacagagagaaccggttagctgaacgaatggcaattttgcatgccgagaggcagttgctatataggagctggtttatgtggcaccagcaagcagccgcacgacaccaggagcaggaatggcagactgtggcgtgcgcacatcataggcacggtagacttaagaaggccttctgcctctggcgggagtcagcccagggcctgcgcactgaacgcacagggagggtgagggccgctgaattccacatggcccaactcctgcgctgggcttggtcacagtggcgagagtgtctcgcactgcgaggggccgaacgacagaaactgatgcgtgccgacctgcaccatcagcactccgtgctccatcgagccttacaggcttgggtcacttatcaaggaagggtgcggtcaattctgcgtgaggtggccgcccgtgagagtcagcacaacagacaacttctgagaggcgccctcaggcgctggaaggaaaacactatggctcgggttgatgaagctaagaaaacttttcaagcaagcacacattatagacgtactatctgctctaaagtactggtccaatggcgcgaggcagtgtctgtgcagatgtactacaggcaacaagaggactgtgccatatgggaggcgcagaaagtactagatcggggctgcctgcggacttggttccagagatggtgggattgctccaggaggagcgcgcaacagaggttgcagctggagagggctgtgcaacaccaccataggcaactgctgctcgaggggttggcaagatggaagactcaccatctgcagtgcgtgagaaaacgccttctgcaccggcagtccacacagctgttggctcagcgcctctcccgaacctgttttagacagtggcggcaacagctcgccgctcgcaggcaggagcagagggccacggtgagggcattatggttctgggcgttctcactgcaggccaaggtttgggctacctggctggcctttgtgctggaacgacggcgaaagaaggctcggctgcaatgggccctgcaagcataccaggggcaattgctccaagagggcgctacaagacttctgcgattcgcggcgagcatgaaagcctccaggcaacaactgcaagcccagcaacaggtgcaggcagcccactcgctccacagagccgtgcggcgttgcgctacattgtggaaacagaaggttcttgggcgaggaggtaagcctcagcccctggctgcaattgccccatcaaggaaagtgacatttgaggggccgttgcttaacagaatcgcagcaggagcaggagacgggactctggagaccaaacgcccacaggcttcacgaccgctgggggccttggggcgcctcgccgcagaggagcctcacgctctggaactcaacaccgcacattccgccagaaagcagcctaggcgcccacactttctcttggaaccagctcagtcccagcggccacagaagccacaggagcacggcttgggcatggcccagccagcagccccttctcttacccgccccttcctcgccgaggcccccaccgcattggtgccccattctccactccccggagccctcagtagtgcgcccgggcccaaacagccacctacagctagcacaggcccagagcttctgcttctcccgcttagctcatttatgccttgcggtgccgcagcacccgctagggtgtccgcccagcgggccaccccgagagataagcctccagtcccttcatccctagctagcgtacccgacccgcacttactcttacccggtgactttagcgcaactcgggccggaccggggctctccactgccggctccctggatcttgaagctgaactagaagaaatccagcagcagctgctgcattatcagaccaccaagcagaatctgtggtcatgcagaagacaggcaagcagtctgcgccgttggctcgagctcaacagggaagaacctgggcccgaggatcaggaagtggagcaacaggtccagaaggagcttgagcaggtggaaatgcagatacagctgttagccgaagagttgcaggcccaacggcagcccatcggagcatgcgtggctagaatccaagccctgaggcaggcactctgctag

SEQ ID NO: 204922 - DNA, 240 bp, synthetic construct
  misc_feature 1..240: note = Description of Artificial Sequence: Synthetic coding sequence
  source 1..240: mol_type = other DNA
atgaagaacctgctgaccgagaagtgcatcagcagccacaacttccaccagaaggttatcaaacagcgcatggagaaaaaggtggatagcagatacttcaaagatggggccgttaaaaagccttactctgccaagactctgtccaacaagaagtcttccgcttctttcggcatcaggagggaactgccctccacatctcacctcgtgcagtatcgtggcacacatacctgtactaggtag

SEQ ID NO: 204923 - DNA, 3564 bp, synthetic construct
  misc_feature 1..3564: note = Description of Artificial Sequence: Synthetic coding sequence
  source 1..3564: mol_type = other DNA
atgaagaacctgctgaccgagaagtgcatcagcagccacaacttccatcagaaggtgatcaagcagaggatggagaaaaaggttgattcaaggtatttcaaggatggagccgtcaaaaagccctactcagccaagactctttccaataaaaagtcgtctgcttcgtttggcatccgccgagaactgcccagtacttcccacttggtgcagtaccgtgggacccacacgtgtaccagacaaggacgcctgagggagctgagaatcagattctattatgagcagcggctcctccgaaaagtgttcgaggaatggaaggaagagtggtgggtgttccaacacgaatggaagctgtgcgtgagagctgactgtcactatcggtactatctttacaacctaatgtttcagacatggaaaacctatgttagacagcaacaggagatgagaaacaagtatatccgcgctgaggtacacgacgccaagcagaagatgaggcaagcatggaagagttggcttatctatgtggttgtcagaaggactaagctgcagatgcagactactgcactggaatttaggcagcgaattatcctgcgggtgtggtggtctacatggcgacaacggttggggcaagtgagagtaagtcgcgcgctgcatgccagtgcactgaaacaccgagccctctcgttacaagtgcaggcttggagccagtggcgggaacagctgctatacgttcaaaaggaaaaacagaaagtcgtttcagctgtgaagcatcaccagcactggcagaagagaagatttctgaaagcatggcttgagtatctgcaagtgcgtcgggtgaagaggcaacagaacgaaatggcagagaggtttcaccatgtgactgtcctgcagatctatttttgcgattggcaacaggcttgggaacgacgagagagcctgtacgctcaccacgcccaagtggaaaagctggcacgcaaaatggccctgcggagagcattcacccattggaaacattatatgttactttgcgccgaagaggccgcacagttcgagatggcagaggagcatcacaggcacagccaactgctgctacatcggttctggaatctctggagatcccagattgaacaaaagaaggagagggagttgctccctttgcttcacgctgcttgggatcactatagaatcgcactcctgtgcaagtgtatcgaattgtggctccaatacacccagaagcggaggtacaaacagctgctccaggctcgtgcggacggccactttcaacagagagcactgccagctgcgtttcacacttggaacagactgtggagatggaggcaccaggaaaacgtgctgagtgcccgtgctacccgattccaccgggagacgctggaaaagcaggtgttcagtttatggcgacaaaaaatgtttcaacacagggaaaaccggttagcggagcggatggcaatactccacgctgagcgccagctcctgtaccggagttggtttatgtggcaccagcaggccgccgccaggcaccaggagcaggaatggcaaacagttgcctgtgcccatcaccggcacggtcggttgaaaaaggctttctgtctttggcgggaaagcgcccagggcctgagaacggagaggaccggccgagtgcgcgcagccgaattccatatggcccagctcctgaggtgggcctggtcccagtggagagaatgcctggccctgcgaggcgccgaacggcagaaactgatgcgggccgacctccaccatcaacactcagtcttacaccgcgcactgcaggcttgggtgacctatcagggtcgggtgagaagcattctgagggaggtcgctgcacgggagtcacaacacaacagacagctgctcagaggtgctctgaggagatggaaagagaacaccatggccagggtggacgaagccaagaaaacgttccaggcaagtacacactaccgacgcacaatctgctcaaaagttctggtccaatggagagaggcagtgtctgtgcagatgtactatcggcagcaggaggactgtgccatttgggaagcacagaaggtactggaccggggttgtctgcgcacttggtttcagcgctggtgggactgttccagaaggagtgcacagcagagactgcagctcgagcgagccgttcagcatcatcaccgccagctgctcctggaaggacttgctcgatggaaaacacatcacctccagtgtgtaagaaagcgacttctccatcgccaatctacgcagctgttagcgcagaggttgtctcggacttgtttccggcaatggcgacagcagcttgcagcaagacgtcaagagcaaagagcaaccgtgcgggctctttggttctgggcctttagcttgcaagcaaaggtgtgggccacctggcttgccttcgtcctggagcggagacggaagaaggcccgcctacagtgggctctgcaggcttatcagggacaactgctgcaggaaggcgcaacacggcttctcagatttgccgcttccatgaaggcctcgagacagcagctacaggcacagcagcaggtgcaggcagcacactcactgcatagagctgtacgcagatgtgctaccctttggaaacaaaaggtgctgggtagggggggtaagcctcagccattagccgctatagcaccctctcggaaggtaacatttgaaggacctcttttgaatcggattgctgctggagcaggggatggcaccttagaaacgaagagaccccaggcctcccgccctctaggcgcactcggcaggctcgctgccgaggagccacacgctctggagctgaatactgcacactccgctcgaaaacagccgagacgcccccatttccttttagagcccgcccagtcccagagaccccagaagccccaggagcatggactgggcatggcccagccagctgctcccagtctgacaagaccatttctggcagaggccccaaccgccttggtgccgcacagccctctacccggagcactctccagtgcccccggtcctaaacagccaccaaccgctagcacaggtcctgagctgctgcttctccccctgagctcattcatgccatgcggcgcggccgcgccagcccgagtgagtgcccagagagctaccccacgggacaagccccctgtgccctctagtctcgcatcagtgccggacccccatctcctgctaccaggcgacttcagtgctacccgtgccggaccaggattgagtaccgccggatccctcgatctcgaagccgagctcgaagaaattcagcaacagctcctgcactaccagacaaccaagcagaacctgtggtcgtgcagacgacaggccagttcactgaggcggtggttggaactgaaccgggaggaacccggccctgaggatcaggaggtagagcagcaagtccagaaagagctggaacaggtggaaatgcaaattcaattactcgccgaggaactgcaggctcagcgtcaacctatcggggcctgcgtggccagaatccaggcacttcgacaggcgctttgctag

SEQ ID NO: 204924 - DNA, 378 bp, synthetic construct
  misc_feature 1..378: note = Description of Artificial Sequence: Synthetic coding sequence
  source 1..378: mol_type = other DNA
atggacgccgtggccgtgtaccacggcaagatcagccgggagaccggtgaaaagctccttctggccactggcctggacggaagctatctgcttcgagactctgaatcagtaccgggtgtttattgcctttgcgtgctgtatcatggatacatatacacatatcgggttagtcagacagagacaggctcatggagcgccgagacagcaccgggagtccataagagatacttccgcaagatcaagaacctgatctcggcctttcaaaagcccgatcagggcatcgtgatcccactgcagtaccccgttgaaaaaaaaagctctgccaggtctacgcaggggattagggaggaccctgacgtgtgtcttaaggctccctag

SEQ ID NO: 204925 - DNA, 387 bp, synthetic construct
  misc_feature 1..387: note = Description of Artificial Sequence: Synthetic coding sequence
  source 1..387: mol_type = other DNA
atggacgccgtggccgtgtaccacggcaagatcagccgggagaccggagaaaagcttttgcttgctacagggctagacggatcatacctgcttagggactctgagagcgttcccggtgtatattgcttatgcgtgttgtaccacggatatatttatacatatagagtatcgcaaacagaaaccgggtcttggagcgccgagacagcacccggagtgcacaagcgatattttcgcaaaataaagaatcttatctcagcttttcaaaagccagaccaagggatcgtgattcccctgcagtatcctgtcgagaagaaatcctcagcccgatctacacagggtaccacgggtatccgggaggatcccgatgtgtgtctgaaggctccatag

SEQ ID NO: 204926 - DNA, 177 bp, synthetic construct
  misc_feature 1..177: note = Description of Artificial Sequence: Synthetic coding sequence
  source 1..177: mol_type = other DNA
atggacgccgtggccgtgtaccacggcaagatcagccgggagaccggggagaaactgttgttggctactggattagatggatcctatttgctgcgagacagcgagagtgtccctggagtttactgcctatgcgtcttacaccactggggatatattaaatttattaacaagctctag

SEQ ID NO: 204927 - DNA, 234 bp, synthetic construct
  misc_feature 1..234: note = Description of Artificial Sequence: Synthetic coding sequence
  source 1..234: mol_type = other DNA
atggacctgccctactaccacggccggctgaccaagcaggactgcgaaactttgttgctgaaggaaggcgtagacggcaactttctgttacgggacagcgagtcaatcccaggcgtattatgcctgtgtgtaagctttaaaaatatcgtgtacacatatagaatattcagggaaaaacacggttattacagaatccaaaacagcaactccgattacgtggatgtgttgccatag

SEQ ID NO: 204928 - DNA, 399 bp, synthetic construct
  misc_feature 1..399: note = Description of Artificial Sequence: Synthetic coding sequence
  source 1..399: mol_type = other DNA
atggacctgccctactaccacggccggctgaccaagcaggactgcgagactctgctgttgaaagagggcgtggacgggaatttcctactgcgcgattccgaaagtatcccgggggtgctctgtctgtgcgtatccttcaagaacattgtgtacacatatcggatcttccgggaaaaacatggatattataggatccagactgcagaagggagtccaaagcaagttttcccgtctctaaaagagttaataagcaaatttgaaaaaccaaatcagggcatggtggtccacctgttgaaacccattaaaaggaccagtcctagcctgagatggcgaggactgaaattagagttagaaacgttcgtcaactccaactctgactacgttgatgtgttaccatag

SEQ ID NO: 204929 - DNA, 2271 bp, synthetic construct
  misc_feature 1..2271: note = Description of Artificial Sequence: Synthetic coding sequence
  source 1..2271: mol_type = other DNA
atgaacggcgcccccagccccgaggacggcgccagccccagcagcccaccgttgccccctccccctcctccttcctggcgcgagttctgcgagtcccacgcacgcgccgcagctctcgactttgcacgaagatttaggctttatctcgcctcccaccctcagtacgcgggcccgggcgcggaagctgcattcagccgaagatttgccgagctattcttgcagcacttcgaggcagaggtagcccgtgcctccggatcactgagcccacccatcttagcaccactctcccccggtgccgagatatcacctcatgatctgtctctagagagctgcagagtgggcgggccgctggcagtcctgggaccctcacgatcctcagaagatcttgcaggtcctttgccgtcttcagtgagctcttcaagtacgacctcctccaaacctaagctgaaaaaacggttttccttacggtccgtggggcgaagcgtgcggggcagcgtgagaggcatccttcaatggcgcggcactgtagatccgccgagtagtgcagggcctctggagacatcatcggggccccccgtgctgggcgggaactccaactctaacagtagtgggggtgccggaactgtcgggcggggactggtgtcagacggaacttcacctggcgagcggtggacccaccggtttgagagactaagattgtccagaggcggtggcgcactcaaggatggcgcaggaatggtacaacgcgaggagcttctgagctttatgggtgccgaggaggccgcaccggatccagcgggggttggccgcggtgggggggtagccggccccccctccggggggggcggtcagccacagtggcaaaaatgtcggctgctgctgcgctctgagggggagggcggaggggggagcaggcttgagttcttcgttccacccaaagctagtagaccacgcctgagcattccctgctctagcatcaccgatgtgcggacgacaactgctctggagatgcccgacagggaaaatacttttgtagtgaaggttgaaggacctagtgagtacatcatggagacggttgacgcgcagcatgtgaaggcctgggtttccgacattcaggagtgtctgtcaccgggcccatgccctgctacaagcccgcggcccatgaccttgcctctggcgcccggaaccagcttcttgactcgggaaaacacggactcactagaactctcttgcctcaaccactctgagtccctcccgagccaggatctcttgctcggcccttctgagtcgaatgatcggctgtcgcagggcgcgtacggaggcctctccgatagaccctccgcttccatctccccttccagtgcctccatcgcagcttcacattttgacagcatggaacttctgccccccgaactacctcccagaattcctattgaagaaggccctcctactggcacggtacaccccttaagtgctccttatccacccctcgacacccctgagactgccaccggttcatttcttttccagggcgagcctgaaggaggagagggcgaccagccactttccgggtacccttggttccatggaatgctgagtaggcttaaagcggcccagttagtgctgacaggcgggaccggttcccatggagtgtttctggtgcggcagtcagaaactcgccggggagagtacgtgctcaccttcaactttcaggggaaagccaaacacctccgtctatcgctgaatgaggaggggcagtgcagggtgcagcatctctggttccaatccatctttgacatgctcgagcactttcgggtccacccaatacccttggagtcgggaggcagctccgacgtagtgctggttagctatgtgccttcctcccagcgtcagcaggaacctaccaccagccacgatcccccccagccccccgaacctcccagctggaccgatcccccacagcccggcgcagaggaggcttcaagagcgccagaagttgcggccgctgccgctgctgctgccaaagagcgccaagaaaaggaaaaggctggaggcggcggcgtgcccgaggagctcgtgcccgtggtggagctcgtaccagtggtcgagctcgaggaggcgattgcgccaggaagcgaagcccaaggcgccgggagcggaggtgatgcaggtgtcccccctatggtgcagctacagcaatcgccactcgggggcgacggtgaggaaggagggcatccccgggccattaataaccagtactcattcgtgtag

SEQ ID NO: 204930 - DNA, 2016 bp, synthetic construct
  misc_feature 1..2016: note = Description of Artificial Sequence: Synthetic coding sequence
  source 1..2016: mol_type = other DNA
atgaacggcgcccccagccccgaggacggcgccagccccagcagccctcccttgccaccacctcccccaccaagctggcgagaattttgtgaaagtcacgcgagggcggctgccctggatttcgccagaaggttcagattgtatctggctagtcatcctcagtacgctggacctggcgccgaagcagcttttagccgccgctttgcagaactatttttgcaacatttcgaggcggaagttgctagggcttcaggatctttatcccctcccatcttagcccccctgagtcccggtgccgagatttccccgcacgatctgagcctggaaagctgcagggtgggaggtcccctggccgttctcggaccctctagaagttcggaggacctggccggccctctgcccagttcagtgagttccagttcaacaacctctagtaagccaaaacttaaaaaaagattctctctcagatcagtcggtcggtccgttcgaggtagcgttcggggcatcctccaatggaggggcaccgtagacccaccaagttcagccggcccattggagacctccagtggacccccggtgttaggcgggaattcaaattccaacagctcagggggcgccggaacggtagggagaggcttggtctcagatggaacgtctcctggtgaaaggtggacacatagatttgagaggctgagactctccagggggggtggcgctctgaaagatggggctggcatggtccagcgtgaggagctgctcagctttatgggagccgaagaggcagcgcccgatccagcaggtgtaggcagaggcggaggcgtggcgggtccaccatcgggggggggtggccagccacagtggcagaagtgtcggctgttactgaggagcgagggtgaaggcggcggtggaagccgactggaattctttgtgccacccaaggcttcgcggccccgactttcaattccatgctcatccattacggatgtgagaactaccaccgcactggaaatgcccgatcgcgagaacaccttcgtagtgaaggtagaaggcccaagtgagtatattatggagacagtggatgctcagcacgttaaggcatgggtgtctgatatacaggagtgcctctctccgggcccctgtcctgccacctcccctagacctatgacacttcctctagcacccggtacgagctttctgacacgggagaatacggactctttggagctttcgtgcctgaatcatagcgagtctctcccttcacaggacctcctgctgggacccagcgagtccaacgatcgtctgtctcagggtgcctacggaggattgagcgaccgcccatcagcttccattagcccttcctctgcctctattgcggcctcacacttcgatagcatggaactgttgccgccagaactccctcctcgtattccaatcgaagagggcccccctactggtactgtgcaccccctgagtgccccataccctccactggacacgcctgagaccgccacaggctcgttcctgttccagggagaacccgagggaggggaaggcgaccaacctctaagcgggtatccgtggttccacggcatgctttcgcgcctgaaggccgcgcaactggtgttgaccggcggcactggcagtcacggcgttttcctggtgagacagagcgaaaccaggcgcggagaatatgttcttacttttaattttcagggaaaagctaaacatttgagactatctcttaacgaggagggccagtgtcgggtacaacatctttggttccaaagcatcttcgacatgctcgagcattttcgtgtacaccctatcccacttgaatccggcggcagttccgatgtggtcctggtctcttacgtaccatctagccaaaggcagcaggggagggagcaggctggtagtcacgcgggggtctgtgagggtgacgggtgccaccctgatgcctcctgtaccctgatgccattcggcgcgtcggactgcgtgaccgaccatcttccctag

SEQ ID NO: 204931 - DNA, 2052 bp, synthetic construct
  misc_feature 1..2052: note = Description of Artificial Sequence: Synthetic coding sequence
  source 1..2052: mol_type = other DNA
atgaacggcgcccccagccccgaggacggcgccagccccagcagccctcctctccctccaccacctcccccatcctggcgagagttttgtgagtcccacgctcgagcagcagcactggactttgcccgtcggtttagattatacctggcaagtcatccccagtatgctggaccaggggccgaagccgcattctcgagacgcttcgctgagttatttctccaacacttcgaagccgaagtggccagagcaagtgggtccttgagtcctccgattctggcgccgctcagccccggtgctgaaattagtcctcacgacctgtctcttgagagctgtcgtgtgggaggacctctcgccgtgcttggtccaagccgaagctctgaagacttagcaggtcccttgccgagctctgtgagcagctcctcaactacctcgagcaaacccaaactgaagaagaggttctctcttcgctcagttggcaggtcagtgaggggcagcgtccgggggatccttcagtggaggggtacagtagatccaccaagttcagcagggcccttagagacctcttccgggcctccagtcctggggggtaatagcaattccaactccagtggaggagcagggaccgttggccgaggcttggttagcgacgggacctctcccggcgaacgctggacccacagatttgagcgtttacgcctttcccgcggaggcggggctctgaaggatggagccggcatggtacagagggaagagctgctgtcgttcatgggggcagaggaagcagctcccgatccagccggggtcggaaggggcggaggggttgcgggacccccatctggcggcggaggacagcctcagtggcagaagtgccgcctgctactgcgatccgagggcgagggcggcggaggcagccgcctggagttcttcgtgccacctaaggccagcagaccaagactatcaataccttgttcctcaatcacggacgtacgcactaccaccgccctggaaatgcccgacagggaaaatacttttgtagtcaaagtggaggggccatccgagtacattatggagacagtagatgcccagcatgttaaggcttgggttagcgacatccaagaatgcctctctcctggaccttgccctgcaacctccccgcggccaatgaccctccccctggcacccggaacttcctttctgaccagagagaacacggacagcctggaactctcctgcctgaaccattcggaatccctgccttcccaggatcttctcctcggcccctctgagtctaatgacagattgtcacagggcgcttatggaggcctctccgataggccatcagctagcatcagtccctcgtctgctagtatcgccgcctctcacttcgacagcatggaactgctgcctccagagctccccccacgcatcccaattgaggagggccctccaacaggcaccgttcatcctcttagtgcaccatatcctcctcttgacactccagagaccgcgaccggttctttcctgttccagggtgagccggaaggaggagagggtgaccagcccctatctggctacccttggttccatggcatgctgagccgcttaaaggctgcacaattggtgcttacaggcggcactgggagccatggtgtctttctggtaaggcagtctgagactcggcgcggggaatatgtgctcacattcaattttcagggcaaggcaaaacacctccgcctgtcactgaacgaggaaggtcagtgccgcgttcagcacttgtggttccagtctatattcgacatgcttgagcactttcgggttcaccccattccactggagagtggcggttcttccgacgtcgtcttggtgagttacgtgcccagcagtcagagacagcagggggagcagagtaggtcagcaggcgaggaggtgcctgtgcacccacgcagcgaggcaggaagccgccttggggccatgagagggtgcgcacgcgagatggatgccacacccatgcctccagctccctcttgcccaagcgaaagggttacggtttag

SEQ ID NO: 204932 - DNA, 2016 bp, synthetic construct
  misc_feature 1..2016: note = Description of Artificial Sequence: Synthetic coding sequence
  source 1..2016: mol_type = other DNA
atgaacggcgcccccagccccgaggacggcgccagccccagcagcccaccactgccacctccccccccaccctcctggagagagttctgcgagtctcacgcacgtgccgccgcgctggactttgccagaagattccgcttatacctggcttcacaccctcagtatgctggacctggggccgaagcagctttctccagacgctttgctgaactgtttctgcaacatttcgaggccgaagtcgctcgtgcctccggtagcctcagtcccccaattttggcccctttgagccccggggcagagatatccccacatgatctctccttggagagttgccgtgtcggagggcccctggcggtgctgggtccctcccgctcctccgaggatctggctggacccctcccctcaagcgtgtcaagttcgtccacgacctcttctaagcctaaacttaagaagcggttctccctcaggagtgttggtaggagcgttcgcggtagtgtgaggggtattttacagtggagaggcacggtagaccctcccagctccgccggtccgctggagacttcaagtggaccacccgttcttggtgggaattctaactctaactccagcggaggcgcaggaaccgtcggccgaggcctcgtatcggacggtaccagcccaggtgagaggtggacccacaggttcgagagactgcgcctgtcgagagggggaggcgccttaaaggatggagcggggatggtgcagagagaggagctgctgtccttcatgggagcagaggaggccgctcccgaccccgccggagtcggtagaggcggtggtgtggccggacccccaagtggaggcgggggccagccacagtggcagaagtgtcgcttgctgctgcgttctgagggcgaggggggcggagggtcacgcctggaatttttcgtgccgcccaaggctagtcgccccagactgtctattccctgtagctcaattaccgacgtgcgtaccacaacagccctcgagatgccagaccgggagaacacgtttgtcgtgaaggtggagggtccttctgagtacatcatggaaaccgttgatgctcaacatgttaaagcatgggtttctgatattcaggagtgtctttccccaggcccttgccctgctacgagtccacgacccatgactctgcccttggcgcctgggacctccttcctcactagagagaatacggactctctggagctctcctgcctgaaccattccgaaagcctgccatcacaggaccttttacttggcccaagcgagtccaacgaccgactttcccagggcgcttatgggggcttatccgaccgcccaagtgcttctataagtccatcctcggcttctattgctgctagccatttcgacagcatggagctgctgccaccagaactccccccacggattcctatcgaagaaggccctcccactggcactgtccaccccctttctgccccatatcctcccctggatacccccgaaacagccaccggcagtttcctgtttcagggggaaccggaaggcggcgagggggaccagccgctgtcggggtatccttggttccacggaatgctcagccggcttaaagccgcccagttggtgctcaccgggggaactggatctcacggagtatttctagtgcgccagagcgaaacacgccgcggcgagtacgtgctgacatttaactttcaggggaaagcgaagcaccttaggctgagcttgaacgaagaaggtcagtgcagggtccaacacttgtggtttcagagcatctttgatatgctggaacacttcagggtgcacccaattcctcttgaatcgggcggttcctcagacgtcgtcttagtgagttatgtcccatcttcccaacggcagcagggaagggagcaagcgggctcgcacgcaggagtgtgtgaaggggatggctgtcatcccgacgcatcttgcaccttgatgccttttggggcttcagactgtgtaactgatcacctcccgtag

SEQ ID NO: 204933 - DNA, 1008 bp, synthetic construct
  misc_feature 1..1008: note = Description of Artificial Sequence: Synthetic coding sequence
  source 1..1008: mol_type = other DNA
atgcccgaccgggagaacaccttcgtggtgaaggtggagggcccctcagaatacattatggagactgtggatgctcagcacgtcaaagcctgggtctcagacatccaggaatgcctgtctcctggtccatgccccgcaacttctccaaggcccatgaccctgccactggcgcccggtacttcatttctgaccagggaaaacaccgattccctggaattatcatgtcttaaccactctgagtcccttccctcgcaggaccttctgctgggtccaagcgaaagtaacgacaggctttcccagggagcctacggaggcctgagtgataggccttccgcttcaatctccccctcttccgcctcaatcgcggctagtcacttcgacagcatggagctcctgcctccagaactccctcctaggattcccatagaggagggcccaccgacaggaacagtgcatccactatcggcaccgtaccctccactggacactcccgaaacagccacgggctccttcctgttccagggcgaacctgaaggcggagagggggaccaaccgctctctggctatccctggttccacgggatgctctcaagactgaaggcggcccagctggtcttgacaggcggaaccgggtcccacggtgttttcttggtgcgccagtcagaaaccagaaggggcgagtatgttctgactttcaactttcagggcaaagctaagcatctgcggctaagcctcaacgaagaaggacagtgtcgggtgcagcatctatggttccaatcaatttttgacatgctcgagcacttccgagttcatcccatcccactggaatccggtggctcttccgacgtcgtactggtgagctacgtgccctcatcccagaggcaacagggcagggaacaggcaggaagccacgccggtgtatgcgagggggatgggtgccatcccgatgccagctgtacactgatgccttttggcgcaagtgattgtgtgaccgatcatctcccctag

SEQ ID NO: 204934 - DNA, 1122 bp, synthetic construct
  misc_feature 1..1122: note = Description of Artificial Sequence: Synthetic coding sequence
  source 1..1122: mol_type = other DNA
atggccgaggccagccggccccggctgagcatcccctgcagcagcattaccgacgtccggactactactgccctcgaaatgccggatcgggaaaatacgttcgttgtgaaagtcgaaggaccgagcgagtatatcatggaaactgttgatgcacaacacgtgaaagcctgggtgagcgacatccaggaatgccttagccccggaccttgtccagcaacctcccctagaccaatgactctcccgttagccccagggacttccttcctgacccgggagaatacagacagtctcgaattatcctgcctgaaccactcggagagcctgccgagccaagacctgctgttgggcccctccgagtccaacgaccgcctctctcaaggcgcatacgggggactgtcggaccgtccctcagcgtccatatccccctcatctgcatcgatcgccgcgagccacttcgacagcatggagttgctgccccccgagctgccacccagaatcccaattgaagaagggcctccaacaggaacagtgcaccccctttcagctccctatccccctctggatacccctgaaactgcgacgggctcattcctgtttcagggggagcctgaggggggcgagggggatcagccacttagtggttatccctggttccacggcatgctctctcgtctcaaggcagctcagttagttctcaccgggggaacaggatcccacggggtattcctggttcgccagtccgaaaccaggcgcggggaatatgttctcacctttaattttcaaggtaaagctaagcatcttaggctgagtctcaatgaggaaggacaatgtagggtgcagcatctatggtttcagagcatctttgacatgctcgagcatttcagggtacatcctattccattagaatcagggggcagttcagacgttgtgctagtgagttacgtgccaagtagtcaacgccaacagggagagcagtcgaggagcgcaggggaggaagtgcccgttcatcccagaagcgaagccgggtcgcggctgggagcgatgaggggatgtgcgcgagagatggacgccactcccatgccaccggctccctcctgcccttcagaacgtgtcacagtgtag

SEQ ID NO: 204935 - DNA, 1728 bp, synthetic construct
  misc_feature 1..1728: note = Description of Artificial Sequence: Synthetic coding sequence
  source 1..1728: mol_type = other DNA
atgaacggccccgccctgcagcccagcagccccagcagcgcccccagtgcatcacccgctgccgcacctagagggtggagtgagttttgtgagctgcatgccgtggcagcagcgagggaacttgcacgccagtactggctgttcgctcgcgaacatcctcagcacgcccccctcagggctgaactcgtgagtttgcaattcaccgatttgttccagaggtacttttgtcgggaggtacgtgacgggagagctccaggaagggactaccgagacaccggcagggggccaccggccaaagccgaagcatctcctgaacccggaccaggccccgctgcgccgggactgcccaaagcgcgttcctcggaagaactggctccaccaagacccccgggtccctgctcttttcagcacttccggcggtccctgagacacatcttccggaggcgctcagctggcgaactgcctgccgcccacaccgccgcggccccagggactccaggcgaggcagccgagaccccagcaagaccaggtttggcgaaaaagtttctgccgtggtcgctggccagggagccaccgcctgaggcattgaaggaggcggttctgcggtactcgcttgctgatgaagcctcgatggactctggcgcccgatggcagcgtggtcgcctcgctctgcgtcgcgcccccggccctgacggtccagaccgggtgcttgagttgtttgatccccctaagtcttctcgccccaagctccaggctgcctgttcatctatccaggaggtgagatggtgtacaaggcttgagatgccagacaacttatacactttcgtgctcaaagtaaaagataggacagacatcatttttgaggttggagatgaacagcagctcaactcttggatggcggaactttccgagtgtactggtaggggtctcgagtccactgaagccgaaatgcatattcccagtgcccttgagccgagcacttcatcgtctccacgtggcagcacggatagtctgaatcagggagccagtccaggcggcctgctggatcccgcatgtcaaaaaacagatcattttctgtcttgctacccatggtttcacggccccatttccagagtgaaggctgctcagttagttcagttgcaaggccccgacgcccacggcgtgttcctggtcagacaaagcgaaactcggcggggcgaatatgtgctgacttttaactttcagggcatcgcgaaacacttgcgcctatctctcacggagcggggccaatgcagagtgcagcacctgcacttcccaagcgtggtggatatgctccatcacttccaacggagtccaattcctctggaatgcggcgcggcctgcgatgtccggctctcatcctacgtggtcgtggtgtctcaacctccaggatcatgtaataccgtgctctttccattttccctgccgcactgggactccgaatccctaccacattggggctctgagcttggcttaccgcacctctcatcttccggatgcccccggggcctcagtcccgaaggtcttccgggccggtcctctcctccagagcaaatctttcacctggtgccctccccggaggaattggcaaatagccttcagcacttggaacatgagcccgtgaatcgagccagagacagtgactatgagatggactcgtcaagtcggagccatttacgcgcaatcgataaccagtataccccactttag

SEQ ID NO: 204936 - DNA, 1122 bp, synthetic construct
  misc_feature 1..1122: note = Description of Artificial Sequence: Synthetic coding sequence
  source 1..1122: mol_type = other DNA
atgggcttccccgtgctgtgccggggctggcggcggacctggcccggatgtgctagctggctaggtgctccgccgcctcagaaaccattgctgtcccccttacttctgaatcaccgctcctcgaaatcatctcgacctaagttgcaagctgcctgcagctccatccaggaggtgaggtggtgtactaggttggaaatgcccgacaacttgtacacttttgtcttgaaagttaaagaccggactgatattatctttgaagtgggggacgaacagcagcttaactcctggatggctgagttatcagagtgtactggacgcgggctggagtccacagaggccgagatgcacatccctagcgctctggagccttccacaagctcaagcccccgagggagtaccgactctctgaaccagggggcttcccccggcgggcttctcgatccagcttgtcagaagacagatcactttctgtcgtgctacccctggttccacgggcccatttctcgagtgaaagcagcgcaactcgtacaactgcagggtccggatgctcatggagtttttcttgttcgccaaagcgagactcgtcgcggggaatacgtcctgacattcaacttccagggcatcgctaaacacttacgtctgtcactgaccgagcgaggccagtgtagggtccagcacctgcactttccctcagtggtcgacatgcttcaccacttccagcgatctcccattcctctcgagtgtggggctgcctgcgatgtccgactttcctcttacgttgtggtcgtcagccagccccccggatcttgcaacactgtgttgttccccttcagcctgccacactgggatagcgaaagcctcccccattggggcagcgagctaggcctgccccatctgagctcatccggctgtccacggggactgtcccctgagggcctgccaggcagatcgtcccctccagagcagatttttcatttggttccaagcccggaagagctggccaatagcctccagcatctggaacacgagcctgtcaatcgtgcccgggatagtgactacgagatggattccagctctaggagtcacctgagagccatcgacaatcaatacactccgctgtag

SEQ ID NO: 204937 - DNA, 1209 bp, synthetic construct
  misc_feature 1..1209: note = Description of Artificial Sequence: Synthetic coding sequence
  source 1..1209: mol_type = other DNA
atgatcccccccagcagcccccgggaggacggcgtggacggcctgcccaaggaagccgttggtgccgagcagcctcccagccccgccagcaccagtagccaggaatctaaattacagaagctgaaacggagcctttcctttaaaaccaagtcgctcaggtcaaaatccgcagacaacttttttcagcggacgaactccgaggatatgaagctgcaggctcacatggtggctgaaatcagtccatcgtcgtctcctctgcctgcacccggctcactgacctccaccccggcacgagcgggcctccaccctggagggaaggcacacgccttccaggaatatattttcaagaaaccaactttttgcgacgtctgtaaccatatgattgtgggcacgaatgctaagcacggcttaagatgtaaggcgtgcaagatgagcatccaccacaagtgtaccgatggcctagccccccagcgatgtatgggcaagctgccaaaggggttccgaagatactattcttcgccactcctgatccacgagcagttcgggtgtatcaaagaggtcatgccgattgcatgtggtaataaggtggaccccgtgtacgaaactctgcgattcggcactagcctcgcacagagaaccaagaaagggagttctgggtccggctccgacagcccgcataggacatctaccagcgatctggtcgaagttcctgaagaggcgaacggaccaggcggcggttacgatctgaggaagagaagtaacagcgtgtttacttacccagagaacggcacggatgattttcgagacccagccaaaaacatcaatcaccaggggtccctctctaaggatccattgcagatgaatacatacgtagccttatacaagtttgtcccgcaggagaacgaagacttagaaatgagaccaggggacatcattactctattagaggattcaaacgaggattggtggaagggaaaaattcaggaccggatcggatttttcccagctaactttgtccaaaggctgcaacaaaatgaaaagatctttagatgcgtgaggacctttatcggatgtaaagagcagggccaaatcacgctgaaggaaaatcagatctgcgtctcttctgaggaggagcaagacggcttcatccgagtcctgagcggcaagaagaagggccttattcccctggatgtgcttgagaacatctag

SEQ ID NO: 204938 - DNA, 1005 bp, synthetic construct
  misc_feature 1..1005: note = Description of Artificial Sequence: Synthetic coding sequence
  source 1..1005: mol_type = other DNA
atgaagctgcaggcccacatggtggccgagatcagccccagcagctcacctttgccagcacccggtagcctgacatctacgcccgcacgcgcggggctgcaccctggtggaaaagcccacgccttccaggagtacatctttaagaagcccactttttgcgatgtgtgtaaccacatgatcgtaggcaccaacgcaaaacatggattgcggtgtaaggcctgcaaaatgagtatccaccacaaatgcacagacgggctggccccacagcgctgtatgggcaaactgccgaagggttttcgtcgctactactcctctccgctgctaatccatgagcagttcggatgtatcaaggaagtgatgcccatagcctgcggcaacaaggtcgatcccgtctacgagactctgcgcttcggtacctccttggcacaacgaaccaagaaaggaagtagtggctctggtagtgactcaccccatagaacctccacttcagacctggtcgaggtgcccgaggaagctaacgggcctggcggtggctatgaccttcgaaaacgcagcaattccgtctttacgtatcccgaaaacggcactgatgattttcgggatccagccaagaacatcaaccatcaggggtctctgtccaaagacccgctgcaaatgaatacgtatgtggcattatacaaattcgtgccccaggagaacgaggacctggagatgaggcccggggacattatcaccctccttgaggactctaacgaggattggtggaagggaaagatccaggacaggattggattttttccagcaaattttgttcaacggctacagcagaatgagaagatcttccgatgtgtgaggactttcattgggtgtaaagaacaaggccagatcaccttaaaagagaaccagatctgtgtatcaagcgaggaggaacaagatggctttattcgagtcctaagcggtaagaaaaaaggtttaataccactggacgtgctggagaatatttag

SEQ ID NO: 204939 - DNA, 4422 bp, synthetic construct
  misc_feature 1..4422: note = Description of Artificial Sequence: Synthetic coding sequence
  source 1..4422: mol_type = other DNA
gtggccatcatcgccggcaacttcgagctggccgagtacatcaagaaccataaggagaccgacatagtgccgtttagagaggcccctgcctattcaaacaggaggagacgtcctcccaataccctggccgctcctcgggtgctactcaggtccaactcagataataatctgaatgctagtgctcctgactgggccgtctgtagtacggcaacatctcataggtcactgtcccctcagctgctgcagcagatgcccagtaaacctgagggagcggcgaagaccatcggttcttacgttccaggtccccgatcccggtctccaagcctgaaccggctggggggcgccggcgaggatggaaaacgcccccaacccctgtggcacgtagggtccccgtttgcactgggggctaacaaggatagcttgtcagcattcgagtaccctggtccgaaaagaaaactgtattccgcagttcccggccgtctattcgttgcggtaaagccctaccagccccaagtcgacggagagatacccttgcacagaggcgatagggtgaaagtcctgtcaattggtgagggtggattctgggaaggctctgctagagggcacatcggatggttcccagccgagtgcgtagaggaagtacagtgcaaacctagagatagccaggctgaaactagggctgatcggtccaagaaattgtttcggcattatactgtggggtcctacgactcctttgatacatcttctgactgcattatcgaagaaaagactgtcgtgctccaaaagaaggacaacgagggtttcggattcgtgctgcgaggcgccaaagctgatacgcccattgaagagtttacgccaacaccggcttttcctgcactccagtacctggaatccgtggacgagggcggtgtagcttggcaagcagggctgcgcacaggtgacttcctgatagaagtgaataacgagaacgtcgtgaaggtaggccaccgacaggtcgtgaatatgattcgccagggtggcaaccacctagtgctgaaagtcgtaacagtcactaggaatttggacccggacgacaccgctagaaagaaagcaccgcctccacccaaacgcgctcccacaacggccctgactctccgatctaagagtatgaccagcgaactggaagagctggttgataaggataaaccagaagaaatagtcccagcctcgaaaccttccagggccgctgagaacatggccgtggaacctagggtcgcgacaataaagcaacgtccctcctcaagatgctttcctgccgggtcagacatgaattcagtgtatgaaagacagggtatcgctgtcatgacccccaccgtacccggcagccctaaggcccccttcctgggcatacctagaggcactatgcggagacagaaaagtatcgattcacgcatctttctgtcaggaatcacagaagaagaacgccagtttcttgcccccccaatgctaaaattcacacggtctctttcaatgcccgacaccagtgaagacattcccccccctcctcagagcgtaccgccctcaccaccaccacccagccccaccacatacaattgccctaaaagcccgacccccagagtgtatggcactataaaacccgccttcaatcagaatagcgccgctaaggtcagccctgcaactcgaagcgataccgttgccactatgatgcgtgaaaaaggtatgtacttcagacgggaattggacaggtatagcctggacagcgaggacctgtactcaaggaatgccggaccacaggctaattttagaaataagcgcggccagatgcccgagaacccatattccgaggtaggcaagattgctagcaaagcggtttacgtgcccgccaagccagcgcgcagaaaaggcatgctagtaaagcaatccaatgtggaggactcccctgaaaaaacttgttcaattccgatccccactatcatcgtgaaggagccctcaacctccagttctggaaagtcctcccagggatcctctatggaaattgacccacaggcaccagagcctccaagtcagctcagacccgacgaatcattgaccgtgtcctctcctttcgccgcagcaatagccggagccgtccgagacagggaaaaaaggctggaagctaggaggaatagccctgcctttctgagcacggacctaggagacgaagatgtaggactgggcccacccgctcccaggacaaggcccagcatgttcccagaagagggcgattttgctgatgaagattctgctgagcagttatcctcgccgatgccgagtgccacgccacgcgagcctgagaaccacttcgtagggggggccgaagcctctgctccaggtgaagccggtcgtcctctgaattcaacaagcaaagctcaggggccagaaagttcgccggcagttccctcggcatcttcagggactgcaggacctggaaattacgtccatccgttgactgggagactgcttgatccaagttcacctctggccttagccttatcagccagagaccgcgctatgaaggagtcgcaacaaggcccaaaaggagaggcgccaaaggccgatctgaacaagcccctatacattgacacaaagatgaggccttctctcgatgctggcttcccaactgtcacacgacagaacaccagaggtcctctccgtagacaggaaaccgagaacaagtatgagaccgaccttggcagagaccggaagggtgacgataaaaagaacatgctcatcgacatcatggacacttctcagcagaaaagcgcaggcctactcatggtgcacaccgtcgatgctaccaagctggataacgcgctgcaggaggaagacgaaaaagccgaggttgagatgaagccggactcctctcccagtgaagtccctgaaggagttagcgagacagagggggcgctgcaaatcagcgcagcacctgagccaacaacagttccaggcaggacaatcgtggcggtcggttcaatggaagaagcagtcattctgccattccgcattccaccccctccgctggcttctgtggacctcgatgaggactttatcttcaccgagcctttaccaccaccccttgagtttgcaaactcattcgatatcccagatgacagggctgcatcggtccccgccttatcagatctggtcaagcagaagaaaagcgatacaccccagtcaccaagcctcaatagcagccagcccacgaactccgccgattcaaaaaaaccagcttctttgtctaactgcctcccagccagtttcttgcccccacccgaaagcttcgatgctgtagctgactctgggattgaagaagtcgactctagatccagttctgatcatcacttggaaaccactagcaccatctccaccgtcagttccattagtaccctatctagcgagggcggggagaacgtggacacttgcactgtgtatgcagatggtcaagcattcatggtcgataagcctccagttccacctaaacccaagatgaaacctatcatccataagagcaatgccttgtatcaggacgccttggttgaggaggatgtggactccttcgtgataccgcctcccgctccaccgccccctcccgggtccgctcagcctggaatggccaaagtgctccagccaagaacatcgaaactgtggggagacgttaccgaaatcaagagtcccatcctgagcggaccaaaggccaacgttattagcgagctgaacagtattttgcagcagatgaacagagagaagctggccaaacccggggaaggtctggattcccccatgggagcaaaatcagccagcctcgcccccagaagcccagagatcatgtccacgatttcaggtacgcgatctacaacagtgacttttaccgttcggcccgggactagtcagcccataactcttcagagccgaccccccgactacgaatctcggacgagcggcacaagaagagcccctagcccagtcgtttcacctaccgagatgaataaggagactctccctgccccgctgtccgcagcaaccgcttctccctcccccgcactgagcgatgtctttagcttgccttcacagccaccctctggcgatttgttcggcctgaaccccgcggggcggtctcggagtccgtcccctagcattctacaacagcctatttccaataaaccatttacaactaaacctgtgcacttatggaccaagccggatgtggccgattggctcgagagtttgaatttaggtgaacacaaagaggcctttatggataacgagatcgacggcagtcaccttcccaacttacagaaggaagacctcatagatctcggtgttactcgggtcggccaccgtatgaatatcgagagagccctcaagcagctgttggaccggtag

SEQ ID NO: 204940 - DNA, 5553 bp, synthetic construct
  misc_feature 1..5553: note = Description of Artificial Sequence: Synthetic coding sequence
  source 1..5553: mol_type = other DNA
atgccccggagccccaccagcagcgaggacgagatggcccagagcttttctgactactccgtgggtagcgagtctgactccagcaaggaggagactatttacgacactatacgggccacagctgagaaaccaggaggtgcacgtactgaagaaagtcagggtaatacactcgtgatccgagtggtgattcacgatctccagcagaccaagtgcatacgcttcaaccctgacgcaacggtgtgggtagccaagcagcgaatcttgtgcacgctgacacagagccttaaggacgttctcaactatgggttatttcagccagccagtaacggtcgagatggtaagtttcttgacgaagaaaggctcctgagggaataccctcagccagtgggggagggggttccctctctcgagttccgatataagaaacgtgtctacaagcaggcttccctagacgagaagcagctcgctaaactgcacacaaagacaaatctgaagaaatgcatggaccacatccagcatagattggtagagaagattacaaagatgcttgaccgcggcttagatcctaatttccacgacccagaaaccggcgaaactcctctgaccctagcggcccagctggatgatagcgtagaggtgatcaaagcattaaaaaatggaggcgcccatttggacttccgcgccaaagacggcatgaccgcgcttcataaggctgctagagccagaaatcaggtcgccctaaagactctgcttgagctcggggcctctcccgattataaagactcatacggtctgacccccctgtatcacacggcaattgtcgggggcgacccatactgttgcgaactgctcttgcacgaacatgcaaccgtgtgttgtaaagacgagaatggttggcacgagattcaccaatcaagatgttggggccatataagcgaaccacatcacaccctactcagcgggtcagcccgatctcagcagtctagaagtgccagttcagccctccatgtttgcgccatgtacagcagtttctcatgcgtgcggatttccctgttgttccatggaaggattaccgaattgaaacagtacaagaaaagtacccccttccaggttgccatcattgcgggcaatttcgagttggctgaatatatcaaaaaccacaaggaaaccgatatcgtgccctttcgcgaggcccccgcttacagtaataggagacgccgcccccctaacacacttgccgctccgagagtcctgcttagaagcaactcagataacaatctcaacgcctcggcaccagattgggcggtgtgttctactgctaccagccacaggtcgctgtccccccagctcttgcaacagatgcccagtaagccggagggtgccgcaaaaactattgggtcgtacgtacccgggccgagatcccggagtccttctctgaatagattgggcggagccggtgaggatgggaagcgtccccagcccctttggcatgtgggctctccattcgctctgggggccaacaaggacagcctgtctgccttcgaatatcctgggcctaaaaggaaactgtattcagccgtcccagggcgactgttcgtagctgttaagccatatcaaccccaggttgatggcgaaataccgctgcaccgtggtgatcgggtgaaggtgttatcaatcggtgagggcggattttgggagggatcagctcgtggacatattggctggtttcccgcagaatgtgtggaggaggtgcagtgcaagccaagagattcacaggctgagacgagggctgatagatctaagaagctctttcggcattacaccgtggggtcctacgacagtttcgatacttcgagcgactgtataatcgaagaaaagacagtcgtgctccaaaaaaaggacaacgaagggtttgggttcgtactcagaggcgccaaggccgatacgccaatagaagaattcactcctaccccggcattcccagcactgcagtacctggagtcagttgatgaaggcggggtcgcctggcaggccgggctacggaccggcgactttctgatagaagtgaacaatgagaatgtagttaaagtcgggcaccgccaggtcgttaacatgatccggcaggggggtaatcacctcgtgctcaaagtggtgacagtcacgcggaatctggacccagacgatacagctcggaagaaggcacctcctcccccgaagagggcgccaaccacggccctgacactccggagcaagagtatgacctcggagctagaggagcttgtggataagggtgtgatcagaaaggtaagtgacaagcctgaagaaattgtgccagctagcaagccgtcacgcgccgcggaaaatatggccgtcgaacctagggttgccactatcaaacagcgcccttcaagccgctgtttccctgccggcagtgatatgaactccgtctatgagaggcagggaatcgcggtcatgacccccactgtgcccggatccccgaaagccccgttcctgggtatccctcgcggcacaatgagaagacagaagtccatagattcaagaattttcctctccggaattacagaggaggagcggcagttccttgcgcctcctatgctgaagttcacaaggagcctgtccatgcccgacacctcggaagacattcccccacccccacagtctgtgccacctagtccacccccacctagccctacaacttacaattgccctaagagtcctacaccccgcgtgtatggcactatcaagccagcatttaaccaaaacagcgctgccaaggtatcccctgcgacgaggtcggacaccgtggcaactatgatgagggagaaggggatgtacttccgtagggagctggaccgctacagcttagattccgaggatttatattcaagaaatgcaggaccacaggctaactttcgaaataagcgcgggcaaatgccagaaaacccctatagtgaggtggggaaaattgctagcaaggccgtctatgtgcccgccaagcccgccaggaggaaggggatgctcgtcaaacagtccaacgtggaggatagccctgagaagacgtgttcaatccctattcctaccatcatcgtgaaagaaccctcaacctctagctctggcaaaagtagccagggctcttcgatggagatcgacccccaggcccctgaaccaccctctcagctccggcccgacgagtcactgactgtgtcttctcctttcgctgccgccattgccggtgctgtccgcgacagagagaaaagacttgaagctcggagaaatagccctgccttcttgtctactgacttaggcgacgaggatgtgggcctcgggcctcccgcccccagaacacggccatctatgttccctgaagagggcgactttgccgatgaggacagcgctgaacagctgtcaagcccaatgccttccgctacaccgagggagcctgagaatcactttgtaggcggggccgaagcttccgcccccggagaagctgggcggcctctgaactctacctccaaggcacaagggccagaatctagccccgccgtcccgtcagcctcatctgggaccgcagggcccgggaactacgttcatccgctgactgggagactgctggatccttcatctcccctcgcattagcgctgtctgcccgggatcgagctatgaaggaaagccagcaaggtcctaagggcgaggctccaaaagccgatctcaacaaacccctgtatatcgatacaaaaatgcgtccctcgttagatgcaggattccctaccgtcactcgacaaaacactcggggtccattacgtcggcaagaaactgaaaacaaatatgaaacggatcttgggcgtgatcgtaaaggtgacgataaaaagaacatgctgatcgatatcatggatactagccagcagaagtccgctggactcttgatggtccacaccgtcgacgccaccaagctcgacaatgctctgcaggaggaagacgaaaaggcagaggtggagatgaagcctgattcatctccctctgaagtgccagagggggtgtcagaaaccgaaggtgcacttcagatctccgccgcgcccgaacccaccacagttccaggaagaactatcgtggccgtggggtcaatggaagaggctgtgatcctgccatttaggattccaccgcctcctttggcaagcgtggatttagacgaggactttatcttcaccgagccactgcctccacccctggagtttgccaacagtttcgacatccccgatgacagagcagcaagtgtgcctgccttgtccgacttggtgaaacaaaagaaaagcgataccccacaatccccgtcgttgaactcttcacagcctacaaacagtgccgatagcaagaaaccagcttccctctccaattgcctgcccgcaagtttcctgccccctcctgaaagttttgacgccgtggcggatagcgggatcgaggaagtcgacagcaggtcatcctcagatcatcacctggaaacaacgagtacaattagcactgttagcagcatcagcactctgtcatccgaggggggcgagaatgttgacacctgcactgtctacgcagacggacaggcatttatggtggataagccgcccgtgcctcctaaacccaagatgaagcctatcattcacaaatcgaatgctctgtaccaggacgcactagtggaagaggatgtagattccttcgtcatccctcctcccgctccgccccccccaccaggctccgctcagcctggcatggcaaaagtcttgcagccgcgcacctctaagctgtggggagacgtcactgagataaagagtcctatcttatcaggtccaaaggccaacgtcatctcagagcttaattccattttgcagcagatgaatcgcgagaagctggcaaagccaggcgagggccttgactcgcccatgggggccaagagcgcatctctggcccctagatctcccgagattatgtcgacgattagcggaacacggtctactacagtgacttttaccgtgagaccagggacaagccagccaattacattgcagtccaggcctccggattacgagagcaggacttccgggacgcgtcgtgcaccaagccctgtggtatcaccaacggagatgaataaggagaccctgcccgcccccctttctgcagccactgcttctccctcccccgcactgtcagacgtgtttagtctcccctcacagcctccatctggagacctattcggattgaatcccgcaggaagatcgcgaagtccctccccaagtatccttcagcaaccaatcagcaataagccattcacaaccaagcccgtgcacctgtggactaaacctgatgtggccgactggctggagtccctgaacttgggtgagcacaaagaggcatttatggataatgagattgatgggagccacttgcccaacctgcagaaggaggatctcatcgacctgggggttacacgcgtcggccaccgcatgaacatcgagcgcgctctgaagcaactgctggaccgctag

SEQ ID NO: 204941 - DNA, 846 bp, synthetic construct
  misc_feature 1..846: note = Description of Artificial Sequence: Synthetic coding sequence
  source 1..846: mol_type = other DNA
atgatgatgaacgtgcccggcggcggcgccgccgccgtgatgatgaccggctacaataatggccgctgtccaagaaatagcctctactccgactgcatcattgaagagaaaacagtcgtgctgcagaaaaaggacaacgagggattcggattcgtacttcggggagccaaggcagacactccgatagaggagtttaccccaaccccagcatttcctgcactccagtacttggaaagcgtggatgaaggcggcgtggcatggcaggctggattaagaacgggagattttctgatcgaggtgaacaacgaaaacgtcgtcaaagtgggccacaggcaagtggtgaacatgatcaggcagggtgggaatcacctggtactaaaggtggttacagttaccaggaaccttgaccccgacgacacagccaggaagaaggcacctccacctccgaaaagggctcccacgaccgccctcacgctgaggagcaagagcatgacgtcagagttagaagagcttgtcgataagggcgttatcaggaaggggaaggacaaaccagaggagatagtcccagcaagtaagcccagccgtgctgcggagaatatggctgtcgaaccccgagtggccacgattaaacagcggccaagcagtcgatgttttcctgctggctcagatatgaattcagtttatgagagacaagggatcgcagttatgaccccaactgtaccaggctcccccaaagcaccctttttgggcataccacgcgggaccatgcgtcgacaaaagtctatcggtaagaaatgcggtactccaccgcagaaactgcctctgggcttccagacccagccttag

SEQ ID NO: 204942 - DNA, 3762 bp, synthetic construct
  misc_feature 1..3762: note = Description of Artificial Sequence: Synthetic coding sequence
  source 1..3762: mol_type = other DNA
atgatgaacgtgcccggcggcggcgccgccgccgtgatgatgaccggatacaataacggccgctgtcctcgaaactcactctactcggattgtatcatcgaggagaaaacggttgttctccagaaaaaggacaacgagggattcggtttcgttctgagaggagccaaggccgacaccccaatcgaggaattcacaccaactcccgcctttcctgccctccagtatctggagagtgtcgatgagggcggcgtagcctggcaggccggactgcgcactggtgactttttaatcgaagtgaataatgaaaacgtggttaaggttggccacagacaggttgttaacatgatccgacagggcggtaaccacctggtgctgaaggtagtgaccgtgactcgcaaccttgatccagacgacactgcacgcaaaaaggctcctcccccacctaaaagagctcctaccaccgcactcaccctacgctctaagtctatgacatcagaactcgaggagctggtagataaggacaagcccgaggaaatcgtccctgctagtaagccgagcagggctgctgagaatatggcagtcgagccaagggttgctactataaagcagaggcccagctctaggtgctttcctgccggctcggacatgaactccgtttacgaaaggcagggcattgcagtgatgaccccaacagtccccgggagccccaaagcaccttttctcggaataccgagagggacaatgcgaaggcagaagtccatcgattcaagaatctttctatcgggaataaccgaggaagaaagacagttcctggccccccctatgctgaagtttaccagaagtctaagcatgccagacacttctgaagatattccgccaccaccccagtccgtgccacccagccctccaccgccttccccaacgacttacaactgccccaagtcccctacccccagagtctacggtacgattaaaccggctttcaaccagaattctgcagccaaggtaagccctgcaacaagatcagatacagttgccacaatgatgcgagaaaaggggatgtactttcgccgggagctggatcgatactcactcgatagtgaggatctttattcgaggaatgccgggccacaggccaattttaggaataaaagaggccagatgcccgaaaatccttacagcgaagttgggaaaatagcttcgaaagccgtgtacgtgccagccaagccagcccggcgcaaggggatgctggtcaagcagagcaatgtggaggacagcccagagaagacgtgttctattcccattcctacaattatcgtgaaggagccgagtacgtctagcagtggtaaatcctcccagggttcaagcatggagattgaccctcaggccccagagcctcctagtcaactgaggcccgacgaatcactaaccgtttctagcccatttgcagcagctatagcgggtgcagttagggatcgggagaaacgcttagaggctcgacggaactcccccgctttcctgtccacggatttgggcgatgaggacgtcgggctgggtccgcccgctccccgaacacgccctagcatgttccctgaggagggtgacttcgccgatgaagactctgcggagcagttgtcctcgccaatgccatccgccacgccccgcgaacccgagaatcactttgtaggtggcgctgaagcatccgcgcccggggaagccgggcggcctctgaacagcacatctaaggcacagggcccagagagctcacccgcagtcccaagcgcaagttccggtactgccgggccggggaattatgttcatcccctgactggacgcctcttggaccctagctcccctctggcgttggctctgtcagctcgggacagagccatgaaggagtcccagcagggaccgaagggcgaagcccccaaggctgatctgaataaaccactatatattgatacaaagatgcggccatctctggatgcaggattcccgaccgtgactcgtcagaacaccagaggaccgctccgtcggcaggagactgaaaacaagtatgagactgacttaggtcgagatcgtaaaggagacgacaagaagaatatgctcatcgacatcatggacaccagtcaacaaaaatccgctggactgctgatggttcatactgtagatgccaccaaactggataatgctcttcaggaagaggatgagaaagccgaagtggagatgaagccagactctagtccctctgaggtaccagaaggggtgtctgagaccgaaggcgccctgcagatttccgccgcaccggagccaacaactgtccccggcaggaccatcgtagcagttggctcaatggaggaggctgtgattttaccatttcggatcccgccaccgcccctcgccagtgtcgatttagacgaggactttatttttactgagccattgccccctccgcttgagttcgcaaattcattcgacatccctgacgatcgcgctgctagcgtccccgccttgtctgatctggtgaagcagaaaaagtctgacacaccgcaatcaccttccctcaattcaagtcagcctacaaatagcgctgatagcaagaagcccgcctctctctccaactgcctgcccgcaagtttcctgccccctcccgagtctttcgatgccgtggccgacagcggtatcgaagaggtcgattcgcgttctagttcagaccatcatctggagactacctcaacaatttccactgtcagttccatatctaccctgagtagcgaggggggcgaaaacgtggacacatgcactgtctacgcagatggacaagccttcatggtcgacaaaccgcctgtaccacccaagccaaagatgaagcctattatccataagagcaatgccctgtatcaggatgctctggtggaggaggacgttgattcgtttgtgatcccgcctcccgccccaccccccccgcccgggtccgctcaaccagggatggccaaggtgctgcaacccaggacctctaaactgtggggtgatgtgactgaaatcaaaagcccaatattaagcgggccaaaagccaatgtcatcagtgagcttaactccatcctgcaacagatgaaccgagaaaagctcgccaagcctggagagggcctggatagccccatgggtgccaagtcagccagcctggccccccgcagtccagaaatcatgagcaccatctccggtacaagatccacaactgtgaccttcactgtgcggcctgggacctcacagccgatcacgttacagtcacgaccacccgattacgaaagcagaacaagcggtaccagaagagccccctcacccgtggtttctccaactgagatgaataaagagactctgcccgctcccctttccgcagcgaccgctagtccttctccagccctaagcgacgtcttctccctgccttcccaacccccttctggtgacctgttcggtctcaacccggctggacggtctaggtccccgagtcccagtattctgcagcaacctataagcaacaagccctttacaactaaacctgtgcacctgtggacaaaaccggatgtcgccgactggcttgaaagcctgaacctcggcgagcacaaggaggctttcatggataacgaaattgatgggtcgcatctccccaacttacaaaaagaggatcttatcgatcttggcgttactcgtgttggtcaccgtatgaatatcgagcgcgcactcaaacaactgcttgatagatag

SEQ ID NO: 204943 - DNA, 843 bp, synthetic construct
  misc_feature 1..843: note = Description of Artificial Sequence: Synthetic coding sequence
  source 1..843: mol_type = other DNA
atgatgaacgtgcccggcggcggcgccgccgccgtgatgatgaccgggtacaacaatgggcggtgccctaggaacagcttgtatagtgactgtatcattgaagagaaaacggttgtgctgcagaaaaaagataatgaaggttttgggttcgtgctcaggggtgctaaggctgacacacctattgaagagttcacgccgactcccgcattcccagccctgcaatacctggagagtgtagatgaggggggcgtggcctggcaggcgggcctaaggacaggtgacttcctcattgaggtgaataatgaaaatgttgtaaaagtcggccacaggcaggtggtcaatatgatcagacaggggggaaatcatttagtcctcaaagtggttacagttacacgaaacctcgatccagatgacacagcgaggaagaaggccccacctcctccaaagcgcgctcccaccacggcgttaaccctgagaagcaaatctatgacctcggagcttgaggaactggtggacaaggcttccgtgcgcaagaagaaagataagcctgaagaaatagtcccggcatccaagccatcccgggccgccgaaaatatggccgtggagcctcgggtggcaactattaaacagagaccatcttcacgctgttttccagctggctcagatatgaacagcgtgtatgagcggcaggggatagcagtcatgacaccaaccgttcctggctcacccaaagcacccttcttgggcatccctagggggaccatgcggcggcagaagtcaattggaaagaagtgcgggactcccccccagaagctgccactggggtttcagactcaaccttag

SEQ ID NO: 204944 - DNA, 4413 bp, synthetic construct
  misc_feature 1..4413: note = Description of Artificial Sequence: Synthetic coding sequence
  source 1..4413: mol_type = other DNA
atgaagagcctgctgaacgccttcaccaagaaggaggtgcccttccgagaggcacccgcctattccaacaggcgcaggcggccacccaacaccctcgctgctccacgagtgctgctgcgatctaattctgacaacaacctcaatgcgagcgctccggattgggccgtctgtagtactgccacaagtcaccggtccttatctccacagttacttcagcaaatgccatccaaacctgagggcgccgctaagaccattgggagttatgttcctggccctcgctcccgaagtcctagcctgaatcgccttggcggggcaggtgaggatggaaaacgaccacaaccactctggcatgtaggtagtccctttgctttgggtgccaacaaggactctttgtcagcatttgagtacccaggacctaaaagaaaactgtatagcgcagtaccaggtcgcctgtttgtcgccgtcaagccctaccagccacaagtcgatggtgagattccactgcacagaggggatcgggtcaaggtgctcagtatcggcgaagggggcttctgggaaggatcagcaagggggcacatcggctggtttcccgcagaatgcgttgaggaggtacagtgtaagcccagggatagtcaggctgaaaccagagcggaccgttcgaaaaagttgtttcgccactatacagtaggatcctatgacagctttgacaccagcagcgattgtattattgaggagaaaacagttgtgctacagaagaaagataatgaaggatttgggttcgtgctgaggggagccaaagccgacacgccgattgaggaattcacaccgactcccgctttcccagcgctgcaataccttgagagcgtcgacgagggcggcgttgcctggcaggccggactgcgcaccggcgatttcctcatagaggtgaacaacgagaatgtggttaaggtgggccataggcaggtcgttaacatgattcgccaaggcggcaaccaccttgtgctcaaagtggtcactgtgacacgcaacctcgatcctgatgacacggccagaaaaaaagccccccctcctccaaagcgggcacccactacagccctgacattgcgctccaaatctatgacctctgagttagaagagttggtcgacaaagcctcagtgcgtaagaagaaagacaagcctgaagagatcgttcctgctagcaagccatcaagagctgcagaaaacatggctgttgagccccgcgtcgccacgatcaaacagcggccatcttctcgctgtttccctgccggctctgatatgaactccgtctacgaaagacagggcattgcagttatgactcccacggttcccgggagtcccaaagccccctttcttggtatcccaagaggcacgatgaggaggcagaaatcaattgactcgcggatctttttgtcagggattacagaagaagagaggcagttcctcgcacctcccatgctaaaatttactcggtctttgtcaatgccggatacatccgaggatatcccccccccaccacagtctgtcccacccagcccaccacctccaagcccgaccacatacaactgccccaagagccccactcctcgggtgtacggaaccattaagcctgcctttaatcaaaattcagcagcgaaggtctcgccagccaccaggtcagatacagtagctaccatgatgcgcgagaaagggatgtacttcaggcgcgagctggaccggtactcccttgactccgaggatctgtactcccgcaatgcaggacctcaggctaattttcggaataaacgaggacaaatgccagagaacccctactctgaggtaggcaagatcgcttccaaggcagtttacgtccccgcaaagccagcgagacggaaaggaatgctcgtcaagcagtcaaatgtggaggactcccccgagaagacatgcagcatacctataccgacgataattgttaaagagccctccacttcttcctcagggaaatcttctcagggaagttctatggagatcgacccccaggctccagagccgccctcgcagctcagacccgacgagagtcttaccgtgtctagccctttcgctgccgccatcgctggggcggtgcgagatagagagaagcggctcgaagctcggaggaatagtcctgcatttctgagtacagacctgggggacgaagatgtcgggttgggaccccccgccccacgaacacggccttctatgtttcccgaagagggcgattttgccgacgaggactcagcggagcaattgtcgtcgccaatgccctccgcaacccctagagaaccagagaatcacttcgtgggcggggctgaagcctctgcccctggggaggctgggagacccctgaattcaaccagtaaagcccagggtccggaaagcagtcctgcggttccttcggctagctccgggacagctggcccaggaaactacgttcaccctcttacaggaaggctccttgaccccagctcacctctcgccctggcgctgtctgcgagagatcgagcaatgaaagagagccaacaaggccccaagggggaggcacccaaagcggatctaaataagccactctatattgacactaaaatgcggcccagtctggatgcaggattccccaccgtgacgagacagaatacccggggtccactgcgccggcaggagacggagaataagtacgagacagatctcgggcgtgaccgcaaaggggacgacaagaagaacatgcttatcgatattatggacacatctcaacaaaaatcagcaggcctgctgatggtacatacggtggacgccacaaagttggataatgctctgcaggaggaagacgaaaaggccgaagtggagatgaaacctgattcctcaccaagcgaggtgcctgaaggggtctccgaaacagagggcgccctgcagatcagtgcagcacctgagcccactactgtgccgggcagaaccatcgtcgctgttgggtccatggaggaggcagtgattctacctttccgcatccctccacccccactggcatccgttgatctggatgaagactttattttcactgaaccattacccccaccccttgagttcgccaattctttcgacatccctgatgacagagcagcgagcgttcctgcgctcagcgatttggtgaaacagaagaagtcagatacgccccagagccccagtttgaatagttcccaacccactaactcagccgattctaaaaagccagcctccctatccaattgcctgcctgcctctttcctcccacccccagaatccttcgacgcggtggcggacagcggcatagaagaagtggatagtcgaagctcttccgatcaccacctggaaacaacgtcaacgatctcaacagtgagcagcatatctaccctgtctagcgaaggcggcgaaaatgtggacacctgtacagtgtacgccgacgggcaggcctttatggtggacaaaccccctgttcctcccaaacctaagatgaagcccattatccataagtcaaatgctttataccaggacgccctagtagaggaagacgttgattccttcgtgataccaccacccgcccctccacctccacctggatcggctcagccaggcatggccaaagtgttacagcctcggacaagcaaactctggggggacgtcactgaaatcaaaagccccattctgagcggccctaaagcgaacgtgattagtgaactcaatagcattctgcagcagatgaaccgcgagaaactagccaagcctggcgagggactcgattcaccaatgggagccaagtcagcgagtctggccccccggagccctgagataatgtcaaccatctccgggacgagatccacaaccgtgacttttacggtgaggcctggtacctcccagcccataaccctgcagagtaggccacccgactacgaaagcaggacctcaggaaccagacgggctccttcacctgttgtgtctcctaccgaaatgaacaaagaaacactcccagcccctcttagcgcagctacagcaagtccatcaccagctctgagcgatgtattttcacttccatcccagccacccagcggcgacctgtttgggcttaacccagctgggcgatcaagaagtccttcgccctcaatactccagcagcctataagcaataaaccatttaccacgaaaccagtgcatctgtggacaaaacccgacgtcgctgactggcttgagtccttgaacctcggcgagcataaggaagcttttatggacaacgaaatcgacggtagccatcttcctaacctgcaaaaggaggacctcatcgatctgggcgtcaccagggtggggcaccgtatgaacatagaaagggcattgaaacagctcttagacaggtag

SEQ ID NO: 204945 - DNA, 816 bp, synthetic construct
  misc_feature 1..816: note = Description of Artificial Sequence: Synthetic coding sequence
  source 1..816: mol_type = other DNA
atgatgatgaacgtgcccggcggcggcgccgccgccgtgatgatgaccggatacaacaatgggcggtgtccccggaacagtctctattcagactgtatcatcgaagagaagacggttgttttgcagaagaaggacaatgagggctttggattcgtgctgagaggtgcgaaggcggatacccctatcgaagaattcacgccaacccccgcgttccctgcccttcagtatcttgaatccgtcgatgaagggggcgtggcttggcaggccgggcttagaacaggggacttcctaattgaagtcaacaacgaaaacgttgttaaagtgggacacagacaggtggtaaatatgatccgccaggggggaaaccatctggtgcttaaagtggttacggttactagaaatctcgaccccgatgacactgcacggaaaaaagcccccccacctcctaagagagcccccactaccgccttgaccctgcgtagcaagagcatgactagcgagctggaggaacttgacaaaccagaagaaatcgttcctgcatcaaagccttcccgggccgcagagaacatggccgtggaaccacgtgtcgcaaccattaagcagcgcccaagttcgaggtgtttccctgctggaagcgatatgaacagcgtttacgagcgtcaaggaattgccgttatgacaccgacagtccccggtagtccaaaagctcctttcttaggcattccacgcggaaccatgcgcagacagaaaagcataggcaagaaatgtggaacacctcctcaaaaactgcctctgggattccaaacccagccgtag

SEQ ID NO: 204946 - DNA, 3765 bp, synthetic construct
  misc_feature 1..3765: note = Description of Artificial Sequence: Synthetic coding sequence
  source 1..3765: mol_type = other DNA
atgatgatgaacgtgcccggcggcggcgccgccgccgtgatgatgacagggtacaataatgggcggtgccctaggaattccctctattccgactgtattattgaagaaaaaactgtcgtgctccagaaaaaagataatgagggcttcggcttcgtccttcggggggcaaaagcagatacccctatcgaggagtttacacctacccccgccttccccgccctccaatatctggagagcgtcgatgaaggcggggtggcgtggcaggctggacttcgcacaggagacttcctcattgaggttaataacgagaacgtcgtgaaagtgggacaccggcaagtcgtcaatatgatcagacagggaggcaaccatctagttttgaaggtggttaccgtgacgcgaaacctggaccctgacgacaccgctaggaagaaagctccaccaccccccaaacgagcaccaactactgcacttacactgcgtagtaagtccatgacatccgaattggaggaactggtagataaggacaaacccgaggagattgtgcctgcttctaagccatcccgcgcagctgagaacatggctgtggaacccagggtggctaccatcaagcagaggcccagtagtcgctgttttcctgccgggagcgatatgaactccgtgtacgagagacaggggattgccgtaatgaccccaacggtgcccgggtcaccaaaggcccccttcctcggaattccccgcggcactatgaggcggcagaagtccatcgactctcgcatctttctgtctgggatcactgaagaggagaggcaatttctggctccgcctatgctgaagttcacccgctccctgtcaatgccggacacctccgaagatatccctccccccccgcagagcgtgccccctagccccccccctcccagccccaccacatacaactgtccgaaatctccaaccccccgggtgtacgggacaataaagccagcttttaatcagaattccgcagccaaagtaagccctgcaaccaggagtgacacagtggccacaatgatgagagagaagggcatgtactttagaagagagctcgaccgctattcacttgactctgaagatctctacagtcgcaatgctggaccccaggccaatttcagaaacaagcgcgggcagatgccagagaacccctactccgaagtgggtaagattgctagcaaagcggtttatgttcccgccaaacccgccaggcggaaggggatgctagttaaacaatctaacgtcgaggattcccctgaaaaaacttgcagtatcccaatcccaactattatcgtaaaagagccatccacctcttcttccggcaaatcttcacagggttcttcaatggagattgatccccaggctccagagccaccgtctcagctgaggcccgacgagtccttaaccgttagcagccccttcgccgctgctattgctggggctgtgcgggatcgcgaaaaaagactcgaggctcgacgcaactctccagccttcctctctactgatctgggggatgaggatgtgggtttaggccctccagcccccagaacaagacctagcatgtttcccgaagaaggcgattttgccgacgaagacagcgcggagcagctgtctagtccaatgcctagcgccactcctcgcgaacctgagaaccactttgtgggcggagctgaggcaagtgctccgggcgaggctggtcgaccgctcaacagcactagcaaagcacagggacccgaaagttctcccgctgttccctccgcgagctccgggaccgccggacctgggaactatgtgcacccgttgacaggacgtctcttggatccatcctccccactggccctcgccctgagcgctcgggatcgcgccatgaaggagtcacagcagggccccaagggtgaagcgcccaaggccgatctcaataaacccctgtacatcgataccaagatgaggccatccctcgacgcaggcttccccaccgtgacacgtcagaatacacgcggcccactacgacgtcaggagacggaaaataaatacgaaactgacttaggtcgggatcgtaagggggatgataagaaaaatatgctgatagatattatggatacttcgcaacagaagtcggccggcctgctcatggtgcatacagtcgatgccacaaagctggataacgcattgcaagaggaagatgagaaggctgaagtcgaaatgaaacccgatagctccccaagtgaggttccggaaggcgtgagtgaaactgagggcgctttacagattagtgccgctcccgaaccaaccactgtgcccggaaggaccattgtggcggtaggttctatggaggaggctgttattcttcctttccggatacctccgcctcccctcgcctcagtggacctggatgaagacttcatttttaccgaaccgttgcctccgccacttgaattcgccaatagctttgatatccctgacgaccgagctgccagtgtcccagccttgagtgatctagtaaagcagaagaaatctgacaccccacagtctccttccctcaatagtagccagccgacaaattccgccgatagtaagaagccggccagcctgagcaattgcctgcctgccagcttcttgccccccccagaaagtttcgatgccgtggccgattcgggaatagaagaagtggacagcaggtccagtagcgaccatcacctggaaacaactagtactattagtacagtctcctctattagcaccctctccagcgaagggggcgagaacgtggatacctgcaccgtctacgcggacggacaggcgttcatggtggacaaaccccctgtgccgcctaagccaaaaatgaagcccattatccacaaaagcaacgctctatatcaggacgctctggtggaggaggatgtggactcattcgtgataccaccccctgccccccccccgccacccggttccgcccaacctggtatggccaaagtgctgcagcctcggactagcaagttatggggtgacgttactgagatcaagagcccgatcctgagtgggcccaaggccaatgtgatatctgagctcaattcaatcttacagcagatgaaccgagagaagcttgccaaaccaggagaggggctcgattcccctatgggagctaagtccgcctccctggccccgcggagtcccgagatcatgtccaccatctcgggaactcgctctactactgtgactttcacagttcgacctggcacctctcagcctattaccctccagtcgaggcctcccgattacgaatcaagaacatcaggcacacgcagagcaccaagtcccgtggtaagcccgactgagatgaacaaagaaactctacccgcacccctctccgctgcaactgcgagcccatctcccgcgctgtcagatgtgtttagtctgcctagccaacctccttctggcgatctattcgggctgaacccagccggtcgatcgcgttctccgtccccctctatcctccagcagccaatcagcaataaacccttcacaacgaaaccggtgcatttatggacaaaacctgacgttgccgattggctggagtcgttaaacctgggggagcacaaggaggcctttatggataatgagatagacgggagtcacctgcctaatctgcagaaagaggacctcatcgaccttggagtgactcgagtcggacaccgaatgaacatcgagcgagcccttaagcagctgctggacaggtag

SEQ ID NO: 204947 - DNA, 915 bp, synthetic construct
  misc_feature 1..915: note = Description of Artificial Sequence: Synthetic coding sequence
  source 1..915: mol_type = other DNA
atgccccggagccccaccagcagcgaggacgagatggcccagagctttagcgactactctgtgggaagcgagtcggacagctcaaaagaggaaaccatctacgatacaatcagagctaccgccgagaagcccgggggggccaggactgaggaatctcagggtaacaccctggttattcgagttgtgattcacgacttgcagcagaccaaatgcatccgcttcaaccctgacgcaaccgtttgggtcgcgaagcaacggattctgtgtaccctgacccagagcctgaaggacgtgctgaactatggacttttccagccagcgagtaacggcagggatggtaaatttctcgacgaggagcgtctgctgcgggaataccctcagccagtcggggaaggcgtgccctctctggagtttagatacaagaaaagagtctacaaacaagccagtttggatgaaaagcagctcgccaaactgcatacaaagactaacctgaagaagtgtatggatcatatacagcatcgtctagtggaaaaaatcaccaaaatgctggacagaggactggaccccaattttcatgatcctgaaaccggagaaacccccctgacattggcagcgcagctggacgacagtgtggaggtgattaaggctctgaagaatggcggagcgcacttggactttagggcgaaagacggaatgactgctctccacaaggcagcccgggcgcgaaatcaagtagcccttaagacactccttgagctgggtgcatctcccgactacaaggactcttacggccttacccccttatatcacaccgccattgtaggcggggacccctattgttgcgagctgcttctccatgaacatgcgacagtgtgttgcaaagatgagaacggatggcacgagatccaccagtag

SEQ ID NO: 204948 - DNA, 5244 bp, synthetic construct
  misc_feature 1..5244: note = Description of Artificial Sequence: Synthetic coding sequence
  source 1..5244: mol_type = other DNA
atggacggccccggcgccagcgccgtggtggtgcgggtgggcatccctgacttgcagcaaactaagtgtctgagactggatcccgctgctcccgtctgggccgcaaagcagcgtgtactgtgtgcccttaatcacagcctgcaggacgcgctgaattatggtcttttccagccaccctcacgaggccgcgcgggtaagttcctggacgaagaacgtctgctacaggaatacccaccaaatttagatacccctttaccgtacctggagttccggtataaaagaagggtgtatgcacagaacctgatcgatgataagcagttcgcgaaactgcatacaaaggcaaatctcaagaagtttatggactatgtgcagctgcacagcacggataaggttgcccggcttttggataaggggctagaccccaatttccacgatccagactcaggtgagtgtccgctctcactggccgcccagctggacaacgccaccgatcttctgaaggttctgaaaaacgggggggcccatctggacttccggactcgcgacggtctcaccgccgttcactgcgctacacggcagagaaacgcggcagctctgactaccctgttggatcttggcgcttctcctgactataaggactctagaggcttgacacccttataccactccgctctcgggggaggcgatgctttgtgttgtgagctgctcctccacgatcacgcccagctaggtatcaccgatgagaacggctggcaggaaatccaccaggcatgcagatttggtcatgttcaacacctcgagcatctcctgttctacggcgccgacatgggagcccagaatgcttcagggaacaccgctctccacatttgcgcactctataatcaggaaagttgcgcacgggtactgctgttcagaggagctaaccgagacgtccgtaactacaacagccagactgcattccaggttgccattattgccgggaactttgaactggctgaggtcattaagacacataaagattcggatgtcgtcccctttagggagaccccttcatatgccaaacgcaggaggctcgcaggaccaagcggtctggcatctccgcgaccactccagagatccgctagcgacatcaatctgaagggcgaggcccagccggcagcaagtcccgggcccagcttaagatcactcccacatcaactgctgctgcagcggctgcaggaagaaaaggaccgcgatagggacgcggatcaggagagtaatatcagtggccccctcgctggcagagccggtcagagcaaaatttcagaccctggaccaggcccaggcggagttggtggcgctccccttcccccccctggggctccccgcagttgcattcgtatccgggccaggtttcccgccccccccgctccaccagcgccacccccgcgtggacctaagcgaaagttgtattccgccgtgcctggaaggaagttcatagcagtaaaggcccacagccctcaaggcgagggtgagattccactacaccgaggcgaagcagtgaaggtgcttagcatcggggaaggcgggttctgggagggaactgtcaaaggccggaccggatggttcccagctgattgtgtggaagaggtccagatgcggcagcatgatactcggccagagacccgtgaagatcgcactaagaggctgttccgccattacaccgtcgggtcttacgacagtctgacgtcccactccgattatgttatcgatgataaagtggccgtattgcagaaaagggaccatgagggttttggttttgtcctgaggggtgccaaagctgaaacaccaatcgaggaattcacgcctactcctgcttttccagcattgcagtatctcgaatccgtggacgtggagggagttgcttggagagctggattgcgcacaggtgacttcttgattgaagtgaacggcgttaatgtggtgaaagtaggccataagcaggttgtggcactaattaggcagggcggaaaccgcttagtgatgaaagtggtgtctgttacgcggaagcctgaggaagatggagccaggcgtagggccccccccccgccgaaacgagcaccctctacaacgctcacactgcgtagtaaaagtatgaccgccgagctcgaagaacttgccagcatcagacgccgaaaaggagagaagctagatgagatgctggcagcggctgcggaacctactttgcgtcccgacatcgcagatgctgatagccgggccgctaccgtgaagcagcggcctacctctcgcagaatcactcccgccgaaatttcttccctctttgagcgccaggggttgcctggccctgagaaactgcccgggtctctgaggaaaggcatccctcgaaccaagtctgtcggggaagatgaaaagttggccagtctcctggagggccgattcccccggagtactagcatgcaagacccagttagggagggacgaggaattcccccacctccccaaactgcgccgcccccgccacccgctccgtactattttgacagcggtccccctcccgctttctccccacctcctcccccgggcagggcttacgatacagtccgctccagcttcaaacccggactcgaagccaggctaggagcaggtgcggccggcctctacgagccgggagccgctctaggcccccttccctatcccgaaagacagaagagggcgcgctccatgataatactccaggacagtgctcccgaatccggggatgctcctcggccaccccctgcagcaactccacctgagcgccccaagcgaagaccgcgacctcccggtcccgacagcccatacgccaacctcggcgctttctctgcatctctgtttgctccttccaagccacaacgcaggaagagtccgctggtgaagcagctgcaggtggaggacgctcaggagcgtgctgcgctggcggtcggatctccggggcccggcggcggctcttttgctagggaaccttcccctacccatagggggccacgacctggagggctggattatggagcgggagacggacctggcttagcctttgggggcccaggccctgccaaagatcggaggctggaggagcgtcgtaggtctacagtatttctctcagtcggcgccatcgagggttcagctcctggagctgatttaccttccctgcagccctctcggtctatcgatgagcggctgctgggcactggacctaccgctggtagggacctgctgctgcccagtcctgtgagcgcccttaaaccactggtgtctggcccgagcctaggcccatccggcagcacctttatacaccccctgactggcaagcctctggatccctccagtccgttagctctggcgttagccgcccgggaacgtgctttggcttcccaggccccctcccggtcacctacaccggtgcacagtccagacgccgaccgccctggacccctgtttgtcgatgttcaggctcgagacccagaacgcggcagtctggccagcccagcatttagccctagatcgcctgcgtggattccagtgcccgcaagaagagaggccgagaaggttccacgtgaggaacgcaaatctccagaagacaaaaaaagcatgattctgtctgttttggatacctctctgcagcgccccgctggtctgattgtggtgcatgccacctctaatggacaggagccatctagattgggaggcgcggaggaggagcgccccggtacaccagagcttgccccagccccaatgcagtccgcagctgtggctgaacctctaccatccccacgcgcacagcccccaggggggaccccggccgacgccggccctgggcagggttcttccgaagaggaacctgaacttgtcttcgccgtcaacctgccccccgcacagctttcttcttcagatgaggagactcgagaagagctcgcccgaatcgggctggttccccctcccgaggagttcgcaaacggagtgctgctggcaacacctctggcaggccctggtcctagccccactactgtgccttctccagcttccgggaagccctcaagtgaacccccgccagccccagagagcgcagcggatagtggcgtcgaggaggctgacaccagaagcagttcggatccccacttagagactaccagcacaatttccaccgtttcttctatgagtacactcagctctgagtcaggagagctgacagatactcacacatcctttgctgacggacatactttccttttggaaaaaccccctgtccccccgaagcccaagctgaagtcacccttaggcaaagggcccgtcacatttagagaccccttactgaagcagagctcggattctgaattgatggcacaacagcatcacgcagcgtctgccggtctcgcttcagctgccggacccgcgagacctagatatctctttcagcgtagatccaaactgtggggggatcccgtggaaagcagaggactgccgggccccgaggacgataagcctaccgtgatttctgagctgagctcaaggctgcagcagctgaataaggacacacggagtctgggggaggaaccagtgggcggcctgggctccctcttggaccctgcaaagaaatcaccaatcgctgccgccagattattctcttccctaggcgaactttccagtatttccgctcaacgaagccctggtgggccaggcgggggagccagctatagcgtccggccttcaggtcgttatcccgtggctcgccgtgccccatctccggttaagcctgccagcctggaacgcgttgaggggctaggtgcgggggcaggcggagctggaaggccttttggccttacccctccaactatcctcaagtcctcatccctgtctatcccccatgaacccaaggaagtaaggtttgtagtccggagtgtcagtgctaggtccagatctcccagtccctccccgctgccctcgcccgccagcggaccagggcccggcgcaccagggcctcggcgtcccttccagcagaaacccctgcaactgtggtccaagttcgatgtgggcgactggctcgaaagcatacatctgggcgaacacagggaccggtttgaagatcacgaaatcgaaggagcacacctgcctgccctgactaaggatgatttcgtggagctaggcgttacacgggtcgggcatcgcatgaatattgaacgcgctctgcgccagcttgatggcagctag

SEQ ID NO: 204949 - DNA, 5229 bp, synthetic construct
  misc_feature 1..5229: note = Description of Artificial Sequence: Synthetic coding sequence
  source 1..5229: mol_type = other DNA
atggacggccccggcgccagcgccgtggtggtgcgggtgggcatcccagatttgcaacagaccaaatgtttacggttggatcctgccgcccctgtatgggccgcaaagcaacgagtactgtgtgctctgaatcacagcctgcaagatgcattgaattacggcttattccagcctcccagtcggggacgagcaggtaagtttcttgacgaagagaggttgctgcaagagtacccccctaatctggatactccccttccatatctggagtttaggtacaagcgacgggtgtacgcccagaatctgattgatgacaagcaattcgccaaactgcacacaaaagccaacttaaaaaaatttatggactacgtgcagctccatagtacagacaaagtcgctcgactcctggataagggattggaccctaacttccatgatcccgattcgggggaatgccctctctctctggctgcccagctggacaacgctactgatctgctcaaggtgctcaagaatgggggagcacatttagacttccgaacccgcgacggactcaccgctgtgcactgtgccaccagacagaggaatgctgccgctctgacgactctcctggatcttggggctagtcctgattacaaagattcccgaggtcttactccactgtaccattcggccctcggcggcggcgacgctttatgttgcgaactgttactccacgaccacgcgcagctggggataactgacgagaacggatggcaagagatccaccaggcgtgtagatttggccatgtgcagcacctggagcacctgctcttctatggggcagatatgggagcccagaatgcgagcggcaatacagccctccatatctgcgcattgtacaatcaggaaagttgtgcccgggtgctgctgttcagaggagctaatcgggatgttagaaactataatagccaaacagcttttcaggtggccatcatcgccggaaatttcgaactggccgaagtgatcaagactcataaagatagtgatgtcgtaccttttagagagacccccagctacgccaagcgtcgaagattggcagggccttccgggttagcctccccccggcccttgcagaggtccgcatcggatattaaccttaaaggggaggcccagcctgcagcatcccccggaccttccctgagaagtttacctcaccaacttctgctgcaacggcttcaggaagagaaagaccgcgaccgtgatgccgaccaggagagcaacatttcaggccctctcgccgggagagccggacagagcaaaatcagcgagcccggtgcccctcgctcttgcatccgcatccgggcccggttccctgcgccgcccgcaccgcctgccccccccccccgcggaccaaaaaggaagttgtacagcgccgtgcctggccgaaaatttatcgctgtgaaggcacattccccccagggcgagggggaaattccactgcacagaggagaggcagtgaaggtgctttctatcggggaggggggcttttgggaagggacagttaagggtaggacaggctggtttcccgctgactgtgttgaagaggtgcagatgcggcaacacgacacgcgccccgagactcgcgaagaccggaccaagcggcttttcaggcactacacagtggggtcctacgattcgttgacctcccactcagattacgtgatcgatgataaggtggcagtgctgcagaaacgggatcacgagggcttcggttttgtactgaggggcgctaaggctgagactccgatagaggaattcactccaacacccgcatttccagcactgcagtacctggagtctgtcgacgtggagggcgtggcctggagggcaggcctacgaacaggggattttttgatagaagttaatggagtgaacgttgttaaagttgggcataaacaggtggtcgccctgattcgccaaggaggcaaccgcctggtaatgaaggtggtttcagtgacccgtaagcctgaagaggatggagcacgccgtagagcgccgccccctccaaaaagggctccttccacaaccttgacgctcaggagcaagtccatgacggcagagttagaggagctcggggagtggcgtggcagggaggggagcgagaaattggatgagatgctggctgcagcagctgagcccactctaagacccgatatagccgacgcggattctagagcagctaccgtgaaacagaggccaacaagccgccgcatcaccccagctgagatctcatccttgtttgaacgccaggggctgcctggccccgagaagctccccgggagcctgagaaaaggcataccccgtaccaagtcggtgggggaggatgagaaacttgccagcctcctggagggaaggttccctaggtcaacttccatgcaggaccccgtgcgagaagggcgcggaatcccgccccctcctcagacagcccccccacctccgcctgctccgtactattttgatagcggccccccgcctgcattcagtccgccgccaccccccgggagagcatacgataccgtaagatcgagcttcaaaccagggttggaggcccgtctgggtgccggagctgcagggctgtacgaacccggcgctgcccttgggcctctcccttatcctgagcggcagaagcgggcccgttcaatgattattctgcaggattcagcccctgagtccggtgatgccccccggcctcccccagccgctactccaccagagagaccaaagcggcgaccaaggccccctggaccagacagtccttacgctaatcttggcgccttcagtgcctcactttttgccccctcaaaaccccaacgccggaagagccctcttgtgaagcagttacaggtcgaggacgcacaggagcgagccgccctggctgtcggctctcctggcccgggggggggctctttcgcccgagagccctcacctacacacagggggccacgacctggggggctggactatggtgccggggatggtccaggactggcttttggaggcccagggcccgcgaaggatcgtagacttgaagaacggcggcgctctacagtgttcctctccgtcggagccattgaggggtcggccccaggcgccgatctgccctccctccaaccctcccgatccatcgacgaacggctgctgggaacaggccccaccgcaggcagggacctccttcttccctcaccagtgtccgccctgaaacccctggtttccggacccagtctagggccctctggtagtacgttcatacaccccctgaccggtaaacctctggacccctcctctcctctcgcactggcactcgctgcccgcgagcgcgccctggcatcccaggctccctccaggagcccaacccccgtgcacagtcctgatgctgaccgccccggcccactatttgttgacgttcaggccagggacccggagcgggggtccttggcgtctcctgcttttagccccaggtcccccgcctggattcctgtcccagcccggcgggaagctgagaaggtgccccgcgaagagagaaagagccctgaagacaagaagtctatgattctctcagttcttgacacatccctgcagcggccagcaggactgatcgtggttcatgccacttccaacggccaagaacctagccgactggggggcgccgaagaagagagaccaggtacaccagaactcgctccagccccgatgcagagtgcagcagtggcagaacccctgccgagcccaagggcccagccacctggtgggacccccgctgatgcgggaccaggacagggcagctctgaggaggagcccgagctcgtctttgcggtgaacctcccacctgcacagttgtccagctcagacgaggagaccagagaggagttagctcggatcggcctggttccccccccagaagaattcgcaaatggggtcctactcgctactccgctggcagggcccggccctagccccacaaccgtgcccagtcccgcgtccgggaaaccatcaagtgagccccccccagctcctgagtccgctgcggattcaggcgtggaagaggccgatactcgatcctcttcagacccgcatctggagaccacgtcaacaatatctaccgtctcaagtatgagcactctgtcctctgagagtggcgaacttacagacacacacacatcatttgccgacggccacaccttcctgctggagaaacccccagtgccccccaaacccaaactgaagtcccctctcggcaaaggccccgtgacctttcgtgatcccctgctaaagcagtcatccgatagcgagctgatggctcagcagcatcatgcagcttccgcaggtctcgcctctgcagcaggcccagcgcgccctcgctatttgtttcagcggaggtcaaaactgtggggggatccggtcgaatcccgcggactacccggtccagaggacgataagcctacagtgatatcagaactcagctctagattgcagcagctgaataaagataccagaagcctgggggaggaacctgtggggggactgggtagtctcctggaccctgcaaaaaaatcccccatcgctgccgctcggtgtaggtctccaatggttggactccggctcttttctagtttaggggagctttcttcaatttctgctcaaaggtcacccggcggtcccggaggtggggccagttacagcgttcgcccttcagggcggtatccagtagcccgacgcgcgccgtctcctgttaaaccagcatccctcgagcgggtcgagggcctgggtgcaggagctggaggcgcgggccgcccttttggcctgaccccacccactatcttgaagagctctagcttatcaattcctcacgagccaaaggaagttcgctttgtcgtccgctcagtctcggcccggtcacggtcccccagccccagcccattgccttccccagcttccgggccgggccccggagcccccggcccccgaagaccttttcagcaaaaaccccttcagctgtggagcaaatttgacgtaggagactggctggagtcgattcacctgggcgaacacagggacaggtttgaggaccatgagatcgaaggtgcccatttacccgccttaacaaaggatgattttgtggagttaggtgtgaccagggtgggacatcgaatgaatatcgaacgagccttacgtcagctcgacgggtcatag

SEQ ID NO: 204950 - DNA, 2736 bp, synthetic construct
  misc_feature 1..2736: note = Description of Artificial Sequence: Synthetic coding sequence
  source 1..2736: mol_type = other DNA
atgcccccccggcggagcatcgtggaggtgaaggtgctggacgtgcaaaaaagacgtgtacctaacaagcattacgtctacatcatccgagtgacgtggagtagcggcagtactgaggctatatatcggaggtattcaaagttctttgacctccagatgcagatgctcgacaagttccccatggaaggcggacagaaggatccaaagcaaagaattatcccattcctgccggggaagattctgtttagacggtcccatattcgggatgtggcggttaagagactcatccctattgacgagtattgcaaggcactcatccagctgccaccgtatatctcacaatgtgacgaggtcctccaattcttcgagacgcgtcccgaggatcttaaccctcccaaagaggagcacataggaaagaagaagagtggcggggaccagactagcgtcgaccctatggttctggaacagtacgtagtcgtcgccaattatcaaaagcaggagagctcagagatctctctgtctgtcggacaagtagtggatatcattgaaaagaatgaatccggttggtggtttgtgtccaccgccgaagagcagggctgggtgccagcaacctgtctggaggggcaggacggggttcaggacgaatttagtctgcaaccagaagaggaggaaaagtacacagtcatttacccgtacacggctagagaccaggacgagatgaacctggagcgcggcgcagtggtggaggtcattcaaaagaatctggagggttggtggaagatcaggtaccaaggcaaagagggctgggccccggccagctacctcaagaagaatagtggcgagcccctacctccgaagcctggtcctgggtcccccagccaccccggcgcacttgacctggacggcgtctcccgtcagcagaacgctgtcggaagagagaaagagctgctcagcagccagcgggacggaaggtttgaggggaggcccgtgcccgacggtgatgccaagcagcgatctcccaagatgagacagcgcccacccccacggagggatatgacaattccacgcggactcaatctgccaaaaccccctatcccaccccaggtggaagaggagtactatacaattgccgaattccaaaccaccattccagatggcatcagctttcaggccggcctcaaagtcgaagttatcgaaaaaaacctgtcgggatggtggtatatacaaatcgaagacaaagagggttgggcccccgctacttttatcgacaaatacaagaagacatctaatgcgtcacgccctaacttcctggcccccttgccccacgaagtcactcagctgcgcttgggggaggccgctgcactggagaataacacaggcagtgaggccactggcccaagtagacctctccccgatgccccccacggtgtcatggatagtgggcttccatggtcgaaggattggaaaggtagcaaggacgtcctgcgcaaggcatctagtgatatgtccgcgagcgccggatacgaggagataagcgacccagacatggaggaaaagccaagcctgcctccaaggaaagaatctattatcaagtcagagggggagttgctggagcgagagagagaaaggcagagaacggaacagctccgcggccctactccgaagccgcccggcgtgatccttccaatgatgcctgccaagcacattccccctgctagggactcgaggcgccctgagcccaaacccgataagtctcgcttgttccagctgaaaaacgatatggggctggagtgtgggcataaagtactcgcaaaggaagtaaaaaaacccaatttaaggcctattagcaagagcaagactgatctgcctgaggagaagccagacgcgacaccccaaaacccttttctcaagtcgcggccccaagtgaggcctaaacccgccccttcacctaaaaccgagcccccgcagggagaggatcaggtggacatctgcaaccttcgtagcaaactcagacccgccaagtctcaggacaagtccctgctcgacggggagggcccacaggcagtgggaggccaggacgtcgctttcagccgctcatttctacccggggagggcccaggcagggcccaggatcgtaccggcaagcaagatggactttctcctaaggagatcagctgtcgcgcccccccaagacccgcaaagactaccgacccagtttccaagtcagtaccagtgcctctccaggaagcacctcagcagcgcccagttgttccaccccggcgcccccctcctccaaaaaagacttcttcctctagcagacccttgccagaggtcagaggaccccagtgcgaagggcacgagtctagggctgcacccacaccgggacgggcgctacttgtacctcccaaggctaagccattcctttctaatagtctggggggccaggatgacacaaggggcaaaggcagcctcggtccatggggtacgggaaaaattggcgagaatagagagaaagccgccgcggccagcgtgccaaacgccgatggactgaaggattcactttatgtagccgtggctgacttcgagggggacaaagatacaagttcctttcaggagggtaccgtcttcgaagttcgggagaaaaattcaagcgggtggtggttttgtcaggtgctctcaggcgcaccaagctgggaagggtggattccctccaactacctccgaaaaaagccatag

SEQ ID NO: 204951 - DNA, 2805 bp, synthetic construct
  misc_feature 1..2805: note = Description of Artificial Sequence: Synthetic coding sequence
  source 1..2805: mol_type = other DNA
atggaggagatctggaagttcagcacctacctgaacctgggctacgtaagtatgtgccttgagcacttattgtttgaccacaaatactggctcaactgcatcctggtagaggacactgaaatacaggtgagtgtcgatgacaaacacttggaaaccatttaccttggtctgttgatacaggaagggcacttcttctgccgggcgctgtgtagcgtcaccccccccgccgagaaagaaggcgagtgtctaaccctgtgtaagaatgagctaatcagtgtgaaaatggcagaggccggcagtgaactcgagggcgtaagcttggtcaccgggcagcggggcctagtactggtctcggccttggagccgctaccgctcccattccaccaatggtttttgaagaattaccctggctcgtgcggtctgagtagaaaaagggactggaccggcagctaccagatcgggcggggccgttgtaaggccctcacggggtacgagccaggcgaaaaggacgaactgaatttctatcagggtgagagcattgaaattataggctttgtcatcccagggctgcagtggtttatcggaaagagcactagcagcggccaagtaggcttcgtgcccacccgcaacattgacccagattcctatagcccgatgagtagaaactcagcttttcttagtgacgaggagagatgctctctgctggcccttgggtctgataaacagaccgagtgcagcagttttctgcacacactggcacgcaccgacataacaagtgtctataggctaagtgggtttgaatcaatccaaaacccccccaacgacctatcggcgtcacagcccgaaggattcaaggaggttagaccagggagggcctgggaggaacaccaagctgtggggtcccgccagagcagcagttctgaagactcgtcacttgaggaggagctcctctctgcgacctctgactcataccggctgccggagccagacgacctcgatgacccagaattgctgatggacctttctaccggacaggaggaagaggcagagaattttgccccgattttggcgtttttagatcatgaaggctatgccgaccacttcaaatccctgtacgacttttcatttagctttctgacgtcctctttctacagtttttctgaagaggatgaatttgtagcctacttagaggcatcaaggaagtgggctaagaagagccatatgacctgggcccatgcacggctctgctttttgttaggtcggctgtccattcgcaaagtcaaactgagccaggcccgggtctatttcgaggaggcaatccatattcttaacggcgctttcgaagatctatctctggtcgctactctctatatcaaccttgccgctatctacctcaagcagcgattgaggcataaagggtcagctcttttggagaaagcaggcgctctgctcgcctgtctgcccgatagggagtcatccgcaaaacacgaactcgacgtggtcgcctacgtgctgagacagggtattgtggtggggtcttctccactggaggcgcgagcttgctttttagcaattcggttattactctcactcgggaggcacgaggaggttctgccatttgctgaacggcttcagctcctgtcgggccatccccccgcatccgaggccgtggcctctgtactgagctttctgtacgacaaaaaatatttgccccacctcgctgtggcttccgttcagcagcatggtattcagtctgctcaggggatgtctttgcccatatggcaggtgcacctggtgctgcagaacacgaccaaactgctgggctttccaagccccggatggggggaggtgagcgccctggcttgccctatgctgagacaggccctggccgcttgtgaagagctggctgaccgttcaactcaacgagccctctgtttgattttgagcaaggtttatctggagcaccgatcgccagacggtgccatccactatctgtctcaggccctggtgctgggtcagttgcttggcgaacaggagagtttcgaaagttctctctgcctagcgtgggcatacctgctggcctcacaggcgaaaaaagccctagatgttctcgagcccctgttatgctcccttaaggaaaccgaatcattgactcagcgaggggtgatctacaatttgctgggcttggctttgcagggcgagggacgggttaatcgggcagccaagagttatctgagggcccttaatcgcgcccaggaggtgggcgacgtgcacaatcaagctgtggcgatggcaaacctcggtcacctgagtctgaagtcttgggctcagcacccagcccggaattacctactccaggctgtgcgtctgtattgcgagcttcaggcctctaaggagacggatatggaattggtgcaggtcttcctgtggctggcacaggttcttgtgagtggtcaccaactcacccatggcctgctgtgttacgagatggccctccttttcgggctgcgccaccggcacctcaagagtaagtatgtgccatgttgctgggaggccattgagaagagcgtcggcagcagcttcatccattttctgtctcaggttattagttttatgagcctgctgtgcgtgcaggtctcttttcgcccccctaatcctagtgctatctccaccgcgctttgcccacagacacttagacacgctagtcctacaatgtctaccggttggccttggctcagtaacagcggcacggggcggtggaaaggggggtgttggagcccatgggggtccttcattggaacctag

SEQ ID NO: 204952 - DNA, 453 bp, synthetic construct
  misc_feature 1..453: note = Description of Artificial Sequence: Synthetic coding sequence
  source 1..453: mol_type = other DNA
atgagcgagcagatgatgcagagcgtgggctgccggatcagcctgagcgtctttcaatttctgggcgaccagaggcaggagttagtcgccttccaccgcctggcaacggtctattattccctccacatgtacgaaatggcagaggactgctacctgaagacattatccttatgtcctccatggcttcagtctcccaaagaggccctgtactacgccaaagtttattacagactcggcaggctgaccttctgccagctaaaggacgcccatgatgccacagagtactttttactggccctcgcggctgccgttctgctgggggatgaggaactccaggataccatccgctcccgtctggataatatttgtcagagcccgctgtggcacagcagaccatccggctgttctagtgagcgggcccgatggctgtcaggcggcggcctcgccctatag

SEQ ID NO: 204953 - DNA, 3867 bp, synthetic construct
  misc_feature 1..3867: note = Description of Artificial Sequence: Synthetic coding sequence
  source 1..3867: mol_type = other DNA
atgggcggctgcttctgcatcccccgggagcggagcctgacccggggccccggcaaggagacccccagcaaggaccctactgtttcttccgagtgcatcgcctccagtgaatacaaagaaaaatgttttctgcctcagaatattaatcctgacctgaccctcagcttctgtgtgaaaagtcggagtcggcgctgtgtcaatggacctctacaggaagcagcacggaggaggctgtgggctttggaaaacgaggatcaagaggtccgcatgctgtttaaagacctttctgctcgccttgtgtctattcagtcacagagggcccagtttttaattactttcaaaacaatggaggagatttggaaattctcaacttacttgaacctcggatacgtctctatgtgcttggagcatctcctctttgatcataagtattggctgaactgtatactggtggaagataccgagatccaggtgtccgtggacgacaagcatttggagaccatatatctgggactcctgatacaggagggtcactttttctgccgcgctttgtgctctgttactcccccagctgagaaggaaggcgagtgcctcacactgtgtaaaaatgaactaatctcggtgaaaatggcagaggcaggctcagagcttgaaggcgtgtccctcgttaccggacagcgtgggctggtgctggtgtccgccttagaacccctgcccctgcccttccatcagtggttcctcaaaaactacccaggatcatgcggcctgagtcgaaaacgcgactggaccggatcataccagatcggccggggcaggtgtaaagctcttaccggctacgagccgggtgaaaaggacgagctcaatttctatcaaggggaatcaatagagattattgggttcgtcattcccggacttcagtggttcatcggcaaaagtacctcaagcggccaagttgggtttgtgcctacccggaacattgacccagactcctattcccccatgtccagaaattccgctttcttgagcgatgaagagaggtgttccctacttgcccttggctccgataaacagaccgagtgcagttcctttctgcatacactggccaggacggacattacgagtgtttatcggctgtcaggctttgagtctatccagaatccccctaacgacctaagcgcctctcagcctgagggctttaaggaggtgcgtccaggacgtgcttgggaggaacaccaggccgtgggtagtcggcagtcttcttcatcggaggattcaagcctggaggaagagttgctatccgcaacctctgatagctaccgcttacccgagcctgatgacttggacgaccccgaattattgatggacctgagcaccggtcaggaggaagaggccgaaaatttcgcccctatcctggccttcttggatcatgaaggctacgccgaccattttaagagcctgtatgactttagtttcagcttccttacttctagtttttattcttttagtgaggaagatgagttcgtggcgtatttggaagcttctcggaagtgggccaaaaagagtcacatgacttgggctcatgcccggctgtgtttcttattagggaggctgtccatccgcaaggttaaactgtctcaggcacgggtatactttgaagaggccatacacatcctgaatggcgcgttcgaggatctatctttggttgccactctatatatcaatctggcggctatttatctgaagcagagactgcgccataaaggttctgccctgctggagaaggctggagcgcttttggcatgcctccctgacagagagtcatcagctaaacacgaactggatgtggtcgcttatgtgctgcgccagggcatcgtggtcggctcttccccgctggaagcccgcgcctgcttccttgccatcaggcttctactcagcctgggtcgccacgaggaggtgctgccatttgcggaaagactgcagttgttaagtggtcatccacccgctagcgaagccgtcgcgagtgttctgtccttcctgtacgacaagaaatatctacctcacctggccgtggcctcagtgcagcagcacggtatccaatcagcgcaggggatgtccctgcctatctggcaggtgcacctggtcctgcaaaacactaccaaactgctcggcttcccctctccagggtggggagaggtgtcagcattggcttgtccaatgcttcgccaggctctggccgcctgcgaagaactggctgataggagcacccagcgagccctatgtttgatactgtcgaaggtctacttggaacataggagtcccgatggggcaatacattacctgagccaggccctcgtgcttggccagctgttgggggagcaggagtcctttgaaagctccctctgcctggcgtgggcctacttactggcctcccaggcgaagaaggcgctggatgtgctcgagccactactgtgtagcctgaaggaaactgaatctcttactcaacggggagtgatctacaatctgctgggtctagctcttcagggagagggaagagtcaatcgggccgccaagagctatctacgcgcgcttaatcgcgcgcaagaggtcggtgatgtccacaatcaggccgtggctatggcgaatctgggacatctgagcctgaagtcttgggctcagcatcctgcgcggaactatctcctccaggctgtcaggttgtactgtgaactgcaggccagcaaagaaacggatatggagttggtacaggtatttctatggctcgctcaggtgctagtatctggccatcagcttactcacggccttttatgctacgaaatggccttgctgtttggcttacggcacaggcatctgaaaagtcagctgcaggctacaaagtcgttatgccatttttactcctcagtgtcacccaatcctgaggcctgcattacgtatcatgagcattggctcgcgctggcccagcagttacgggatagggagatggaagggagactacttgaatcactcgggcagttgtatcgaaatttaaacacagcccggtcactccgccgatccctcacatgtattaaagagtctctgagaatttttatagatctgggcgagactgacaaggcagcagaggcatggttaggtgcagggaggctgcattaccttatgcaggaagatgagctggtggaactctgcctccaggcagccattcagaccgctcttaagtcagaggaacctcttctggcacttaagctgtatgaagaggcaggggatgtgtttttcaacgggaccaggcacagacatcacgccgtggagtattacagagccggcgcagtgccattagcacggcgcctgaaggccgttcgaacggagctgcgtatctttaataagctaactgagttacagataagtctggagggttatgagaaggctctcgaattcgctacgttagctgctcggctgtcaacggttacaggagatcaaaggcaggagctcgttgctttccaccggttggcgaccgtctattactcattgcacatgtacgaaatggctgaagactgttatctgaagacactgagcctgtgcccgccctggctccagtcccccaaagaggccctgtactacgccaaggtttactatagactgggccgtttgaccttttgccagcttaaggacgcacatgatgccaccgaatatttcttattggccctggctgcggcggtcctgctgggggatgaggagctacaggacacaattcgcagcagactggacaacatatgccagtcccccctgtggcactcaagaccctccggctgcagtagcgaacgggccaggtggctatccggaggcggcctagccctctag

SEQ ID NO: 204954 - DNA, 2181 bp, synthetic construct
  misc_feature 1..2181: note = Description of Artificial Sequence: Synthetic coding sequence
  source 1..2181: mol_type = other DNA
atggacctgagcaccggccaggaggaggaggccgagaacttcgcccctattctcgccttcctggaccatgaggggtacgcggaccacttcaaaagtctgtacgacttcagtttttcttttcttaccagcagtttctatagcttcagcgaagaggatgagtttgtggcctatctggaggcctccaggaagtgggccaagaagtcccatatgacatgggcgcacgctagactgtgctttctcctgggaaggctttccattagaaaagtgaaactatcccaggctcgggtgtacttcgaagaggccatccacatcttgaacggggctttcgaggatctatccctcgttgccacactctacattaacctggctgcgatctaccttaagcagagattaaggcacaaggggagcgcgctacttgaaaaggccggtgcattacttgcatgccttccggatcgtgagtcaagtgccaaacacgagctggacgttgtggcctacgtcctccggcaaggcattgtggtagggtcatcacctttggaggctcgcgcttgcttcctagctattcgtctgcttctgtctctgggccgacatgaagaggtccttccgtttgctgaacgcctgcagctactgagcggccacccacctgccagtgaggctgtggcgtccgtacttagctttctctacgacaagaaatatttgccccacctagctgttgcaagcgtacagcagcatggaattcagtctgcccagggcatgagcctgccgatttggcaagtacaccttgtgttgcagaacactaccaagctgctgggctttccttctccgggatggggtgaagtgtcagccctcgcttgcccgatgctacgccaagcgctggctgcctgtgaggaactggcagatcgaagtacccaaagggctttatgtctcatcctgagtaaagtgtatttggaacatcggtcgccagacggggcaatccattatctctcacaggccctggtgcttggacagctcttgggagagcaggagtctttcgagtccagtctgtgcctagcatgggcttacctgctggcgtcccaggccaaaaaggcccttgacgttctggagcctcttctgtgctcccttaaggagacggaatcacttactcagagaggcgtcatctataacttactcggattggctctgcagggcgagggacgggttaatagagcagcaaaaagctatctaagagcccttaaccgtgctcaggaggtgggggacgtgcacaaccaagcagtcgcaatggcaaacctggggcacctgagtctcaaatcttgggcccaacatccggctagaaactatctgttacaggccgtgcgactgtactgtgagctgcaggcctccaaggaaacagacatggaactggtccaggtgtttctctggctggcgcaagtgcttgttagtggacaccaactgacgcatggtcttctatgttacgagatggccttattgttcggtctgcgtcaccgtcacttgaaatcccagcttcaggcaacaaagtcactctgtcacttctattccagcgtgagtccaaaccctgaggcgtgcatcacctaccatgaacattggctagctctggctcagcagttgagagaccgtgaaatggagggtcgcctcctcgaaagtctgggccaactctataggaaccttaatacagctcgttctctgagacgtagtctcacttgcataaaagagagtctgagaatcttcatcgatctgggggagacagataaggccgccgaggcttggttaggcgccggccgcttgcactatctgatgcaggaagatgagctggtggaattgtgcctgcaggccgcaatccagacagccttaaaatctgaggagccactgctggctctaaagctgtacgaggaggctggtgatgtcttttttaatggcacccggcatcggcatcacgcagtcgagtactacagggccggggcggttcccttggcccgccggctcaaggcggtgcgcacggagctgagaatctttaataaactcaccgagttacagatctccttggaaggatacgaaaaggctctagagtttgcaacgcttgcggcccggttgagtactgttaccgaggctagggccggtggcctctccccacccggctactcagtcttactccccgcgcacgtgtag

SEQ ID NO: 204955 - DNA, 720 bp, synthetic construct
  misc_feature 1..720: note = Description of Artificial Sequence: Synthetic coding sequence
  source 1..720: mol_type = other DNA
atgcccctgctgctgctgggcgagaccgagcccctgaagctggagagagattgtagaagtcctgtggatccttgggccgccgcttctcccgatctggccttagcctgtctctgtcactgccaggacctgtcttctggggccttccccgaccgcggagttctgggaggtgttctttttccaacggtagagatggtcataaaggtgttcgtggcgacctcaagcggatcaatcgcaataagaaaaaagcaacaagaggtggtgggtttcctggaggcaaataagattgacttcaaagaactggacattgcgggcgacgaggataaccgaagatggatgcgggagaacgtccccggcgagaagaagccacagaacgggatacccctgccaccacagattttcaacgaagagcagtattgcggggactttgactcattctttagcgctaaggaagaaaatattatttattcgtttctcggactggccccacccccagattccaaagggagtgagaaggctgaggaggggggagaaacggaagcccaaaaggaggggtcggaggacgtaggcaacctgccggaagcccaggagaaaaacgaggaagagggggaaaccgctacagaggagactgaggagatagcaatggagggcgcagaaggagaagcagaagaagaggaggagactgctgagggggaggaaccaggggaagacgaagactcctag

SEQ ID NO: 204956 - DNA, 387 bp, synthetic construct
  misc_feature 1..387: note = Description of Artificial Sequence: Synthetic coding sequence
  source 1..387: mol_type = other DNA
atgcgggagaacgtgcccggcgagaagaagccccagaacggcatcccactaccaccccaaattttcaatgaggagcaatattgtggggacttcgacagtttctttagtgcgaaggaagagaacattatatactcctttttagggttagctccgccccccgatagtaaggggagtgagaaagctgaggaagggggcgaaactgaagcccaaaaagagggaagtgaagacgtgggtaatctgccagaggctcaggaaaaaaacgaagaagaaggagaaactgcgaccgaagagactgaggagatcgctatggaaggagcggaaggagaagccgaggaggaagaggagaccgcagagggcgaggaacccggggaagacgaagactcttag

SEQ ID NO: 204957 - DNA, 387 bp, synthetic construct
  misc_feature 1..387: note = Description of Artificial Sequence: Synthetic coding sequence
  source 1..387: mol_type = other DNA
atgcgggagaacgtgcccggcgagaagaagccccagaacggcatccccctgcctcctcaaatctttaacgaggagcaatattgtggcgacttcgattcattcttctccgctaaggaagagaatataatctattctttcctgggtcttgctccaccccccgactcaaaagggtctgagaaggcagaagaaggaggagagacagaagctcaaaaggagggttctgaggacgtcggcaacctgcctgaagctcaggagaagaatgaagaagaaggggaaaccgccactgaggagactgaagaaatcgctatggagggtgcagagggcgaggccgaggaggaagaggaaactgcagagggggaagagcctggtgaagatgaagattcctag

SEQ ID NO: 204958 - DNA, 387 bp, synthetic construct
  misc_feature 1..387: note = Description of Artificial Sequence: Synthetic coding sequence
  source 1..387: mol_type = other DNA
atgcgggagaacgtgcccggcgagaagaagccccagaacggcatccctcttccacctcaaatttttaacgaggaacagtactgcggcgactttgactcatttttctccgcaaaagaagagaatattatctactcctttctgggcctggctccacctccagatagcaagggcagtgaaaaagccgaggaaggtggcgagactgaagctcagaaagagggatccgaagacgtcggtaacctccccgaagcgcaggaaaaaaatgaggaagaaggggagactgcaacagaggagaccgaggagattgcgatggaaggagcagagggcgaagccgaggaggaagaggagacggctgagggcgaggagccaggagaagatgaggactcctag

SEQ ID NO: 204959 - DNA, 321 bp, synthetic construct
  misc_feature 1..321: note = Description of Artificial Sequence: Synthetic coding sequence
  source 1..321: mol_type = other DNA
atgcgggagaacgtgcccggcgagaagaagccccagaacggcatcccactgccacctcaaatattcaatgaggagcagtattgtggagattttgattctttttttagcgccaaggaagaaaatattatctactcgtttttgggcttggcccctcccccagatagcaagggatccgaaaaggctgaagagggtggagaaacagaggcccagaaagaggggagtgaggacgtaggcaatctgcccgaggcgcaagagaagaatgaagaagaaggagagaccgctactgaagaaacagaggagatcgccatggagggggcatag

SEQ ID NO: 204960 - DNA, 2373 bp, synthetic construct
  misc_feature 1..2373: note = Description of Artificial Sequence: Synthetic coding sequence
  source 1..2373: mol_type = other DNA
atgaacatcatgaacaccgagcagagccagaacagcatcgtgagccgtatcaaggtctttgaggggcaaaccaatatcgaaactagtggtctgcctaaaaagcccgagattacgcctaggtcgctgccacccaagccgacggtgagttccggaaagcccagtgtagcgcctaagcctgcggctaacagagcttcaggtgagtgggactccggcactgagaacaggttgaaagttacgagcaaagaggggctgaccccttatccccctctccaagaggcaggcagcatccctgtgaccaaacccgaactcccaaaaaaacccaaccctggactcattcgcagcgtcaaccctgaaattccaggccgagggcctctggccgagtcttccgattcggggaaaaaagtcccaaccccagctcctcggcccctactcttgaaaaagtccgtctcatccgagaaccccacgtaccccagtgcacccctgaaaccagtcactgtgccaccaagacttgcgggcgcatcccaagcaaaagcctacaagtctctcggcgaaggtccacctgccaatcccccggtccccgtgctccaatccaagcctctcgtcgatattgatctgatctcattcgacgacgatgtgctccccaccccatcaggtaatttggcagaggaatctgtgggaagtgaaatggtcctggaccctttccaactgcccgccaaaacagaacccattaaagagcgagcagttcagcctgctcctactcgcaagcccactgtaatcaggatcccagccaagccaggaaaatgcctccatgaagatccacagagcccccctccactacccgctgaaaagcccataggtaacacctttagcactgtctcaggcaaactgagtaacgttgagcggaccaggaacttggagtccaatcacccagggcagactgggggcttcgtgcgggtaccgccaaggctgccacctcggccagtaaacggcaaaactattccaacccaacaaccacccaccaaagtacccccagaaaggcctccccctcctaaactgagcgcaactcggagaagcaataagaaactgcccttcaaccgcagcagctccgacatggatctccaaaaaaagcagtccaacctagctaccggactttctaaggccaaatctcaggtttttaaaaaccaggaccccgtgctccctccacgacctaaacccggacatcccctgtactccaagtacatgctctcggtaccacacggcatagccaacgaagatatcgtctcacagaatccgggcgagctctcctgcaaacgtggagacgtactcgttatgctcaaacagactgagaacaattacctggaatgccagaaaggggaagatacagggagagttcacctcagtcagatgaaaatcattacaccactggatgaacaccttcgcagccggccaaatgacccaagccacgcacagaaacccgtggattccggagctccccacgccgtggtactccacgacttccctgcggaacaggtggacgatctgaacctgacttcgggggagattgtgtaccttctggagaaaattgacacagattggtacaggggaaactgtcgtaatcagatcggcatcttcccagccaattatgtgaaggtaattattgacataccggaagggggaaatggaaaacgcgagtgcgtctcaagtcattgcgtgaaaggtagcagatgcgtggccagatttgaatacattggggagcagaaagatgaactgtctttctccgagggcgaaattatcatactgaaagagtatgtcaacgaagagtgggcacgtggagaagttcgaggtcggacaggtatcttcccattgaacttcgtagaaccagtagaagattaccccacctcaggagccaacgtgctttcaaccaaggtgcctctgaagaccaaaaaagaagattccggctcaaattcacaagttaactctctcccagctgagtggtgcgaggcgttgcattccttcaccgccgagacctcggacgacctgtctttcaagcgcggtgaccgcatccaaattctggagcgactggacagcgactggtgtcggggtaggctccaggaccgggaggggattttcccagccgtattcgtccgcccatgccctgccgaagctaaatctatgctagctattgtgccgaaaggccgtaaggccaaggcactctacgacttccggggagagaacgaggatgaattgtccttcaaagctggcgatattataactgagttagagtcggtggatgatgactggatgtccggcgagctgatgggcaagtccggcatcttccctaagaattatattcagttccttcagatatcatag

SEQ ID NO: 204961 - DNA, 2373 bp, synthetic construct
  misc_feature 1..2373: note = Description of Artificial Sequence: Synthetic coding sequence
  source 1..2373: mol_type = other DNA
atgaacatcatgaacaccgagcagagccagaacagcatcgtgagccgaataaaagtgttcgaaggacagacaaatatcgagacgagcggcttgcctaagaagccagagattacacccagaagcctacccccaaagccgaccgtctcttcaggcaagccaagcgtcgcacctaagccagccgctaaccgagcgagtggtgaatgggatagtgggaccgagaatcgccttaaagtaactagcaaggaaggactaactccctacccgcccctgcaagaggccggatctatcccagtgacaaaaccagaacttccaaagaaacctaaccctgggctgatacgatccgtcaatcctgagatccccggtaggggccctctggcagagtccagtgattctggcaagaaggtgcccactccagcgccacgccctctgctgctgaaaaagtcagtgagctcagagaacccaacgtatcccagtgccccacttaagccagtgacagtcccgccaagactggccggagccagtcaggccaaagcgtataagtcactgggagagggccccccggctaatcctcccgttccggtgcttcagagcaaaccgctggtggacatcgacctaatttcgttcgacgatgatgtgctaccaactccatccggcaatctggcagaagagagcgtcgggagcgaaatggtgcttgaccctttccagctgccagctaagactgagccaattaaggaaagggcagtacaacccgccccaaccagaaagccaacagtcatcaggatccctgccaaaccaggaaagtgtctgcacgaagatccacaatctcctccaccactcccggctgaaaaaccgatcggcaacacatttagtacagtgtctggcaaattatccaacgtcgagaggacaaggaacctcgaatctaaccacccgggccagacgggtgggttcgtacgcgtccctccaagattgcctccgcggccagtgaacggaaaaactatccctactcagcagccgcctacaaaagtacctcccgaaagaccccccccccccaaactaagtgctacccgccgaagcaataagaagctgccattcaatcgctcatctagtgacatggatttgcagaaaaaacagtcaaacctggcaactggtctgtccaaggcaaaaagccaagtgttcaagaaccaggacccagtgctgccgccaagaccaaagcccggtcacccactctattcgaagtatatgctttccgtacctcatggcatagctaacgaggacatagtcagccagaaccccggcgagcttagctgcaaacgcggcgacgtgctggtaatgctgaagcaaaccgaaaataattatttggaatgccaaaagggtgaggatactggaagggtgcacctctcccagatgaaaataataaccccactggacgagcacttgcgcagcaggcctaacgatccctcgcacgcccagaagcccgtcgattctggcgccccacacgccgtggtgttgcatgacttcccggccgagcaggtagacgatctgaaccttacaagcggggagatcgtgtaccttctggaaaaaatcgacacggactggtaccgaggtaactgcaggaatcaaattggcatttttcccgcgaattatgtcaaagtcatcattgacatccccgagggcggaaatggaaaacgggaatgcgtgagttctcattgtgttaaaggtagccgctgcgtggcccgctttgaatatattggggaacagaaggacgaactaagtttctcggagggtgaaatcattatactgaaggagtacgtcaacgaggagtgggccaggggagaggtgcgtggacgcaccggaatctttcccttaaatttcgtcgagcccgtggaggattatccaacttcaggggctaatgtcctgtccacaaaggtgcctttgaagaccaagaaggaagactctggtagtaatagccaagtgaatagcttaccggccgagtggtgcgaagctctgcattctttcaccgctgagacctctgatgacctgtcctttaagaggggtgatcgaatacagattcttgaaaggctcgacagcgactggtgcaggggaaggcttcaagatcgggaaggcatctttcctgccgtgtttgtaaggccttgtccggcagaggctaagagcatgttggcaatagtgccaaagggcaggaaggccaaagccttatacgacttccgcggggaaaatgaagatgagttatcattcaaggccggtgacataataacagaactggagtcagtggatgatgactggatgtccggcgaactcatgggcaaaagcggtatcttcccgaaaaattatatccagttcctccagatttcatag

SEQ ID NO: 204962 - DNA, 2304 bp, synthetic construct
  misc_feature 1..2304: note = Description of Artificial Sequence: Synthetic coding sequence
  source 1..2304: mol_type = other DNA
atgaacatcatgaacaccgagcagagccagaacagcatcgtgagcaggattaaagtttttgagggccagacaaatattgagacctccggtttacctaagaaacccgaaataaccccccgctccttaccccccaagccgacggtgagctccgggaagccatcggtggcaccaaagcctgcagccaaccgcgcgagcggcgagtgggacagcgggacagagaacagactgaaagtgacctctaaggagggtcttacaccgtaccctccactccaagaggcaggctcaatacccgtgacaaagcccgagctgcccaagaaaccaaaccccgggttaattcgatccgtgaatccagaaatcccaggcaggggcccgctagctgaaagtagcgactctggaaaaaaggtgcctacacctgcgccacgtcccctgctcctgaagaagtccgtctcttccgagaatcccacatatcctagcgcaccactgaagccagtcacagtgccaccacgactcgctggtgcaagccaggccaaagcctacaaaagcctgggcgaagggccccccgctaatcccccagttcccgtgctgcagtcgaagccccttgtggatatcgatcttatcagctttgatgatgacgtcttgccgaccccctcaggcaacctcgctgaagaaagcgtaggatcagaaatggtgttggacccttttcaattacccgctaaaactgaaccaatcaaggagagagccgtgcagcccgcaccaaccagaaagcctacagtgattcgcatcccagctaaacccggcaaatgtcttcacgaagacccacagtcccctccgcccctccccgccgaaaagcctatcggcaacacattctctacagtttcaggaaaattatccaatgtggagagaacgcgcaatttagagtccaatcacccaggtcagacagggggcttcgtgcgcgtgccgccacggctgcccccacgaccagtgaatggcaagactatcccaacacagcagcctcccaccaaggtcccgccagagcggcctccaccccccaagctgagcgcaacccggcggtcaaataaaaaactgcctttcaatagatcatcgtccgacatggaccttcagaagaaacagagtaatttggccacggggctaagcaaagccaagtcacaggtgtttaaaaatcaggacccagtcctcccgcctaggcccaagcccgggcaccctctttattcaaagtacatgcgcggggatgtcttggttatgctgaaacaaacggagaacaattacctggaatgtcagaagggagaggatacaggcagagtgcacttgtctcagatgaaaatcattactccactagacgaacatctgcgatcacgcccgaacgacccatcgcacgcccagaagcccgtggatagcggcgctccacacgctgtggtgctgcatgactttcctgctgaacaggttgacgacctcaacctcacctccggtgagatagtctatctcctcgagaaaatcgataccgattggtatagagggaattgtcgaaatcaaatcggcatctttcctgcaaattacgtcaaggtgattattgacatacctgaggggggcaacggaaagagggaatgtgtgtccagccattgcgtgaaaggtagtcgttgcgttgctcggttcgaatatataggtgagcaaaaagatgagctctcattcagtgaaggcgagatcatcatactgaaggagtacgtaaatgaagagtgggccagaggggaggtgagaggacgaaccggcatttttccactgaacttcgtggaacctgtggaggattaccccaccagcggagctaatgttctgagcactaaggtgccactcaagacgaagaaggaggactcgggaagcaattcccaggtaaactctttgccagccgagtggtgcgaagccttgcatagcttcacagcagagactagtgatgacctatcgttcaagcggggggatcgcattcagatcctagaaaggctggactccgattggtgtaggggtagacttcaggatcgggagggaatctttccagccgtttttgtcaggccttgtccggccgaggccaagagcatgctggcaatcgttcctaaagggcgtaaggctaaggctctttacgacttccgtggcgagaacgaggatgaacttagctttaaggccggcgacataattacggaactagagtctgtggatgacgactggatgtccggagagttgatgggtaagtccggcattttcccaaagaactacatacaatttctacagatctcttag

SEQ ID NO: 204963 - DNA, 2196 bp, synthetic construct
  misc_feature 1..2196: note = Description of Artificial Sequence: Synthetic coding sequence
  source 1..2196: mol_type = other DNA
atgaacatcatgaacaccgagcagagccagaacagcatcgtgagccggattaaggtgttcgaggggcagactaatatagagacaagcggattgcctaaaaaacctgaaattacaccacgctcacttcccccaaaacccacagtctcaagcggcaaaccaagcgtggctccaaaacctgcggcgaaccgcgccagtggggaatgggattcagggaccgagaatagactgaaggtgaccagcaaagaaggactgaccccttacccccccttgcaggaagccgggagtattccagtcacaaagcccgaattacccaagaaacccaacccaggacttattcggtccgtgaatcccgaaatcccaggccggggaccactcgctgaatcttccgacagcggaaagaaagtacctaccccagcgccgaggccacttcttctgaagaaatctgtgtccagcgagaatccgacatacccctcagcaccacttaaacctgtgactgtcccaccccgactggccggagcatcacaggcaaaggcttacaaatctctcggcgagggacccccggccaatcctcccgtgccagtactgcagagtaagccccttgtggatatcgatctaatcagcttcgacgacgatgtgctgccaactccctccggtaatcttgccgaagagtccgtgggttccgaaatggtgctgggactgcacgaggaccctcagagcccaccccctttgccagcagaaaagccaattggcaataccttcagcacagtgagcgggaaattgtccaacgttgagagaacacggaacctggagtccaaccatccaggacagactggcggattcgtccgcgtaccgcccaggctgccaccacgcccagtgaacggaaagactattcccactcagcagccccctacaaaagtgcctcccgagcggcccccccctcctaaactgagcgccacaagacgcagtaataagaaactcccattcaatagatctagctctgacatggaccttcagaaaaaacaatctaatcttgctaccggcctgtccaaagcaaagtcacaggtgtttaagaaccaggatcccgttctgcctccaagaccaaaacctggccaccccttgtattctaaatatatgagaggcgacgttctggtcatgctcaaacagactgagaacaactacctcgaatgtcaaaagggcgaggatacaggccgagtgcacctatcccagatgaagattataacacccctggatgagcacttgcggtccaggccaaatgatccaagccacgcccagaagccagttgatagtggcgctccccatgccgttgtgcttcacgactttcccgcggaacaagttgatgatctgaatctgacctctggagagattgtatatctgctggagaaaatcgatacagactggtacaggggaaactgtcgcaaccagattggaatctttcccgcgaactatgttaaggtgattatcgatatcccagaaggcggtaacggcaagcgcgagtgcgtttcttcccactgtgtaaaaggctctagatgcgtcgcacgctttgaatacattggggagcagaaggatgagctgtctttcagcgaaggggaaatcattatactgaaggagtacgttaacgaggagtgggcccggggcgaagtacggggtaggacgggaatctttccactgaactttgtggaaccggtcgaggattatccaaccagtggagctaatgtcctctccaccaaggttccattgaagacaaaaaaggaagacagcggctcgaatagtcaggtgaactctttgccagccgaatggtgcgaggccctgcactctttcacagcagagacgtcagatgatctgtctttcaagcgcggtgatcgtatacagattctggagcgtttggacagcgattggtgccgaggcagactgcaggatcgggaaggcattttccctgcagtatttgtaagaccctgccccgcagaagctaaatctatgctggcgatcgttccgaaaggcaggaaagctaaggctctgtacgactttagaggtgagaacgaggatgaactgagctttaaagccggagatattatcactgagttggagagtgtggatgacgactggatgagtggtgagctgatgggaaagagtggtatttttcccaagaactacattcaattcttgcagatatcttag

SEQ ID NO: 204964 - DNA, 2196 bp, synthetic construct
  misc_feature 1..2196: note = Description of Artificial Sequence: Synthetic coding sequence
  source 1..2196: mol_type = other DNA
atgaacatcatgaacaccgagcagagccagaacagcatcgtgagccgcataaaagtgtttgagggacagacgaacatagaaacatccggactgccgaaaaaacctgaaattactccacgttcgcttcctcctaagcccactgtttcttcaggtaaaccttccgttgccccaaagcccgcagcaaatcgggccagcggagagtgggatagcggcacagagaatcgcttgaaagtaacttctaaagaggggctgaccccttatccacctctgcaggaggctgggtcaattcccgtgactaaacctgaactgcccaagaagcctaatcctggcctgatccggtccgtgaaccccgagattcctgggcgggggcctcttgccgagtccagcgactccggcaagaaggtgccgacccccgcaccacgccctttgctgctaaagaaaagtgtttcgagcgagaatccaacgtatcccagcgccccgctaaagcccgtgactgttccacccaggctcgctggagcctcacaggccaaggcctacaagtcattgggcgagggaccgcctgctaacccgccggtcccagtgttgcagtccaaacccctggtcgacatcgatctaatcagctttgacgacgatgtgcttccgacaccctctgggaaccttgctgaggagtcagtggggtctgaaatggtgctgggcttacacgaagatccacagtccccgcctcctttgcctgccgaaaagccgatcggcaacacattttccactgtgtcagggaagctgtctaacgtcgaacggacaagaaaccttgaaagtaatcaccctggacagacaggcggatttgtgcgggtccctccccgcttaccaccccggccagtcaacgggaagacgatccccactcaacagccgcctactaaggtgccaccagagcgccctccgccacccaaactgtctgctaccaggcgcagcaacaaaaaactacccttcaataggagttcatctgatatggacctccagaaaaagcagtccaacctcgcaacaggactttccaaagccaagtcccaggtgtttaagaatcaggacccagtgctccccccgcgcccgaaacctggacatccactttattctaaatacatgcgtggggacgtgctggtgatgctaaaacagaccgagaataactacctcgaatgccaaaagggtgaagataccgggcgagttcacctcagccagatgaaaataatcaccccactggatgagcacctgcgctcacgaccaaatgacccatctcatgctcagaaaccagtggactccggcgctccccacgcggtcgtgctccatgattttccagcagaacaggtcgacgatctcaacctcacctctggggagattgtttacctgttagaaaagattgataccgactggtaccgcggtaactgcagaaaccagatcggaatatttcccgcgaactacgtcaaggtcatcattgacatccccgagggcggcaacggaaaacgcgagtgtgttagttcgcattgcgttaaaggcagtcggtgtgtggctcggttcgagtatatcggagagcagaaagacgaattatccttcagcgaaggcgagattatcatcctgaaggaatacgtgaacgaggagtgggcccggggggaggtccgcgggcggactggcatctttcctctgaactttgttgagcccgtggaagactaccccacaagcggcgctaatgtgctatctacaaaagtgcccctgaagaccaaaaaggaggattccgggtcaaattctcaggttaactccctgcctgctgaatggtgcgaggctctacacagcttcacagccgagactagcgatgacctttcatttaagaggggggatcgaatccagatattggagaggctggattccgattggtgcagagggcgactacaggatagggaagggatctttccagccgtgttcgtgaggccctgtcccgcagaagcaaagtccatgctggccatcgtcccaaaaggtagaaaggcgaaggcactatatgattttcggggagagaacgaagatgaactcagttttaaagccggtgatattataaccgagcttgaaagtgtggatgatgattggatgtctggggaattgatgggtaagtctggcattttcccgaagaattatattcagttcctccagattagttag

SEQ ID NO: 204965 - DNA, 2304 bp, synthetic construct
  misc_feature 1..2304: note = Description of Artificial Sequence: Synthetic coding sequence
  source 1..2304: mol_type = other DNA
atgaacatcatgaacaccgagcagagccagaacagcatcgtgagccggattaaggtgtttgagggacagactaacatcgaaacgagcggattgcctaagaagcccgaaattactccgcgctcactgccgccgaaacctaccgtgtcgtctgggaaacccagcgtggcccccaaacccgctgcaaatagggcttcgggggaatgggattcgggaaccgagaaccggttgaaggtgacctctaaggagggcttaactccataccctcctctgcaagaggccggatccattccagtaacaaagcccgaattacccaagaagccaaatcccgggctgattaggagcgtgaaccctgagataccagggaggggaccactggctgaaagttctgactctggaaaaaaggttcccaccccggctcctaggccacttttacttaagaagtcagtgtccagtgagaatcctacatatcctagcgctcctttaaaaccagtaaccgtgcccccccgcctcgccggggcttcccaggccaaggcctacaagtctctcggcgaggggcctcccgcaaatcccccagtgccagttttgcagtctaaacctctcgtggatattgaccttatttccttcgacgatgatgtgctgcctactccgtccggtaatcttgcagaggagagtgtggggtccgagatggttcttgacccatttcagctcccagccaaaaccgagccaataaaggaacgggccgtccagccagcccccaccagaaagcccacggtaatccgcattcctgctaaaccaggaaagtgtctgcatgaagaccctcaatccccccctcccctacctgcggagaagcctatcgggaacaccttctctactgtctccggcaagctgtcgaacgtagagaggacacgaaatctggagagcaatcaccctggacagaccggagggtttgttagggtgcccccccgccttcccccccgccccgtgaatggcaagaccattcccacccagcagcctcccacaaaggtcccacctgagcgaccccctcctccaaagctttccgccactcggcggtcaaacaaaaagcttccgttcaaccgttccagtagcgatatggatctccagaagaagcagtctaaccttgcaaccggtctgagcaaagccaaatctcaggtctttaagaatcaagatcctgttctcccacctaggcctaagcccggtcacccactgtattctaagtatatgagaggagacgtgctagtgatgctgaagcagacagaaaacaactatttggaatgccagaaaggcgaagacaccggaagggtccatttgtcccagatgaagattattaccccattagatgaacatctgcgcagcaggccgaatgatccctcccacgcccagaagcccgttgactccggcgctccccacgcagttgtactccacgactttcctgctgagcaagtcgacgatctcaacttgaccagcggcgagattgtgtatctgctggaaaagatagatacagactggtacagaggtaattgcagaaaccagattggcattttcccggcaaattatgtcaaggtcattatcgatatccctgagggaggaaacgggaagcgggagtgcgtgtcctcacattgcgtcaaaggctccagatgcgtggccagattcgagtatattggagagcagaaggatgagctgtctttctctgaaggagaaatcatcatcttgaaggagtacgttaatgaggagtgggctcggggggaagtcaggggtcggactggcatcttcccactgaacttcgtggagccagtggaggactatcctacgagtggcgctaatgtgctaagtaccaaggtgcccttgaagactaaaaaggaggattccgggtccaactcccaggtgaattctctcccggccgaatggtgtgaagcgctgcactctttcacagcagagactagtgatgatttgtccttcaagcgcggagacaggattcaaatacttgagagactggattctgattggtgtcgcggacgccttcaagacagagagggtatcttcccggcagtgttcgtgcggccctgccccgcagaggctaaaagcatgctggctatcgttccaaagggccggaaagcaaaagccctgtatgacttcagaggtgagaatgaagatgaactttctttcaaggcaggggatatcattacggaactggaatctgtggatgatgactggatgagcggcgaactgatgggtaagagcggcattttcccaaagaactacatccaattcctgcagatttcttag

SEQ ID NO: 204966 - DNA, 2304 bp, synthetic construct
  misc_feature 1..2304: note = Description of Artificial Sequence: Synthetic coding sequence
  source 1..2304: mol_type = other DNA
atgaacatcatgaacaccgagcagagccagaacagcatcgtgagccgcatcaaagtgttcgaaggtcaaaccaatatcgagacttccgggctgccgaagaagcccgagatcactcccaggagcctcccacccaagcccacagtgtcatcagggaaaccctcagtggccccaaagccggccgccaacagggcttctggtgagtgggacagcggtactgaaaataggttaaaggtcaccagcaaggagggcctcacaccgtaccctcctctccaggaagccggctctatcccagtgaccaagcctgagctgccaaagaagcccaatccagggctgattcggtcggtgaatcctgagatcccagggaggggtccattagctgaaagtagtgactccggaaaaaaggtgccgacacctgccccacgcccactgcttctaaaaaagtcagtctcatccgaaaaccccacatacccttcagccccactcaagcctgtaaccgtgccacctagactggctggcgctagccaggccaaggcatataaatcacttggagagggccccccggccaaccctcccgtgcctgtcctccaaagcaaaccactcgtcgatattgatctcatctccttcgacgatgatgtgcttcccacaccatcaggcaacctggctgaagagtccgttgggtctgagatggttctggacccattccagctgccggccaaaacagagccgatcaaagagcgcgcagttcagcctgctcctacgaggaagcccaccgtaatccgaatcccagcaaaacctggcaagtgcctgcacgaagaccctcagagccctccccccctacccgctgagaagccaatcggcaatacattttccacggtgtcaggcaagctctctaatgtcgaaagaactagaaatctagagagtaaccacccgggccagaccgggggtttcgtaagggttcctccccgcttaccacctcggcccgtcaatggaaaaacaatcccaacccagcagccccccaccaaagtgccacccgagcgccccccgccccctaaactgagcgctacgagacgcagcaataaaaagttgccctttaatcgttcatctagcgacatggaccttcagaaaaaacagagtaacctcgccacaggcttatcaaaggccaaaagccaggtgttcaaaaaccaggaccctgttctgcctccccgccccaagcctggccaccctctgtattcaaagtacatgaggggcgacgtccttgtcatgctgaagcagaccgagaacaactatcttgaatgtcagaaaggagaggataccggccgggtccacctgagccagatgaagatcattacccctcttgacgaacatctccgatctcggcctaatgacccttctcacgcacagaagccagtggatagcggggcgcctcatgcagtcgtgttgcacgactttccggccgagcaagttgatgatcttaacttgacctctggcgaaatcgtgtacttactagaaaaaatagatacggactggtacagaggtaattgtcgaaaccagataggcatctttcccgcaaattacgtgaaggtcattattgatattccggaggggggcaatgggaagcgcgagtgcgtttcgtcacactgcgtcaagggaagcagatgcgtggccaggtttgagtacatcggggagcaaaaggatgagctgtcgttctcggaaggggaaattataatcctcaaagagtatgtcaatgaagagtgggctaggggcgaggtcaggggtcggaccggaatcttccctctgaatttcgttgaacctgtggaggactaccctacatctggggcgaacgtcctatctaccaaagtccccctgaaaactaaaaaggaggatagcggtagcaattcacaggtgaattcactcccggcagagtggtgcgaggcgctgcacagctttactgcagaaacgtcagatgacctcagcttcaagcgcggagacaggattcaaatcctggaacgccttgattccgactggtgtagagggaggcttcaggatagggaggggatcttcccagctgttttcgtgagaccctgcccagccgaggcgaagagcatgttggccattgtcccaaagggtaggaaagccaaggccctttacgatttccgtggcgagaacgaggatgagctctcctttaaagctggcgacattataacggagctggagtctgtcgacgacgactggatgagcggcgaacttatggggaagtctggtatttttccaaagaattatatccagttcttgcagatctcctag

SEQ ID NO: 204967 - DNA, 2190 bp, synthetic construct
  misc_feature 1..2190: note = Description of Artificial Sequence: Synthetic coding sequence
  source 1..2190: mol_type = other DNA
atggacgacctgaccctgctggacctgctggagtgccccgtgtgcttcgaaaaactggacgtaacagctaaagtgttgccatgccaacacactttctgcaaaccctgtttacagcgggtgtttaaggcgcacaaagaactgcgttgtcccgaatgtagaaccccagttttctccaacattgaggctcttccggcaaatcttctgttagtaaggctgctcgatggggtaaggtctggccagtcctcaggaaggggcgggtcttttcgtagacctggcactatgaccctccaggatggccgaaagagccgcaccaaccctaggcggcttcaggccagccccttccggctggtgcctaacgttagaatccacatggacggcgtcccccgcgctaaggcactgtgtaattatagaggtcagaacccaggagacttgcgctttaataaaggagatattatcctacttcgaagacaactggatgagaactggtaccagggagagattaacggcatctcaggtaattttcccgctagcagtgtggaagtcatcaaacagttgccccagcctccccctctttgcagggccctctataactttgacctgagagggaaagacaagagcgagaatcaagattgtctaacttttctcaaggatgacatcattaccgtcatctcccgggtggacgaaaattgggccgagggaaaactcggcgacaaagtgggcatcttcccaatattgttcgtcgagcccaatctgacagcccgccacctgctggagaaaaacaagggccgacagtcctctcgaacgaagaatctgtcactggtcagttcttccagccgggggaataccagcaccttacggagagggccggggtcaagacgcaaggtccctggccagttctcaatcaccacagcacttaatactctgaaccgtatggtgcactctccgagcggtaggcacatggtcgaaatatctactcctgtgctgatttccagcagtaaccctagcgtgatcacgcagccgatggagaaagctgacgttccctctagctgtgtggggcaagtcagcacataccatcctgcccccgtcagcccgggccattcaactgctgtggtcagccttcctggtagccagcagcatctgtccgcaaacatgttcgtcgccttacattcatattccgcccacggacctgatgaactcgatcttcagaagggagagggtgtacgtgttctgggcaagtgccaagacgggtggctgcggggagtgtcactcgtgacaggccgagtgggcatcttcccaaacaattacgtgatccctatttttcgtaaaacaagtagttttcccgacagccgatcccccggtctatacaccacttggacactcagcacaagctcggtgagctcacaaggatcaatcagcgagggcgacccccggcagtcgcgaccctttaagagcgtgttcgttcctaccgccatagtcaacccagtgcgcagcactgccgggccagggaccttaggacaagggtcacttcgcaaggggcggtcctctatgcgaaagaacggatccctgcagcggcctctgcagtccgggattcccaccttggtagtggggagtcttagaagatcgccaactatggtccttaggccacagcagttccagttctaccagcctcaagggattccctccagtccctccgccgtcgtagtggagatgggatccaagcctgctttgactggcgagcctgctctcacttgcatttcccgcggatctgaagcttggatccatagcgcagcaagctcactcattatggaggacaaggagattcccatcaaaagcgaacccctgccaaagcccccagcatccgctcccccctctattttagtcaaacctgagaactcacgcaacgggatcgagaaacaggtgaaaactgtgaggtttcagaactacagcccacccccaactaaacactacacgtcgcatccgacttccggtaaaccggaacagccggccacactgaaggcctcccagcctgaagcagcgtccctcggtcctgaaatgaccgtgctctttgctcatcggtccggatgtcacagtggacagcagacagacctgcggcgtaagtccgcactcggtaaagcaacgactctcgtatccacggctagcggaacacaaacggtatttccgtctaagtag

SEQ ID NO: 204968 - DNA, 2190 bp, synthetic construct
  misc_feature 1..2190: note = Description of Artificial Sequence: Synthetic coding sequence
  source 1..2190: mol_type = other DNA
atggacgacctgaccctgctggacctgctggagtgccccgtgtgcttcgaaaagcttgacgtgacagcaaaggtgctgccctgccaacacaccttctgcaagccatgcctccagagggtgttcaaggcgcataaggagctacggtgcccggaatgtcgtacccctgttttttccaacatagaggcccttccagccaatttgctcctagtacggttgctcgatggtgtaagatcagggcagagcagcgggcgcgggggttcattcagaagacccggaactatgactctccaggacggccggaagagccggaccaatcccagaaggctgcaggcgagcccatttcgcctggtgccaaatgtgagaatccacatggacggtgtgcccagggcaaaagcactatgtaactatcgcgggcagaatcctggcgatctccgttttaacaagggcgatataatcctgctccgacggcagcttgatgaaaattggtaccagggcgagatcaacggcattagcggcaatttccccgcctcttctgtcgaggttattaagcagcttccacagccccctcccctatgccgagccctgtacaacttcgacctgcgcgggaaagacaagagcgagaaccaggactgcctgacatttctgaaggacgatatcattactgtgatttctagggtagacgagaactgggcagagggcaagcttggagacaaggtcggaatcttcccaatcctcttcgtcgagcctaaccttacagctcgccacctcctggagaagaataaggggcgccagtcaagccggacaaaaaacctgagccttgtgtccagttccagtcgaggaaatacatcaactctgcgtcggggcccggggtccaggcgaaaggttcccggacaatttagcatcacaacagcacttaacacactgaatcgtatggtgcactcacccagcggccgccacatggtcgagatcagcactcctgtcctgatcagttccagtaacccttccgtaatcacccagccaatggagaaggccgatgttcccagcagttgtgtagggcaggtgagtacctatcatcctgctcccgtgagtcctggacacagcacggctgtcgtctctctgcctgggtcgcagcaacacttatccgcgaacatgttcgtggcccttcacagctactcagcccacgggcctgacgagttggatctgcagaagggagagggggtgagagttcttggaaagtgccaggacggctggctgaggggggtgtccctcgtcactggccgagtcggcatttttcccaataattacgtgatccccatcttcagaaagacaagctctttccccgactctcgcagtccagggctgtatactacttggacgctgagcacatcatcagtgtcgtctcaggggtctatcagcgagggcgacccccgtcagagtagacccttcaaaagtgtatttgtgcctacggcaatagtcaatccggtgaggtctaccgcaggaccaggtaccctaggccaagggagcttgaggaagggccgctcaagcatgagaaaaaacggaagcttgcagagacccctgcaatcgggtattcctacccttgtcgttggcagtctgcggcgctctccaaccatggttttacgcccgcagcagttccaattctatcagccccagggaatcccttcatcaccctctgcagttgtggtagagatgggatcaaaacctgctctgaccggagagcctgccctgacctgtattagtcgagggagcgaggcatggatacactccgccgcctcctcactgatcatggaggacaaggaaattccaattaagtcagagcctctgcctaagccacctgcctctgcaccccctagtatcttggtgaagccggaaaactcaagaaacgggatagaaaagcaggtgaaaaccgtgcggttccagaactacagccctccccccacaaagcactatacctcacaccccacttctggcaagcccgagcagcctgcaaccctaaaggcgtctcaaccggaagccgcaagtctgggtccagagatgactgttctgttcgcccataggtcgggctgtcacagcggtcagcagactgacctgcgaaggaagtccgccctggggaaggcgaccacacttgtctccacagcaagcggcacccagacagtgttcccgtcaaaatag

SEQ ID NO: 204969 - DNA, 387 bp, synthetic construct
  misc_feature 1..387: note = Description of Artificial Sequence: Synthetic coding sequence
  source 1..387: mol_type = other DNA
atggaggacaaggagatccccatcaagagcgagcccctgcccaagccccctgcgtccgcaccaccaagtatactggtgaagccggaaaactcaagaaatgggatcgaaaaacaagtcaagaccgtccgattccagaactactcaccaccccctaccaaacattatacctcacacccaacgtcagggaagcctgaacaaccagccactttgaaggcctctcagccggaagctgcatcactcgggccggagatgacagtgctgtttgcacaccgaagcgggtgtcactcaggacaacagacagatctgcggagaaaatctgcactgggtaaggccacgactctcgtatcgaccgcctctggcacacagacggtcttcccttccaagtag

SEQ ID NO: 204970 - DNA, 1686 bp, synthetic construct
  misc_feature 1..1686: note = Description of Artificial Sequence: Synthetic coding sequence
  source 1..1686: mol_type = other DNA
atggccgccgaggagatgcactggcccgtgcccatgaaggccatcggagcacaaaacttgcttacgatgcccggtggggtggcgaaggcagggtacttacacaagaagggcggcacacagctgcagcttttgaagtggcctctccggttcgtgatcatccataaaagatgtgtttattacttcaagtcatcgacgtccgcttctccgcagggtgctttcagtctctccggttataacagagttatgcgtgccgccgaagagacaacctcaaacaacgtcttcccctttaaaattattcacatcagcaaaaagcaccgaacctggtttttttcagccagctctgaagaggagaggaaatcatggatggcactgctacgtagagaaataggacactttcatgaaaagaaagatctgcccctggataccagtgatagctcatcagacaccgacagcttctatggcgccgtggaacgtccggtggacatatccctgtcgccctacccgacggataatgaagattatgagcatgacgacgaggacgattcctacctggagcccgactcaccagaaccagggcggctggaggacgcactcatgcacccacccgcgtacccgcctcctcctgtacccacacccagaaaacctgcttttagcgacatgcccagggcacactcattcacatctaagggaccgggacctctgctgccaccgcctcctccaaaacatggcctgcccgatgtgggcctggcggccgaggatagcaagagggatcccctgtgcccgaggagagctgaaccatgccctagagtgcccgctactcctcgcaggatgagtgacccccctttaagcaccatgccgactgcccccggcctcaggaagcccccttgtttcagagagtccgcttccccatcccccgaaccatggaccccaggacatggagcgtgtagcactagctcagccgcaattatggccactgccacatccagaaattgtgacaaattgaagagcttccatctctcccctaggggacccccgacctccgagcctcctcctgtgccagccaataagcccaagtttctcaagatagcagaagaagaccccccacgagaggctgccatgcctggcttgttcgtaccacctgtggccccccgccctcccgccctcaagctaccagttcctgaagccatggcgaggcccgcagtcctgcccagacccgagaaaccccagttgccccacctgcaacgatcacccccagatggacagagttttcgctcattttcatttgagaagcctcggcagccaagccaggccgacaccggcggtgacgattctgacgaggactacgagaaggtgccattacccaactctgtgtttgtgaatactacggagtcttgtgaggtggaacgcttattcaaagccactagcccaagaggagaaccccaggatgggttatactgcatccgcaattcctctacaaaaagtggaaaggtcctcgtggtgtgggacgaaacctcaaacaaagtgcggaactatagaatttttgaaaaagacagtaagttctaccttgaaggcgaagttctgtttgtgagtgtgggctctatggttgaacattatcacacacatgtactgcccagccaccagtccctgttacttcgccatccttatggctacaccgggcctagatag

SEQ ID NO: 204971 - DNA, 294 bp, synthetic construct
  misc_feature 1..294: note = Description of Artificial Sequence: Synthetic coding sequence
  source 1..294: mol_type = other DNA
atggccgccgaggagatgcactggcccgtgcccatgaaggccatcggtgctcagaacctattaacaatgccaggcggagtggcgaaggccggctacttgcataagaagggcggcacccaactgcagctccttaaatggcccctgagatttgtcattatccacaagagatgcgtgtattactttaaatcgagcacatctgcttccccccagggtgccttctctcttagcggttacaatcgccagcccaggccacagcctgcacaggcattgtctcagacggaagctgggccctag

SEQ ID NO: 204972 - DNA, 1686 bp, synthetic construct
  misc_feature 1..1686: note = Description of Artificial Sequence: Synthetic coding sequence
  source 1..1686: mol_type = other DNA
atggccgccgaggagatgcactggcccgtgcccatgaaggccatcggagctcagaacctgctgaccatgcccgggggggtcgcaaaggcaggttaccttcacaaaaaaggagggacccagttgcagctcctgaagtggcccttaaggtttgttataatccacaagcgatgcgtctactactttaagtctagtacgtcagccagcccccagggtgcattctccctctcaggctataatagagttatgcgcgccgcagaggaaaccaccagcaataacgtttttccgttcaagataattcatattagcaaaaaacatcgcacctggttcttctctgcttcaagcgaagaggagagaaaatcgtggatggctctgctccgcagagagatcgggcacttccatgagaagaaggacctccccctcgacacctccgattcatcgtcggatactgactccttctatggcgccgtggaaaggcctgtggatattagcctgtccccatacccgacagataatgaggattatgagcacgatgacgaagatgacagctatctggaaccagattctccagagccaggaaggctcgaggacgcactgatgcaccctcccgcatatccaccgcccccggtgcccacacctcgcaaacctgcttttagcgacatgccccgtgcccactcgtttaccagcaaaggaccagggcccctgttgcccccccctcctccaaagcacgggttgcctgatgtgggcctggccgccgaggacagcaagagggaccccctgtgtccccgtcgggctgagccctgtccacgcgtgcccgccacgcctcgacggatgtccgacccacccctgtccaccatgccaactgcgcccggattgcgtaagcctccctgcttccgtgagagcgcttctccctctccagagccctggaccccaggccatggggcgtgttccacaagctcggccgcaattatggcaactgcgacctccaggaactgcgataaattgaaaagcttccacctgagcccacggggccctcccacttccgagccgccgcccgtcccagcaaacaagccaaaattcctgaaaatcgctgaggaggatcctcctcgggaggcagctatgccagggctgtttgtgccccctgtcgcaccacggccaccggcactaaagttgcccgtcccagaagcgatggcacggcctgccgtcctaccccgccccgagaaaccgcagttgccacacctccagaggagtcctcctgacggccagagttttcggtcctttagtttcgagaaacctcgccagccctcccaggccgacaccgggggagatgattccgatgaagactacgagaaggtgcccctgccgaatagtgtttttgtgaacactacagaatcctgcgaagtggagcggctgttcaaggccacatctcctagaggagagccccaggatggcctgtattgcatacgtaactcatccacaaaaagtgggaaggtcctggtggtgtgggatgagaccagcaacaaggtaagaaattatagaatctttgagaaagattccaagttttaccttgagggcgaggtcctctttgtctctgtcggcagcatggtcgaacactaccatactcacgtcctgccatcgcaccagagtctgttgctccgccacccttatggctacacgggaccccgttag

SEQ ID NO: 204973 - DNA, 1770 bp, synthetic construct
  misc_feature 1..1770: note = Description of Artificial Sequence: Synthetic coding sequence
  source 1..1770: mol_type = other DNA
atggccagcctgggcccccggacccccgcccccagccggagccggggcaggcgcgcaatgtgttgggtgagtaccataagcttcatggccgccgaagagatgcactggccggtgccaatgaaagctattggcgcccagaatctcctgacaatgcctggcggagtcgctaaagccggttacctgcataagaaaggaggtactcagctccagctgctgaaatggccattaaggttcgtgatcattcacaaacgctgcgtttattattttaagtcttctacttctgctagcccgcagggggccttcagtctttccggatacaatagagttatgcgggctgccgaggagactacatctaacaatgtattcccatttaaaatcatccacatctctaagaaacacagaacctggttcttttccgcttcaagtgaggaagagcgcaagagctggatggcactgctgagacgggaaattgggcactttcacgaaaaaaaggacctgcccctcgatacttccgactccagtagtgacacagacagtttctacggggccgtggaacgcccggtggacatctcactatccccctacccgaccgataacgaggactacgaacatgatgatgaagatgacagctaccttgaaccagactcccccgagccaggcaggttggaggacgccttaatgcatccaccagcatatcccccaccacctgtccccactccccgcaaacccgcctttagcgacatgccccgagctcactccttcacgtcgaagggccctggtcccctgctgccaccaccccctcccaaacatggtctccctgacgtgggattagccgccgaagattctaaacgtgacccactgtgccccagacgagccgaaccatgccctcgggtgccagccaccccgaggcggatgtcagatcccccccttagcacaatgccgacagcccctggcctacgcaagcccccatgtttccgggagtcagcaagcccgtctccagagccttggactcctggccatggtgcttgctccacctccagcgccgctatcatggctacagccacaagtcgcaattgcgacaagttaaagtcatttcatctgtctccccgcgggccgccaacttcggagccacctcccgtcccagccaataagccaaagttcctaaagatagcggaggaagatcccccgagagaagccgcaatgcccggactgtttgttccaccagtggccccgcgccccccagctcttaaactcccagtgccagaagctatggctaggcctgctgtattaccgagaccagagaaacctcagttgccacacttacagcgttccccccctgatgggcagagcttcaggtcgttttcgttcgagaaaccgcggcagccatcccaggctgacaccggaggtgatgacagtgatgaagattatgaaaaggtccctctgcccaatagtgtcttcgtgaatactactgagtcttgtgaggtcgaaagactattcaaagccacaagtcccaggggtgaaccccaagacggcttgtactgtattcgcaactcaagcactaagagtggtaaagtgttggtggtttgggatgaaacctctaataaggtgcgcaactacagaatattcgagaaagacagcaagttctacctagagggggaggtgctgttcgtatcggttggttctatggttgaacattatcatacacatgtcttacctagtcaccagagcctgctgctccggcacccatatggctatacaggaccaaggtag

SEQ ID NO: 204974 - DNA, 1686 bp, synthetic construct
  misc_feature 1..1686: note = Description of Artificial Sequence: Synthetic coding sequence
  source 1..1686: mol_type = other DNA
atggccgccgaggagatgcactggcccgtgcccatgaaggccatcggagcccagaatctgctcacaatgcctgggggggtggctaaggccggctacttgcacaagaaaggcgggacgcaactgcagctgctgaaatggccgctcagattcgtgatcattcataagagatgcgtgtactactttaagtcgtccacctctgctagcccccagggggcctttagtctatccggctacaacagagtcatgagggctgcagaggaaacgaccagcaataatgtgtttccgttcaaaatcattcatataagcaaaaagcatagaacctggtttttctccgccagctccgaagaagagcgcaaaagctggatggccctgctgcgtagggagataggacactttcatgaaaaaaaggatttgccactggacacttccgacagctcctcagatactgacagcttctacggggccgtcgaaagaccggtcgacataagtctgagcccataccccaccgacaatgaggactacgagcatgatgatgaggatgattcttatctggagcccgacagccccgagccgggccgtctcgaagatgcactgatgcaccctcccgcatacccccccccccctgtgccaacaccacgtaagcccgcattttctgatatgccacgagcccattcctttacaagcaagggacctgggcctctgctgccaccaccccctccaaaacatggcttgcccgacgtagggcttgccgctgaagacagcaagagagacccactctgccctagacgagccgaaccgtgtcctagggtgccagccactccaaggcggatgtccgacccgcccctaagtacgatgcccacggctcccggcttaaggaagccaccatgctttcgcgagtccgccagcccatcacctgaaccctggacaccgggtcacggcgcctgcagtactagcagtgccgccatcatggcaactgctacctctcgaaactgtgataaactgaagagttttcatttaagcccgagaggtccgccaacaagcgagccgccgccagtgcctgctaacaaacccaagttcctaaagatcgccgaggaggaccccccgcgggaagctgccatgcccgggctttttgttccacctgttgcaccccggccccccgccctcaagctgccagtgcctgaagccatggcccgtccggcagttctgccacgtccagagaagccccagttgccacatctccagagatctcctcctgacgggcagtccttccggtcattctcttttgagaaacccaggcaaccatcgcaggcggatacaggaggagacgacagtgatgaagattatgagaaggtgcctctccccaattcagtctttgtgaacactactgaaagctgtgaagttgaacgactgtttaaagccaccagcccacgaggggaacctcaagatggcctatactgcattcgaaatagttccacaaaaagcggaaaggttttagtcgtgtgggacgagacaagtaataaggtccgcaattaccggatattcgaaaaggattccaaattttacctagagggggaagtactgttcgtctcagtcggctccatggtggagcattatcacactcatgttctgcccagccatcagtccttgttgctccggcacccttacggctacaccgggccacgctag

SEQ ID NO: 204975 - DNA, 429 bp, synthetic construct
  misc_feature 1..429: note = Description of Artificial Sequence: Synthetic coding sequence
  source 1..429: mol_type = other DNA
atggccgccgaggagatgcactggcccgtgcccatgaaggccatcggtgctcagaacttgctgactatgcctggcggcgtcgctaaagctggctacctgcacaagaaaggaggcactcaactgcagctactgaagtggccactgcgattcgtcattatccacaagagatgcgtctattatttcaagagcagcacgtccgcgtcccctcagggtgcattctctctgtcaggatataatcgcgttatgagggccgccgaagaaaccacctcgaacaacgtatttcccttcaaaattattcatatctcaaagaaacatcggacatggtttttctccgcaagcagtgaggaagagaggaagtcgtggatggcactcttaagacgtgaaattggccacttccatgagaaaaaggatctgcccttagatacctag

SEQ ID NO: 204976 - DNA, 429 bp, synthetic construct
  misc_feature 1..429: note = Description of Artificial Sequence: Synthetic coding sequence
  source 1..429: mol_type = other DNA
atggccgccgaggagatgcactggcccgtgcccatgaaggccatcggcgcccagaacttgctgactatgcctggcggcgtggctaaagcaggctatctgcacaaaaaggggggcactcagctgcaactgctaaagtggccccttcggtttgtaattatccacaaaaggtgcgtgtattacttcaagtcttcaacatcagctagcccccagggagctttcagccttagtggatacaacagagtgatgagggcagcagaagagactacatccaataatgtgttcccctttaaaatcatacatatttctaaaaagcatcggacgtggtttttttccgcttcttctgaggaggaacgaaagtcttggatggccctgctaagacgcgaaattggtcacttccatgagaaaaaggacctgccactggacacatag

SEQ ID NO: 204977 - DNA, 1857 bp, synthetic construct
  misc_feature 1..1857: note = Description of Artificial Sequence: Synthetic coding sequence
  source 1..1857: mol_type = other DNA
atggccggcagcggcccccggccccggagctggggccggcgggaggctggcgctcgagacgaggctgcggcggcgggtggtcgcggaccaggcccatgtagatgtagtcaagggcggagagcttggattgcccccggcaaaccagccatgccagctgcctggactccttttatggcagcagaagagatgcattggcctgtccccatgaaagcaatcggcgctcagaatctattgactatgcctgggggggtggcgaaagcagggtatctgcacaagaagggtggaacgcaactacaactcctcaagtggcccctaagattcgtcatcatacataagaggtgcgtatattatttcaaatcttccacgtccgcctctccacaaggtgcgttttctcttagtggttacaatcgcgtgatgcgcgccgccgaagaaaccacaagcaacaatgtgtttccctttaaaatcattcacatcagcaaaaagcaccgcacctggttctttagcgccagttccgaagaagagaggaaaagttggatggcactgctgcgtagagaaattgggcattttcacgagaagaaggatctgccattggataccagtgactccagttccgacaccgacagtttttacggcgcagtggaacgtcccgtggatatttccttatcaccttatccaacggataatgaggattatgagcacgacgatgaggacgatagttatctggaaccggacagccccgaacctgggaggctggaagacgcactcatgcatccaccggcctatcccccccccccagtgccaacaccaagaaagcccgcttttagtgacatgccaagggcccacagtttcactagcaagggtcctggacccctcttgccacccccaccaccaaagcacgggctacccgacgtggggcttgctgcagaagattccaagcgcgacccactgtgccccaggagagcagagccgtgtcctcgggtccccgctactcctagacgcatgtcagatcctccattgagcaccatgcccactgcacctggcttacggaagcccccgtgctttcgtgagtcagccagtccgtcccccgaaccttggactcctggacacggagcttgctccacttccagcgctgctataatggccactgccacgagccgtaactgcgataagctgaagtcttttcacctgtccccaaggggacctcccacaagtgaacctcctccggttcctgctaataagcctaaatttttaaaaattgctgaggaagatccgccgcgcgaagcagctatgcctggtctgttcgtacctcccgtcgccccaaggccacctgctctgaaactccctgtgcccgaggcaatggcgcgtcctgccgtactgcctaggcccgagaaacctcagctccctcacctgcagcgctccccaccggatggtcagtcattccgtagctttagtttcgagaaaccccggcagccttcccaagctgatacaggcggggatgattccgatgaagactacgagaaggtgccgctgcctaactcagtgtttgtgaatacgaccgagtcatgtgaggtcgaacgcctgttcaaagcaacgagccctaggggggagcctcaggacggactgtactgtattagaaactcctccaccaagtcaggaaaggtacttgtggtctgggacgaaacaagcaacaaggtacgcaattatcgaatattcgaaaaagattctaagttttacctggaaggcgaggtacttttcgtatctgtaggatcaatggtcgagcattatcacacacatgtgcttccgagccatcaatccctcctcctcagacatccttatggctatactggtcctcgatag

SEQ ID NO: 204978 - DNA, 519 bp, synthetic construct
  misc_feature 1..519: note = Description of Artificial Sequence: Synthetic coding sequence
  source 1..519: mol_type = other DNA
atggccgccgaggagatgcactggcccgtgcccatgaaggccatcggagcccagaaccttttaacaatgcctggcggggtcgctaaggctggatacttacacaaaaaaggcggcactcagctgcagctactaaaatggccattgagatttgtgattatccacaagcgttgtgtgtattattttaaatcttccacatcagcttccccgcaaggcgctttctccttgagtggctataacagggtgatgcgggcagctgaggagacaacaagtaataatgtgtttcccttcaaaatcatccatatctcgaagaaacaccggacatggttcttctccgcctccagcgaggaggagagaaaatcttggatggcccttctgagaagggagattggtcacttccatgagaagaaggatctgcccctagacacaagcgactcctcgtctgataccgacagcttttacggtgcggtggagagacctgtcgacataagtttaagcccctacccgacggacaacgagtag

SEQ ID NO: 204979 - DNA, 567 bp, synthetic construct
  misc_feature 1..567: note = Description of Artificial Sequence: Synthetic coding sequence
  source 1..567: mol_type = other DNA
atggccgccgaggagatgcactggcccgtgcccatgaaggccatcggcgctcaaaatctgctgactatgccagggggagtcgctaaggcagggtatctacacaagaaagggggcactcaactgcagctcctcaagtggcctcttcgattcgtgatcatccataaacgctgcgtgtattactttaaaagtagcacgtcagcatcaccccagggtgctttttcgttaagcgggtacaatcgagtgatgcgcgccgctgaagagacaacctccaacaacgtattccccttcaaaatcattcacatttctaagaagcaccgtacgtggtttttctccgcatctagtgaagaagaaagaaagtcctggatggccctgctaagaagagagatcggacattttcacgaaaaaaaggacctgccgctcgatacctctgattcctcctccgacactgacagtttctatggcgctgtcgaacgcccagtggatattagtctttccccctatccaacagacaacgaggattatgaacacgacgatgaggacgactcctacctagagccagactcttag

SEQ ID NO: 204980 - DNA, 1686 bp, synthetic construct
  misc_feature 1..1686: note = Description of Artificial Sequence: Synthetic coding sequence
  source 1..1686: mol_type = other DNA
atggccgccgaggagatgcactggcccgtgcccatgaaggccatcggggcacagaatctcttaacaatgcctggtggagtggccaaggccggctacctgcacaagaaaggtgggacacagcttcagctgctcaagtggcctctgaggttcgtcattattcacaagagatgcgtatattatttcaaatcctccactagcgcaagcccccagggggccttcagcttatccggttacaacagggtcatgagggccgccgaggagacgactagtaacaacgtgtttcccttcaagattattcatatctccaaaaaacataggacttggtttttctccgcatccagcgaagaagagagaaagtcctggatggccctgttgagacgggagatcgggcactttcatgaaaagaaggatctgccactcgataccagcgattctagctcagacaccgattccttctacggtgcagtggaacgccctgtcgacatttctttgtccccataccccactgacaatgaggattatgagcacgacgatgaggacgatagctatctggaacccgacagtcctgagccagggcgactggaggacgctttgatgcacccacccgcctacccgcctcccccagtcccaaccccacggaaacccgccttcagcgatatgccccgagcccattcattcacaagcaaaggtccgggacctcttctccccccccccccaccaaaacacgggctgccagacgtcgggttggctgcagaggattcaaagagagacccgttatgtccaagaagggctgaaccctgcccaagggtcccagcaactccaagacgcatgagtgatccccctctctctaccatgccaacagcaccggggctccggaaaccaccatgctttcgcgaaagcgcctctccttcaccagaaccctggaccccgggccatggggcctgcagcacgtcatcagccgcaatcatggctaccgccactagtcggaactgcgataaattgaagagcttccatctgagcccccgcgggccgccaacatcagagccaccacctgttccggccaacaagccgaagtttctcaaaatcgcagaggaggatccacctagggaggccgccatgcccggacttttcgtgccaccagtcgcaccccggcctcccgctttaaaattacccgttcctgaagctatggcccggcccgcagtgttgcctcggccagaaaaaccacagctgccacaccttcagaggagtcctcccgacggacaatctttccgttccttcagcttcgaaaaaccacggcagccttctcaggctgacacaggcggtgacgactccgatgaagactatgagaaagtgccactgcccaatagtgtttttgtaaatacaactgaatcatgtgaggtggaacgtctcttcaaagccacttctccacgaggcgaacctcaggatgggctgtactgcataagaaactctagcacaaaatcaggcaaagtcctggtggtgtgggacgagacctccaacaaggtcagaaattataggatcttcgagaaggattcgaagttctacctcgaaggtgaagtgctgtttgttagcgtagggtcaatggtggaacattaccacacgcacgtgctgccgtcccatcaaagcctgcttttgcgccacccttacggatataccgggccccgatag

SEQ ID NO: 204981 - DNA, 585 bp, synthetic construct
  misc_feature 1..585: note = Description of Artificial Sequence: Synthetic coding sequence
  source 1..585: mol_type = other DNA
atggccgccgaggagatgcactggcccgtgcccatgaaggccatcggcgcacaaaacctactgaccatgccaggaggggtggccaaggccggctatctccataagaagggaggcacgcaactgcagctcctgaagtggcccttgagatttgtcatcattcacaagcggtgtgtgtactatttcaagtcgtccactagtgcctccccccagggtgctttttccctgtctggatacaatagagttatgagggcggccgaagagaccaccagtaacaacgtgttccccttcaagataatacacatttcaaagaagcatcgcacatggttcttctcagcttcctccgaagaggagcggaagtcctggatggcgctactgagacgagagatcggacattttcacgaaaagaaagacttgcctctcgacacgtcggactcgagtagtgatactgacagtttctacggcgccgtcgagcggcctgtggacatatcattgtcaccttaccctaccgataacgaggattacgagcacgatgacgaggatgactcgtacctggaaccagatagcccagagcccgggcgcctatag

SEQ ID NO: 204982 - DNA, 411 bp, synthetic construct
  misc_feature 1..411: note = Description of Artificial Sequence: Synthetic coding sequence
  source 1..411: mol_type = other DNA
atggccgccgaggagatgcactggcccgtgcccatgaaggccatcggcgcgcagaacttactcactatgccaggaggtgtggcaaaagccggctatttgcataagaaaggaggaacccagctacaactgctgaagtggcccctgcgatttgtcattattcacaagcggtgcgtttactactttaagtcctctacttcagcaagcccccagggggcattctcactctcggggtataatagagtgatgcgcgctgctgaagagacaaccagcaataatgtgtttccttttaaaattatccatatctctaaaaagcaccgcacttggttctttagtgcatcgtccgaagaagaacgtaagagctggatggctctcctgagacgagagatcggacacttccacgagaaaaagtag

SEQ ID NO: 204983 - DNA, 2892 bp, synthetic construct
  misc_feature 1..2892: note = Description of Artificial Sequence: Synthetic coding sequence
  source 1..2892: mol_type = other DNA
atggccgcccagcggatccgggccgccaacagcaacggcctgccccggtgtaagtcagaagggacattaatagatcttagtgaaggattctccgagacgagtttcaatgacattaaggtgccaagtccctccgctctgctcgtggacaaccccaccccctttggcaacgcgaaggaggtgattgctatcaaggattactgccctactaacttcacaacactcaagttctcaaagggagaccacctgtatgtgcttgacacatccgggggtgaatggtggtatgctcacaatacaaccgaaatgggatacatcccgagctcatatgtgcagccgctcaattataggaatagcaccctgagcgatagcggcatgatcgacaaccttcctgacagccctgatgaggttgctaaagagttggagctgctcgggggctggacagatgacaaaaaagttcccggccgaatgtacagtaacaatcctttctggaacggcgtccagactaacccttttctcaacggaaacgtgccagttatgccttccctcgacgagttgaatccaaaatccacagtggacctgttactgtttgacgccggcacatcatcatttactgagagctcatctgccactaccaacagtaccggaaatatttttgacgagttgccagtcaccaatgggttgcatgccgagcctcctgtgcgccgcgacaacccatttttcagaagtaaacgtagttacagtctaagcgagttgtcagtcctgcaagccaaaagcgacgccccaacatcatcctcttttttcacagggctgaaaagccctgcgcctgagcaattccagtccagagaggattttaggactgcctggctgaatcatcgcaagctggcccggagctgtcatgacctcgacctcttggggcaaagccccggttggggacaaacacaagccgtcgagactaacatcgtgtgtaaactggactcaagcggcggtgccgtccagttgccagacacctcaatctccatacacgtgcctgaaggccacgtagccccgggggagacacagcagatttcgatgaaagccttacttgacccacctttagagctgaatagcgatagatcgtgtagcatctcccctgttctggaagtgaaattatcgaacttagaggtgaaaacttcgattatcctcgagatgaaggtctccgccgaaatcaagaacgaccttttcagtaaatccaccgttggattgcaatgtctgcggtccgattccaaggaaggaccttacgtgtctgtgcccttgaattgctcttgcggcgatacagtccaggcacagctccacaacttggaaccatgcatgtacgttgccgtggtggcacatggtccaagcattctgtatccgtcaacagtttgggatttcattaacaagaaagtcaccgtcgggctctatggaccgaaacacatccaccctagttttaaaacagttgtaaccattttcggtcatgattgtgccccgaaaacccttttggtctccgaagtcacacgacaggctcctaaccctgccccagtcgctctccaattgtggggtaagcaccaatttgttctgtctcgtccccaggacttaaaagtctgcatgttttctaatatgactaactacgaggtgaaagcaagcgagcaggctaaagtcgtacgtggttttcagctcaagctcggaaaggtgtcaaggctcatctttcctatcacctcacaaaatccaaatgaactatcagacttcaccctgagagtccaggtaaaagacgaccaagaagccattctcactcagttctgcgtccagacaccccagccccctcctaagtctgccatcaagcccagcggccagagacggttccttaaaaaaaacgaggtagggaaaattattctcagcccatttgctacaaccacaaaatacccgacttttcaagatcgcccagtaagtagtttaaaatttggtaaactgcttaaaacggttgtgaggcagaacaagaaccactatctgctcgagtacaaaaaaggcgatgggattgcgctcctgtcagaggagagggtgagactccgaggtcagctttggaccaaggaatggtacatcggatactaccaggggcgagtcgggctggtgcataccaaaaatgtccttgttgtgggcagggcccgccctagtttgtgttcaggtcctgagctttccacctctgtgctgctcgaacagattctgcgaccatgtaagttcctgacgtacatttacgcctccgtccgtactttactaatggagaacatctctagttggcgcagctttgcagacgccttgggatacgtaaacctgccactcaccttcttctgtagagctgaactcgactcagaaccggaacgcgttgcatcggtgctcgagaagctcaaggaggattgtaataatacggaaaacaaagagcgcaagagttttcagaaggaactggtgatggctctcttgaagatggactgccaggggcttgtggtgagattgattcaggacttcgtcctcctcacaaccgctgtagaggtagcacagcgctggcgggagctggccgagaagctggcaaaagtctcaaagcagcagatggatgcgtacgagagcccgcatcgggataggaacggggttgttgacagcgaagctatgtggaaaccagcctatgacttccttctgacgtggagccaccagatcggggattcgtatcgggacgtgatccaggagctgcatctgggattagataagatgaaaaatcccataacaaagaggtggaaacacctgacgggcaccctcattctagttaactcattagacgtgctccgagccgctgccttctcgcccgctgaccaggacgacttcgtcatctag

SEQ ID NO: 204984 - DNA, 2892 bp, synthetic construct
  misc_feature 1..2892: note = Description of Artificial Sequence: Synthetic coding sequence
  source 1..2892: mol_type = other DNA
atggccgcccagcggatccgggccgccaacagcaacggcctgccccggtgcaaatcagaaggcacactgatcgatctgagcgaggggtttagcgagacaagcttcaatgacataaaggtgcctagtccttcagctctcctagtggacaaccccaccccattcggcaatgccaaagaggtgattgccatcaaggattactgcccaacaaattttactaccttaaaattttctaagggcgaccacctatatgtcttggacacttccgggggtgaatggtggtacgcccataataccaccgaaatggggtacatcccctcttcttatgttcagccactgaactaccgcaactctacattaagtgactcgggcatgatagacaaccttcccgactctccggatgaagtggcgaaggaactggaattgctggggggctggaccgacgacaagaaggttccaggaagaatgtactccaataatccgttctggaacggggtgcagacaaacccctttttgaacggaaacgtgcctgtgatgccctctctggacgagctgaacccaaaaagcacggtggatctgctcctgttcgatgccggaacctcctcattcactgagagcagttctgccactactaacagcactggtaacatattcgacgagttgcccgtgaccaacggcctgcatgcagagcctcctgtgcgcagggataacccgttttttagatccaagcggagttattctttgtccgaattatcagtgctgcaggctaaatcagacgccccgacatcttcaagcttttttacaggcctaaagagcccggccccggaacagtttcagagtcgggaagactttagaaccgcttggctcaaccaccgcaaattagcgcgcagctgtcatgacttggaccttctggggcagagtcctggctgggggcagactcaggctgtggagaccaatattgtctgtaaactggactcctctgggggcgccgtgcaactccccgatacttctatttccatacatgtgcctgagggccacgttgcccctggcgagactcagcagatttctatgaaagctctgctcgaccctccactggagctgaattcagacaggtcttgttccatttcgcctgtattggaagtcaagttatcgaacctggaagttaaaacaagtattatccttgaaatgaaggtcagcgctgaaattaagaatgacctattcagcaagagtacagtgggcctgcaatgcttgcgaagcgactccaaagagggtccatacgtttcagtgcctttaaactgttcttgcggggacaccgttcaggcccaacttcataacctcgaaccctgcatgtatgtcgcagtcgtggcgcatggtcccagtatcctctatccctccacagtctgggattttatcaacaagaaggtaacagtcgggctctacgggccgaagcacatccatccctctttcaagacagtagtgacaatcttcggtcatgactgcgctcctaagaccctgcttgtaagcgaagtcaccaggcaggcccccaatcccgccccagttgccttgcagctctgggggaaacatcaatttgttctgtcccgccctcaggatttgaaagtgtgtatgttctcgaacatgacgaactatgaggttaaggctagtgagcaggccaaggtggtccggggctttcagctcaagttgggcaaagtaagccgacttatctttccaattacctcacagaatccgaatgaacttagtgacttcactttaagagttcaagtgaaggacgatcaagaagctattcttactcaattctgtgtgcagacgccgcagcccccccccaaaagtgccatcaagccctccggccaaagacgatttctgaagaagaacgaagtcgggaagataattctaagccccttcgccaccactacaaagtacccgaccttccaagatcgacctgtctcgtctttaaaatttggcaagctgctgaagaccgtagtccggcagaataagaatcattacctgctggaatacaaaaaaggcgatgggatcgccctcctctccgaggaacgcgtccgcctgcgagggcagctgtggacaaaggagtggtatattgggtactaccagggtcgagttggactggtacataccaaaaatgtgttggtggtgggaagagcccggccctccctgtgcagcggtcccgagttgagcacatccgtcctgctggagcaaattttgaggccctgcaaattcttgacctatatttacgcctctgtcagaaccttgcttatggagaatatcagcagttggagaagttttgccgatgcacttggttacgtgaatcttcccttgacatttttctgccgggccgaattggactccgaacccgagcgggtggcttccgtgttagagaaattaaaggaagattgcaataatacagagaataaggaacggaaatcttttcagaaagaactggttatggcacttcttaagatggattgccagggcctggtcgtcaggctgattcaggacttcgttctgctcaccaccgctgtggaggtggcacagagatggcgggagctcgccgaaaagttagctaaggtgtcgaaacagcagatggatgcatacgagtctccgcaccgagacaggaacggcgtggtcgattcagaagcgatgtggaagccggcctacgactttcttctcacctggagtcatcagattggggatagctatcgcgacgtgattcaagagcttcaccttggcctggataagatgaaaaaccccataacgaagcggtggaaacatttgacaggcacattgattctcgtcaattctcttgacgtcttgagggcagccgccttcagccccgcagaccaggacgatttcgttatctag

SEQ ID NO: 204985 - DNA, 2892 bp, synthetic construct
  misc_feature 1..2892: note = Description of Artificial Sequence: Synthetic coding sequence
  source 1..2892: mol_type = other DNA
atggccgcccagcggatccgggccgccaacagcaacggcctgcccaggtgtaagtcagagggaaccctgatcgacctctccgaaggattttccgagacctcatttaacgacattaaagtgccctcaccatctgcattgctagtggacaatccaacaccctttggaaacgctaaagaggtgatagctattaaagattattgccctactaacttcaccacactcaagttctccaaaggcgatcacttgtacgttctggatacctccggaggagagtggtggtatgcccacaacacaacggaaatggggtatattcctagctcttacgtccagcccctgaactacagaaactccactctgtctgattctggtatgatcgataacttgcctgacagcccggacgaagtcgccaaagagctcgagctgctggggggatggaccgacgataagaaggtgcctggcagaatgtattctaacaacccattctggaatggggttcagacaaacccattcctgaacgggaatgtgcctgtgatgccatccctcgatgagctgaatccaaagagcacggtggacctgctgttgttcgatgccggcaccagctcatttacagagtcttcttctgcaaccacgaatagtaccggcaacatttttgatgagctgcccgtcaccaacggcctccatgccgagcctccagtgcgtcgcgataaccccttctttcggagcaagagatcctattccctctcagagttgagcgtcttgcaggcaaaaagtgatgcacccacatcaagttctttctttacaggccttaagtcacctgcgccggagcagttccagagccgggaggatttccgtacggcttggctcaaccaccgtaaacttgcacggagctgccacgatctggacctgctcggacagtctcctggttggggccaaacgcaggctgtcgaaaccaacatagtatgcaagttggattccagcgggggagccgtccagctgccagacacctcaatctcgattcacgtgcctgaaggtcatgttgcaccaggagaaacgcagcaaattagcatgaaggcattactggacccacctttagaactaaattctgacaggtcctgtagcatcagccccgtcctagaggtgaaactcagcaacctggaagttaagaccagcatcatcctcgagatgaaggtgtcagcggagattaaaaacgatttattctctaaatctacagtcggtctgcagtgcctcaggtccgacagtaaggaaggcccctatgtctccgtgcccctgaactgcagttgtggagatacagttcaggcccaacttcataacctagagccctgcatgtatgtagccgtagttgcccacggcccatctatcttgtacccttcaactgtgtgggacttcatcaacaagaaggtgaccgtgggactgtatggccccaagcatatccacccgtccttcaagaccgtggtgaccatcttcgggcacgactgcgctccgaaaacactgctggtatctgaggtgacgcgacaagcccctaatcccgcccctgtggccttacaactgtggggtaaacaccagttcgtgctttcacggccccaggatctgaaggtctgtatgtttagcaacatgacaaactatgaggtcaaggccagtgaacaagcgaaagtggtcagaggctttcagctgaaactgggaaaagttagccgtctgatcttcccaattaccagccagaatcccaacgaactttcagactttaccctccgggtccaagtgaaggacgatcaagaggctattctgacccagttctgcgtgcagactccacaacctcccccgaaatctgcgatcaaaccctcaggacagcggcgtttcttgaaaaaaaacgaagtcggaaagataatcttgtctccttttgcaacgactaccaagtatcctacattccaggataggccagtctcttccctaaagtttgggaagctgctgaagaccgttgtgcggcagaacaaaaatcattatctgttagagtacaagaaaggcgatggcatcgcactactcagtgaggaacgtgttaggttgcgggggcagctctggaccaaagaatggtacatcggctattatcaaggcagagtcggcctagtccatactaaaaacgtcttggtggtgggtagagctaggccttctctctgtagcgggcccgagcttagtacatctgtgctgctggaacagattctgcgcccatgcaaatttcttacatatatttatgcgtctgttcgcacgctcctgatggaaaatatttcctcttggagatcatttgctgatgccctcggatatgtcaacctgcctctgacattcttctgtagagccgaactggactcagagccggagagagtcgcctcagttctggaaaagctaaaggaggattgcaacaatacagagaacaaggagcgcaagtcctttcagaaagagctggtcatggctctcctcaagatggattgccagggcctggtggttcgacttatccaagatttcgtgcttctcaccaccgccgttgaggtagcccagcggtggcgcgaactggcggaaaagttggccaaagtgtccaagcaacagatggacgcttatgagtccccccatcgcgatagaaacggcgtggtggactcggaagcgatgtggaaacccgcatacgatttcctgttaacgtggtcccaccagataggggatagttatagagacgtgatccaagaactgcatttaggactggataagatgaaaaatccaataactaaaaggtggaagcacctgacaggtaccctaatcctcgtgaactcactcgacgtgcttcgtgcagccgcattttccccagccgatcaggacgacttcgtgatctag

SEQ ID NO: 204986 - DNA, 369 bp, synthetic construct
  misc_feature 1..369: note = Description of Artificial Sequence: Synthetic coding sequence
  source 1..369: mol_type = other DNA
atggccgcccagcggatccgggccgccaacagcaacggcctgcccagatgtaaatcagagggaactctgattgacctcagtgaaggattttcagaaacatcctttaacgatatcaaagttcccagtccctcagccttgctggtggacaacccaactccattcggcaatgccaaggaggttattgccataaaggattattgcccaacgaatttcactactcttaagttttcaaagggcgaccacctgtacgtgcttgacacatcaggtggggagtggtggtacgcgcataatactacagaaatgggatatattccttcttcctacgttcaacctctcaactaccggaattccaccctttccgattcctag

SEQ ID NO: 204987 - DNA, 1662 bp, synthetic construct
  misc_feature 1..1662: note = Description of Artificial Sequence: Synthetic coding sequence
  source 1..1662: mol_type = other DNA
atggccgcccagcggatccgggccgccaacagcaacggcctgccccgatgcaagtctgaaggaacactgattgacctgagcgagggcttctctgagacctctttcaacgatatcaaggtgccttctccctcggccttgctggtggacaatccaaccccattcggcaacgctaaagaagtgatcgccatcaaggactactgtcctactaacttcaccactctcaaattttctaaaggggatcacctgtacgttttggataccagtggaggcgagtggtggtatgcccacaacacgactgaaatgggatatatccctagcagctacgtccaacctctaaactatcggaactccaccctaagcgatagcggcatgatcgataatctgccggactcgcccgacgaagtcgcaaaagagctcgagttactcggtggctggacagacgacaagaaagtgcccggccggatgtacagcaataacccgttctggaatggagtccagacaaatcctttcctcaacggcaacgtgcccgtgatgcccagtctggatgaacttaatcccaaatctacagtggatctactgttgttcgatgctggtacctcgagttttaccgaatcctccagcgccactaccaattcaacaggtaacatctttgacgagttaccagtgactaatggcctgcacgcggagccgccagtgcggagagacaatcccttctttcggagcaagcgctcttactctctttccgaactttctgtgttgcaagcaaagtcagatgccccaacaagttcatccttttttactggcctcaaaagcccggcccccgagcagtttcagagtagggaggatttccgaacagcctggctgaatcaccggaagctggccagatcatgccatgatctggatctgttgggtcaatcccccgggtggggccagacacaagccgtggaaaccaacatcgtgtgcaagctagacagttccggcggcgcagtgcagctgcctgacacttctatttcaattcatgtgccagaaggccatgttgctccgggcgagacacagcaaataagcatgaaagccttactagacccccccctggagctgaactctgacagatcctgttctatcagcccagtactagaggtaaagctgagtaacctggaagtgaagaccagtattatcctggagatgaaggtgagtgcagagattaagaatgacttatttagcaagtctacagtagggctgcagtgtctaagatctgattccaaagaaggaccctacgtgtccgtcccgctcaattgttcttgcggggacacagtccaggctcagcttcacaacttggaaccctgcatgtatgttgccgttgtagctcatggtccatctattctttatcccagcaccgtgtgggattttatcaacaagaaggtcactgtgggcctgtatggcccaaagcatattcatccaagctttaaaactgtcgtgacaattttcggccatgattgtgctccgaagactctgctcgtttccgaggttaccaggcaagcacccaacccaccaattaccaagagatggaagcacctgaccgggacgttaatcctggtgaactcactggacgtgctgagagctgccgcgttctcccccgctgaccaggatgattttgttatttag

SEQ ID NO: 204988 - DNA, 171 bp, synthetic construct
  misc_feature 1..171: note = Description of Artificial Sequence: Synthetic coding sequence
  source 1..171: mol_type = other DNA
atggccgcccagcggatccgggccgccaacagcaacggcctgccccgatgtaaatccgagggaactctcatagatctgagcgaggggttctccgagacctcttttaacgacatcaaggtcccatctcctagcgccctcctggtggataaccccaccccattcgggaactag

SEQ ID NO: 204989 - DNA, 522 bp, synthetic construct
  misc_feature 1..522: note = Description of Artificial Sequence: Synthetic coding sequence
  source 1..522: mol_type = other DNA
atggccgcccagcggatccgggccgccaacagcaacggcctgcccagatgtaaatctgagggcaccttgatcgatctttcagagggcttttctgagacttcgtttaacgatatcaaagttccatcccctagcgcgctccttgtcgacaacccaaccccatttggtaacgcaaaggaagtcattgccatcaaggattattgtcccactaacttcaccacgctgaagtttagtaaaggagatcacctctacgtgctggacactagtggaggggagtggtggtacgcccataatactactgagatgggctacatcccttcatcttatgtgcaacctctgaattatcggaattccaccctgagcgactctggtatgatcgataatctgcctgattccccagacgaagtggcaaaagagctggagcttttgggcggctggaccgatgacaagaaagtgccaggacgcatgtattcaaataatcccttttggaatggcgtgcaaacaaacccttttctgaacgggtag

SEQ ID NO: 204990 - DNA, 174 bp, synthetic construct
  misc_feature 1..174: note = Description of Artificial Sequence: Synthetic coding sequence
  source 1..174: mol_type = other DNA
atggccgcccagcggatccgggccgccaacagcaacggcctgccccgctgcaaatccgaggggactcttatcgatctgagtgaaggctttagtgagactagctttaacgacattaaagttccgagcccctctgcactgctcgtggacaacccgaccccgttcggtaatgcctag

SEQ ID NO: 204991 - DNA, 606 bp, synthetic construct
  misc_feature 1..606: note = Description of Artificial Sequence: Synthetic coding sequence
  source 1..606: mol_type = other DNA
atggagaacatcagcagctggcggagcttcgccgacgccctgggctacgtgaacctgccactgacattcttttgccgggccgaactggacagtgagccagagagagttgcaagcgtgctggaaaagctaaaggaagactgcaataatacagaaaataaggagcgtaagtcctttcaaaaggagctggtcatggcactcctgaaaatggattgccagggtctagtggtgagactgatccaggattttgtcctgctgacaaccgcagtggaagtcgcccagaggtggagagagctggccgagaaactggctaaggtgagcaagcagcagatggatgcctacgaatctccccacagggacaggaatggcgtcgtcgattcagaggcgatgtggaaaccagcatatgacttcctgctcacctggtctcaccagattggcgattcttatagagacgtgatccaggagcttcacttgggcctcgataagatgaagaacccgatcacaaaacgctggaagcacttgaccggcacattaatactggtaaatagcctcgacgttctgagggccgccgctttttcacccgctgaccaggacgatttcgtcatttag

SEQ ID NO: 204992 - DNA, 897 bp, synthetic construct
  misc_feature 1..897: note = Description of Artificial Sequence: Synthetic coding sequence
  source 1..897: mol_type = other DNA
atgctgaaccacgccacccagcgggtgatggaggccgagcagaccaagactcgaagcgagctggttcacaaggaaacagccgctcgatacaatgccgcaatgggcaggatgaggcagctggagaagaagcttaagcgggcaattaacaaaagcaagccatactttgagctgaaggcgaagtactatgtgcagttggagcagttgaaaaaaacagtcgatgatctgcaagcaaaacttaccctggccaaaggcgaatacaagatggccctgaagaacttagagatgattagcgacgaaattcatgaaaggcgccgcagctccgccatggggcccagagggtgcggcgtgggcgccgaaggctcctcgactagtgtggaggatctccccggctccaaaccagagcctgatgctatctccgtcgctagtgaggcatttgaggacgatagctgctctaatttcgtaagtgaagacgattccgagactcagagcgtgagtagcttctcatccggacctacttctccttctgaaatgccagatcagttcccagccgttgtgcgtcctgggtccctggacctacccagtccagtgagtctttctgagtttggtatgatgttcccggtattgggacccaggtccgaatgcagcggggccagttcaccagaatgtgaggtggagcggggtgatagagccgaaggcgccgagaacaagacttctgataaggctaacaataatcgcgggttgagcagcagctctggatctggaggtagttctaagtctcaaagctctacatcaccggagggtcaggccctggagaatagaatgaagcaactctctttacagtgttcaaaaggtagagatggcatcatcgccgacatcaagatggtgcagattggatag

SEQ ID NO: 204993 - DNA, 387 bp, synthetic construct
  misc_feature 1..387: note = Description of Artificial Sequence: Synthetic coding sequence
  source 1..387: mol_type = other DNA
atgctgaaccacgccacccagcgggtgatggaggccgagcagaccaaaacccgatcggagctggtccataaagagactgcagcccgttataatgctgctatgggcagaatgaggcaacttgaaaaaaagcttaaaagagctattaacaaatcgaagccttattttgagctcaaggctaagtattatgttcaactggagcagctgaagaaaactgtcgatgacttacaggctaagctgacgctcgccaagggcgagtataagatggctctgaagaacctggagatgattagtgacgagattcacgaacggagaagaagcagcgctatgggaccacgcgggtgtggtgtgggtgccgagggcagttccacctcagtggaagatctttag

SEQ ID NO: 204994 - DNA, 1368 bp, synthetic construct
  misc_feature 1..1368: note = Description of Artificial Sequence: Synthetic coding sequence
  source 1..1368: mol_type = other DNA
atggacgccgccctgaagcggagccggagcgaggagcccgccgagatattaccgcccgcccgcgacgaagaggaagaggaggaggaggggatggagcagggattggaagaggaggaagaggtcgacccaagaatacagggcgagctcgagaagctgaaccagtccaccgacgatattaatagacgcgagaccgagctggaggacgcaaggcagaaatttaggagtgttctcgtggaggccaccgtgaagcttgatgaattggtgaagaagataggtaaagctgtagaagatagcaaaccctactgggaagcccggcgcgttgccaggcaggcccagctggaagcccagaaggctactcaggactttcagcgcgcaactgaagtcttgagggctgcaaaggaaacaatctctttggccgagcagcgcctcctggaggatgacaaacgacaattcgacagtgcttggcaggaaatgctcaaccacgccacacagagagttatggaagctgagcagaccaaaacccgatccgagctggtccacaaagagacagctgcccggtataatgccgcaatggggcgtatgcgtcaactagagaagaaattgaaacgtgccatcaacaagtctaagccttacttcgagctgaaagctaagtactacgtccagctcgagcagttgaagaagaccgtcgacgacttacaggctaaactgaccctcgccaaaggggagtataaaatggccctgaaaaacttagagatgatctccgacgaaatacacgagcgccgcagaagcagtgctatgggcccgaggggatgcggcgttggagctgagggcagctctacttcggtggaggatctgccaggatcaaaaccagaacctgacgcaattagcgtggctagcgaagccttcgaggatgacagctgctccaattttgtctccgaagacgactcagaaacccagtccgtgagctctttcagctctgggccaacttctccatcagaaatgcctgatcaattcccggccgtcgtaagaccagggagcctggatctgcccagccctgtgagcctgtccgagtttgggatgatgttccctgttctcgggcctcgatcagaatgtagtggcgccagcagccccgagtgtgaggtagagcgcggcgaccgcgccgaaggagcagaaaacaagacaagcgacaaggcaaataacaaccgcggcctgagttcctcctctggatccggcgggtcttctaaatcacagtcatccacgagtccggaaggacaggcactggaaaatagaatgaaacagctatccctccagtgcagtaagggtagggacggcataattgctgacatcaagatggtacagattggctag

SEQ ID NO: 204995 - DNA, 897 bp, synthetic construct
  misc_feature 1..897: note = Description of Artificial Sequence: Synthetic coding sequence
  source 1..897: mol_type = other DNA
atgctgaaccacgccacccagcgggtgatggaggccgagcagaccaagactaggtcagagctcgtgcacaaagagaccgccgctcgctacaacgccgcaatgggccgtatgcggcaattggagaagaagttaaagcgagcgattaataaatcaaagccttactttgaactgaaggctaaatattacgtgcaactggaacagctgaaaaaaactgtagacgacctgcaggctaaacttacactggccaagggggagtacaagatggcgttgaagaacctggaaatgattagtgacgaaatccatgagcggaggaggtcgagcgcaatgggccccagaggctgtggcgtgggagccgagggtagctccactagcgttgaagatctgcctggttccaaacccgagcccgatgccatttctgtcgcatcagaagcatttgaggacgattcttgtagcaacttcgtgagtgaggatgactctgagacccagtccgtcagctcattcagctccggtcctactagccccagcgagatgcccgaccagttccccgcagtggtaagacccgggagcctggacttgccctctcccgtgtccttgagcgaattcgggatgatgtttcctgtgctcggacctagatccgaatgctcaggtgcgtcaagtccagaatgtgaagtcgaaagaggggacagagcggagggagcagaaaataagacctctgacaaggccaataacaaccgcggtttatcatcctccagcgggtccggaggttcttcaaagtcccaatcttctacctccccagaaggccaggcattagaaaatagaatgaagcagttaagcctgcagtgctcaaagggcagggatggaattattgctgatattaaaatggtacagatcggatag

SEQ ID NO: 204996 - DNA, 156 bp, synthetic construct
  misc_feature 1..156: note = Description of Artificial Sequence: Synthetic coding sequence
  source 1..156: mol_type = other DNA
atgctgaaccacgccacccagcgggtgatggaggccgagcagaccaaaacacgcagcgagctggtgcacaaagaaaccgcggctcgctataatgctgccatgggcaggatgcgccagctggaaaagaaactgaaaagggcgattaacaaaagttag

SEQ ID NO: 204997 - DNA, 897 bp, synthetic construct
  misc_feature 1..897: note = Description of Artificial Sequence: Synthetic coding sequence
  source 1..897: mol_type = other DNA
atgctgaaccacgccacccagcgggtgatggaggccgagcagaccaagactagatctgaacttgtccacaaggaaaccgccgcccgatataatgcggctatgggccgcatgagacagctagaaaagaagctgaagcgggcaatcaataagtccaagccatattttgagctcaaggccaagtattacgtacagttggaacagctcaagaaaacagtggacgacctgcaggcaaaactcactctcgcaaaaggcgaatacaagatggctcttaaaaatttggagatgatctcagatgagattcatgaaaggcgtcggtccagtgctatgggccctagagggtgcggagtgggcgccgaagggtcctccacttccgtggaggatctgcccggcagcaagcctgagcctgacgcgattagcgtggcaagcgaagcctttgaggatgatagttgttccaatttcgtgtcggaggatgattcagaaacccagagcgttagctctttctcgagcggccccacgagcccttccgagatgcctgaccaattccccgccgtggtacgtccaggctcgctggatctgcctagtccagtctccctctctgaattcgggatgatgtttcctgtcctaggaccaagaagcgaatgttcaggcgcaagtagtccagaatgtgaagtagagaggggggatcgcgccgagggcgcggaaaacaaaacatctgataaagccaataataatcgaggcctgtcatcttccagtgggtcgggcggcagctccaaaagccagtctagcacttcgccagagggacaggcactggagaatcgaatgaagcaactcagcctgcagtgctccaaggggcgggatggtatcatagcggacatcaagatggtccagattgggtag

SEQ ID NO: 204998 - DNA, 2580 bp, synthetic construct
  misc_feature 1..2580: note = Description of Artificial Sequence: Synthetic coding sequence
  source 1..2580: mol_type = other DNA
atgatggagggcctgaagaagcggacccggaaggccttcggcatcaggaagaaggagaaggacacggacagtaccggaagtcctgaccgcgacggcatacagggcaaaaagaagacacagaagacccaactgttgctaacgagttgcttctggcttagggctctcagcctcacacttagccagaagaagagtaacggagctccgaacggtttctatgccgaaatcgattgggagcggtataactcccccgaattagatgaagaagggtacagtattcggcccgaagaaccgggctccacaaaggggaaacatttctactcttcctcagaatcagaggaagaggaagagagccataagaagtttaatatcaagatcaagcccctgcagtcaaaggacatcctgaaaaatgctgccaccgttgatgagctaaaagctagtattggcaacatcgcgctgtctcccagtcccgtgcgcaagagcccacgcaggtctcccggtgccattaagagaaatctctccagtgaagaagttgcacggccccgtcgcagtactcctacccccgaactgatttcaaaaaagccgcccgacgacactaccgcccttgcaccactctttggtccgccactggagagcgcatttgatgagcaaaagaccgaggtcctgctggaccaaccggagatatggggctccggacaacctattaatccatctatggaatcccccaaactgacgaggcctttccctactggtacgccacctccacttcccccaaagaatgtaccggccacacctccccgaacaggtagcccccttaccatcgggcccggaaatgatcagtccgctacagaagtcaaaattgaaaagctccctagcattaacgaccttgattccatcttcgggccagtgctcagccccaagtcagtggctgttaacgcagaagaaaaatgggtgcacttttccgatacatcccctgagcatgtgacaccagagctgaccccgcgcgagaaggtcgtctccccacctgccaccccggataatcctgcagatagccctgcccccggccccctgggccctccgggtcccactggaccgccagggcctccaggacccccccgaaacgtgttatcgcccctaaaccttgaggaagttcagaagaaagtagcggaacaaacttttatcaaagatgactatctcgagaccatcagctctcctaaggactttggtctcggccagcgcgccacacctccacccccaccaccgccaacatataggaccgtagtttcttcacccggccctggctccggcccgggaccaggcactacctcagacggcaagacagaagcccagcgatatcaggtgatatgtcccagcttgcaagccggtggaaatgaactggattcctatagcggggcgagctctccggccagaccagccacccctcttgtgccatgtcgcagtaccactcccccccccccgccgccacggccaccatcacgaccgaaactccctcccggcaagccaggagtgggtgacgttagcagaccctttagccccccaattcacagcagctctcccccaccaatcgcacctttagctagagctgaatccacctcctctatcagctcgaccaattccctgagtgcagcgactacacctaccgtggagaatgagcagcccagtctggtgtggtttgaccgtgggaagttctatctgacttttgaaggcagtagcagaggccccagtccgcttactatgggagctcaggacaccctgccggtcgcggctgcttttaccgaaacagtgaacgcgtactttaagggcgccgatcctagtaagtgtattgtgaagatcacaggcgagatggtgctctcgtttcccgctggaattacacgccatttcgctaacaatccgtctccggcagctctgacattccgcgtgatcaacttttcaaggttagagcacgtcctgcccaacccacagttgttatgttgcgacaatactcagaatgatgccaacacgaaagaattttgggtaaacatgccgaatctgatgactcatcttaagaaagtgagtgagcagaaaccacaggctacctactataatgtggacatgctgaaatatcaggtgtctgctcagggcattcagtccactcccctaaacctcgccgtgaattggcggtgtgagccctcaagcacagatctgcgcatcgactacaagtataatactgacgcaatgacaaccgcggtcgctctgaacaatgtgcagttcctcgtgccgatcgacggtggagttaccaaactgcaagcggttttgccgccagccgtttggaacgccgagcagcagagaattctgtggaagattcctgatatctcccagaaatctgaaaatggcggagtcggaagtcttcttgccagatttcagctgagtgaaggcccctccaagccttctcccctggtcgtccagtttacaagcgaagggtccacgctttccggatgcgacatcgagctggttggcgcaggttatcggttcagccttatcaaaaagcggtttgcagcaggcaaatacctggccgataattag

SEQ ID NO: 204999 - DNA, 1857 bp, synthetic construct
  misc_feature 1..1857: note = Description of Artificial Sequence: Synthetic coding sequence
  source 1..1857: mol_type = other DNA
atgatggagggcctgaagaagcggacccggaaggccttcggcatccgaaaaaaagaaaaggacaccgacagcactggttcccctgacagagacggcataaactcccccgaactcgacgaagaagggtattctatccgcccagaggaaccagggtcgaccaagggtaagcatttttactccagcagtgagagtgaagaggaagaggagagccataagaagtttaacattaagatcaagcctctccagagtaaggacattcttaaaaatgcagcgacagttgatgaacttaaggcaagcataggcaatattgcgctcagtccttcccctgtgcggaaaagtcctcgtaggagcccaggcgctatcaagcgaaatttatcttcagaagaggtggcccggccccggaggtctactcccacgcccgagttgatatctaagaagcccccagacgacaccaccgccttggctcccctttttggccccccactggagtctgcttttgacgagcagaagactgaggtacttctagatcaacccgaaatctggggttctggacaacctatcaacccaagtatggagagccccaagcttacccgtcctttccctaccggcacgccgccccccctcccacctaaaaatgtgcccgccacccctcctcgcacgggaagccccctgacaatcgggccaggggcttcctctcccgcacgcccagccacaccactcgtgccatgccgatctaccaccccaccacctcctcctcctcggccccccagtcgcccgaagctgccccctggtaaaccaggggtaggggatgtctccaggccattctcaccaccgattcactccagctcgccaccccccatcgcacctctggccagggcggagtccacttcgtcaataagcagcacgaactcgctttccgccgccactaccccgaccgtagagaatgagcagccaagtctagtgtggttcgaccgcggaaagttctatttgaccttcgaggggtcgtcacgcgggcccagtcccttgaccatgggcgcccaagatactttgcccgtggcggcagcatttactgagacggtgaacgcctatttcaagggggcggatcccagtaaatgtatcgttaagattaccggcgagatggtgctaagtttccctgcaggaatcactagacacttcgctaataacccctcccctgcggcactgacatttagggttatcaatttcagtagacttgagcacgtgctaccaaacccccagctgctatgctgcgacaatacccagaacgatgccaacaccaaggaattctgggtaaacatgcctaacctgatgacccacctcaaaaaagtgtcagagcagaaacctcaagctacatattacaacgtagatatgctgaagtaccaggtgtccgcacagggaattcaatccacgcctctcaatctcgcagtgaattggagatgtgagccctccagcacagatttaagaatcgattacaaatacaacaccgatgccatgacgacggccgtagcgctgaataacgtgcagtttctagtgcccatcgatggcggggtcactaaactacaggccgtcctgcctccggctgtgtggaacgctgagcaacagagaatcctgtggaaaatcccagatatttcccagaaatcagagaatggcggcgtgggttccctgctggcaagatttcagctgtccgaaggcccgtctaaaccttcacctcttgtggtacaattcacgtccgaaggctctactctgtccgggtgtgatatcgaactcgtcggggctggatacagattttccttgattaagaaacgtttcgccgccggaaagtatcttgccgacaattag

SEQ ID NO: 205000 - DNA, 1893 bp, synthetic construct
  misc_feature 1..1893: note = Description of Artificial Sequence: Synthetic coding sequence
  source 1..1893: mol_type = other DNA
atggagggcctgaagaagcggacccggaaggccttcggcatccggaaaaaggagaaggacacagactctacaggtagccctgatcgcgatggtataaagaagagcaatggtgcaccgaatggattttacgctgaaatcgattgggagcgctataattccccagagctcgacgaggaaggatatagcattcgccccgaggaacctgggtctaccaaggggaagcacttttattcatctagtgaaagtgaggaggaagaagaatcacacaagaagttcaatatcaagataaaaccactgcaatccaaagacatcttgaaaaatgctgctacagtggacgaactcaaggcgtctatcggaaacattgccctttcaccctcaccagtaggtgccatcaagaggaaccttagttcggaagaggtggcgcgccccagacgatccaccccaaccccagagttgatttccaagaaaccacctgacgacaccaccgccttggcgccactgttcggcccaccattggaatccgctttcgatgagcagaagacagaagtgctgctggatcaacccgagatttgggggtcaggccagcctataaacccttctatggagagtcctaagctgacaagaccgttccctacaggaacccctcctccattaccacccaagaatgtcccagcgacaccccctcgcacggggagcccactgactataggaccgggagcctcgtcccccgccaggcctgccaccccccttgtgccttgtcggtcaactacaccacccccacctccccccagaccccctagccggcctaagctcccaccaggcaaacccggcgtcggcgatgtgagcaggccattttctccccctattcacagctcttccccaccccccatcgcaccccttgcaagagctgagtctacttcaagtatcagcagcacaaatagtctgtcggcggctaccacccccactgtcgtaagtgaggacgacgtgttttatgacaaactacctagtttcgaacgtcgctgtgaaacaccggccggcagcagtaggggcccctcccccctgactatgggagctcaggacaccctgccagtagcagcagcctttacggagacagtcaacgcttactttaagggagccgacccttccaagtgcatcgtgaagataactggagagatggtactttcttttcccgccggtatcactagacacttcgctaacaatccatctccagccgctctgacatttagggtgattaatttctcacggttggaacatgtgcttccaaatccccagcttttgtgctgtgacaatacccagaacgatgccaacaccaaggagttctgggtgaacatgccgaacctgatgacccacctcaagaaggtgagcgagcagaagccgcaggctacctactataacgtggacatgctgaaatatcaggtatccgctcaaggtatacagtccactcccctgaatctggcagtgaactggcgttgtgaacccagctccaccgatctcaggattgattacaagtacaatacagacgctatgaccactgctgtcgcactgaacaatgtacaattcctggtgcccatcgacggcggggtgaccaagctccaggctgtgctgcctccggctgtgtggaatgccgaacagcagcgtatcctgtggaagatccctgacattagccagaagtctgagaatggcggggtaggtagtttgctagcacggtttcagctgtcagagggacctagtaagcccagccctttggtggtgcaatttacgagcgaagggtctaccttaagtggatgcgacattgagttggtgggcgctggatataggttttcattaatcaaaaagagatttgcggccggtaagtaccttgccgataactag

SEQ ID NO: 205001 - DNA, 2487 bp, synthetic construct
  misc_feature 1..2487: note = Description of Artificial Sequence: Synthetic coding sequence
  source 1..2487: mol_type = other DNA
atgatggagggcctgaagaagcggacccggaaggccttcggcatccgtaagaaagaaaaagacactgatagcaccggtagcccagacagagatgggatccaaccgagcccgcatgagccaccttataatagcaaggcggagtgcgcgagggaaggagggaagaaagtgtcaaagaagtcaaatggagcacccaatggcttctacgcggagatagactgggaaaggtacaactctcctgaactggacgaagaggggtactctattcgacctgaagagccaggctctacaaaagggaagcatttctattcctccagtgagagtgaggaagaggaggagtcccataagaaatttaacatcaaaataaaacctctccagtcaaaagatatcctgaagaacgcagcaacggtcgacgagttgaaggccagtattggcaacatcgcgctgtcacctagccctgtgcggaagagcccacggagaagcccaggggctattaagcgaaacctttcttctgaggaggtcgctcgaccgaggcgctcgaccccaacacccgaactgatctccaagaagccaccagacgacaccacagcgttagcaccgctatttggtccacctttagaatctgcattcgacgagcagaaaactgaagtgctactcgatcagcctgagatttggggatctgggcagccgatcaatccatctatggagtcccctaagctgactcggccttttcccaccgggaccccaccaccactgccccccaaaaatgtacccgctacccctccgagaacgggctcaccattgacaataggtccaggcaacgaccaaagcgctactgaagtcaagatcgaaaagctaccctcgattaacgacctggactcgatatttggacccgtattgtctcctaagtccgtggccgtcaacgcagaggaaaaatgggtccactttagtgacactagccctgaacacgtgacacccgagttaacaccacgggagaaggtcgtaagccctccagctacccccgacaatccagctgactccccagcccccggccccctgggtccacctggcccgacaggacctccaggaccccccgggccgcccagaaatgtgctgtctcccttgaacctggaagaggtgcagaagaaagtggccgagcaaaccttcataaaggatgattatcttgagaccatcagctcacctaaggactttggattgggacagcgggccaccccacctccacctccgcctcccacttataggaccgttgtttcttctcctgggccaggaagcggccctgggccaggtacgactagcggtgcttcgtcccccgcgaggcctgcgactcccctcgtgccttgccgaagtactaccccgcccccaccgccacctaggcctccaagtagaccgaagcttcctcccggcaagcccggagtgggcgatgtgagcagacctttctcccccccaatccactctagttctccacctcccatagccccactggcacgtgccgaatcaactagttcgatctcctcgaccaactcactgtctgctgctactactcctacagttgagaacgagcagccatcgcttgtgtggttcgatagaggaaagttctatctaacatttgaagggagtagcagaggtccgtcgcccctgacgatgggcgctcaggataccctacccgtggcagcggcattcacggagactgtgaatgcttactttaagggcgctgacccatcaaaatgcattgtaaagattactggggagatggttctctcatttcctgctggtatcacgcgccacttcgcaaataatccatcccctgccgccctaacattccgggtgataaacttctccagactggaacatgttttgccaaatccccagctcctgtgttgtgataacactcagaatgatgctaacactaaggagttctgggtgaacatgccgaatctgatgacacacctcaaaaaagtctccgagcaaaagccacaggctacttactataatgttgacatgttgaaatatcaggtctctgcccagggcattcaatccacaccactgaacctagctgtgaattggcggtgtgagcccagcagcacagacttgcggattgactacaaatacaacaccgatgctatgactaccgctgtagctttaaataatgtccaatttctggtccccattgacggaggggtaacgaaactccaggcagtccttccacccgccgtttggaatgccgagcagcagagaattttgtggaagatcccagatattagccaaaagagtgagaacggcggagtgggaagcctgctcgccagatttcagctgtccgagggaccatccaagcccagccctctcgttgtgcagtttacttccgagggctctaccttatccggctgtgacatagagctggtaggggcaggctacaggtttagcctgatcaagaagcggttcgctgcaggtaagtacctagccgacaactag

SEQ ID NO: 205002 - DNA, 2577 bp, synthetic construct
  misc_feature 1..2577: note = Description of Artificial Sequence: Synthetic coding sequence
  source 1..2577: mol_type = other DNA
atggagggcctgaagaagcggacccggaaggccttcggcatccggaagaaagagaaagataccgacagtacgggctcgcccgatcgagatggaatccaaggtaagaaaaaaacccagaagacccaactcctgctgacttcttgcttctggctgagggcccttagtttgacactttcccagaaaaaatccaacggggccccgaacgggttctacgctgaaattgactgggagagatacaactctcccgagcttgatgaggaaggctacagcatacgtcctgaagagcccggatcaacaaaggggaagcatttctactcatcatcagagtcggaagaggaggaagagagccacaaaaagtttaacatcaaaattaagccactgcagtccaaggatatacttaagaacgccgccactgttgacgagctcaaggcatctatcgggaacattgcactctcaccgtcccctgtgaggaagaaagagcggcgggaaaaaggcgctatcaagcgcaatttatccagcgaggaggtcgcgaggccccgccgttccacccccacacctgaactcattagtaagaagcctccagacgacaccacagccttggctcctctgttcggcccacccctggagtccgccttcgatgagcagaagacagaggtgctgcttgatcagcccgagatttggggctccggacaaccgataaatcccagcatggagagcccaaagctaaccagacccttccccacgggcacccccccaccccttcccccaaagaatgtaccagctactccgcctaggactggaagccctttgacaatcggacccggtaatgatcagagcgcaacggaagtcaaaattgagaaactgccttcaatcaatgatttagacagcattttcggacctgtcctttcaccaaagagtgtggccgtcaacgcagaggaaaagtgggtacacttctctgatacttcgcccgaacatgtcactcctgagctcactcctagagaaaaagtggtttctccccccgctactcctgataacccagcagactcccccgcccctggtccgttagggcctcctggaccgaccggcccccctggccctcctggccccccccgtaatgtattgtctccgctcaacctggaagaagttcagaagaaagtggccgagcagaccttcattaaagatgattacttggaaactattagttctcccaaggatttcggacttggccagcgggccacgcctccaccaccacctcctcctacctacagaacagtggtttcctctcccggacctgggtccggtccagggcctggcactacgtccgatgggaagaccgaggcacagaggtaccaagtcatttgcccatcattgcaggctggtggaaacgagctggatagctatagcggagctagcagtcccgcccgtccggcaacaccactcgttccttgtaggagcacgactcctcctccccctcccccccgccccccatcaaggccaaaactcccgcccggaaaacccggagtgggagacgtttcacgcccctttagccccccaattcactcctcaagccccccccccattgctcccttggcaagggcggagagtacgagctccatctcctcaaccaacagcctgtctgctgccaccaccccaaccgttgaaaacgagcaaccttcacttgtctggttcgaccgaggtaaattctacctaacattcgaaggatcaagtcgggggcccagcccactcaccatgggcgcccaagataccctccctgtcgcagccgcctttacagaaaccgtcaacgcgtactttaagggcgcggatccgtccaaatgcatcgtgaaaattacaggagaaatggtgctctctttccctgccggcattacgaggcatttcgcaaacaatccatctccagccgctttgacttttcgagtcatcaacttctccaggctggagcatgtgttgcctaaccctcagttgctatgctgtgataacactcagaatgacgctaataccaaggaattttgggtaaatatgccaaaccttatgacccacctaaaaaaggtatccgagcagaagccccaggctacatactacaacgtggatatgttgaaatatcaggtttctgctcagggtattcagtccacacccctgaacctcgcagtaaattggagatgtgagcctagctccacggatctgcggattgactataaatacaacacagatgccatgaccaccgcagtggccttaaataacgtccagttcttggtcccaattgacggtggagttacaaaattgcaagccgtcttacccccggctgtttggaacgcagaacagcagaggattctgtggaaaattcccgacatcagccagaaaagcgagaacggaggtgtgggctcactgctcgcaagatttcagctgagtgaaggaccctcgaaaccatccccactggtcgtacaatttacatccgagggttctactctgtctgggtgcgatattgagctggtgggtgccggctatcgtttcagcctgattaagaagcgatttgccgcaggtaagtacctcgctgataactag

SEQ ID NO: 205003 - DNA, 1896 bp, synthetic construct
  misc_feature 1..1896: note = Description of Artificial Sequence: Synthetic coding sequence
  source 1..1896: mol_type = other DNA
atgatggagggcctgaagaagcggacccggaaggccttcggcatccgcaaaaaagaaaaggatactgactccactggtagtccagatcgcgacgggattaagaagtccaatggagcacccaatgggttttatgccgaaatcgactgggagaggtacaatagcccagaactggatgaggaggggtacagcattcggccagaagaacctggcagcactaagggtaagcacttctactcttcttcggagtctgaagaggaggaagagagccacaaaaaatttaacatcaaaataaaacctcttcagtctaaggatattctgaagaatgctgctacagtggacgagctgaaggcatctattggcaatatcgctctctcaccgtcccctgtcggcgctattaagagaaatttgagcagtgaggaggttgccagaccgaggaggagcacaccaacaccagagttgatttcaaagaagccccccgacgacaccactgccttagcccctctgtttggccctccactggagtccgcttttgatgaacaaaaaacagaggtactgcttgaccagcctgaaatctggggctccgggcagccaatcaacccgtccatggagagccccaaactgacacgaccgttccctacagggaccccgccccccctgcctccgaaaaatgtccccgccacccctccaagaaccgggtcaccattgactataggacccggagccagcagccctgctaggcccgcaacacctttggtgccctgccgaagcaccacacccccaccacctccgcccaggcctccatcaagaccaaaactcccaccagggaaacccggcgtgggggacgtgtcccgcccttttagcccgcccattcacagcagttcaccgccccccattgccccattggccagggcagaatccacctccagtatctcgtccactaactctttgtctgctgccacaacaccaaccgtcgtgtctgaggatgacgtgttctacgacaagctgcccagttttgagcgtcggtgcgagacaccagctggatcctctcggggaccttctccacttactatgggtgcacaagacactttgcctgttgctgccgccttcactgaaacagttaacgcatacttcaagggggccgatcctagtaagtgcatcgtgaaaattaccggagaaatggtactgtccttccctgcaggcatcacacgccactttgctaacaacccatcacccgccgcccttacattccgagtaataaacttctccaggctagagcacgtgctgcccaatccccagctactatgctgtgacaatacccagaacgatgccaacacaaaagagttttgggtcaacatgcccaaccttatgacacatctgaaaaaagtgtccgagcagaagcctcaggctacatattataacgtggatatgctgaagtaccaagttagcgcccaggggatccaatccactccgctgaacctagccgtgaactggcgatgtgagcccagctcaactgaccttcgcatcgattacaaatataacacagacgcgatgaccacggccgtggccctgaacaacgtgcagtttcttgtgcctatagacggcggcgtcactaagttgcaggctgtgttaccacccgctgtctggaatgctgagcaacagagaatcctgtggaagatacccgacatttctcagaagtccgaaaatggcggcgtagggtcccttctagctagatttcagctctcagaaggaccctctaagccttccccactggtcgtacagttcacttcagaggggtcaaccctgagcggatgcgatatcgagctagtgggcgctggctaccggttttcactgataaagaaacggttcgcggctgggaagtatttggctgacaactag

SEQ ID NO: 205004 - DNA, 2496 bp, synthetic construct
  misc_feature 1..2496: note = Description of Artificial Sequence: Synthetic coding sequence
  source 1..2496: mol_type = other DNA
atggagggcctgaagaagcggacccggaaggccttcggcatccggaagaaagaaaaggacacggattccacgggctcccccgatagggacggcatccaggggaaaaaaaaaacccagaagactcagctgttgttaacgtcctgcttctggctgcgagctctcagccttactttgtctcaaaaaaagtcaaatggcgcccctaatggcttctatgctgaaatcgactgggaacgttataacagtcctgaattagatgaggagggatactccattcgtcctgaggagcccggctccaccaaaggcaagcacttttactcctctagcgaaagcgaggaagaggaggagtctcacaaaaagtttaatatcaaaatcaaacctcttcagagcaaagacatactgaaaaacgccgcaactgtggacgaacttaaagccagcattggaaacattgccctgtctccctcaccggtgcgcaaaaaggagagacgggagaaaggagccattaaacggaacctgtcatctgaagaagtggcaaggccccgaaggtccacacccacaccagaactgatctcaaagaagccacctgacgatacaaccgccttggctcccctctttgggccccctttggaatcagccttcgacgaacagaagacagaggtgctgctcgatcagccggagatctggggatcgggtcagcccattaaccccagcatggagtcgcctaaactaacgcggccctttccaacgggtaccccgcctccattgccacccaaaaacgtaccagccacccccccccgcaccggcagtccactgaccataggtcccggaaacgatcagtcagccaccgaagtgaagattgaaaagctgccatcgattaatgatttggatagcatcttcggaccagtgctctcccctaagtcagttgctgtcaatgcagaggagaagtgggtccatttttcagacacttcacctgaacatgttacccccgagcttacccccagagaaaaagtggttagccctcccgccaccccagacaacccggcagatagtccagcccctgggccgctcgggccccctgggcctaccggtcccccaggccccccaggccctcctcggaatgtgctttcacccctgaacctcgaggaggtacagaagaaagtggcagagcagacttttatcaaggacgattacctagagacaatctcatcacccaaggatttcggcctggggcagcgggccacccctcctccaccaccacctcccacttataggaccgtggtctcttcccctggacccggttccggacctggccctggtactacatccggagcttcatcccctgccagaccagctacccctctggtgccgtgccggtctacaactcctcctcctcctcccccaaggcctccaagccgacctaagctccccccgggcaagccaggtgtcggcgacgtgtctcgccctttctctcccccgattcacagttcctcaccacctcccatcgctccattggcccgggctgagtctacgagttccatttcgagcaccaatagtctgagtgcagctacgacacctacggtagagaacgaacagccgagcctggtttggttcgatcggggcaaattctatttgacatttgagggatcaagcagaggtccctcccccctgacaatgggagcacaagacaccttgcctgtggctgcagctttcactgagactgttaacgcttacttcaagggcgccgatccttccaaatgtatcgtcaaaattactggagagatggttctgagctttcctgccggaatcacaaggcacttcgcaaacaacccaagtcctgcggctctgactttccgggtcatcaactttagccgcctggaacacgttttgcccaatccacagctactctgttgtgacaacacccagaacgacgccaacactaaggagttttgggtgaatatgccaaaccttatgacacacctgaaaaaagtttcagaacagaagccacaggcaacctactataatgtcgatatgttgaaatatcaggtctccgctcagggaattcagtcaacccctctgaatctcgcagtgaattggaggtgcgagccttcctctaccgatttgcgcattgactacaaatacaacactgatgcaatgactaccgccgtagcccttaataacgttcagtttctggtgcctatcgatggcggcgtgactaagctgcaggctgtgctgcctccagccgtctggaacgctgagcagcagagaattctctggaagataccagatatcagccagaagtccgagaacgggggggtagggtccctgttagcccgcttccaactttctgagggcccgtcaaagccctcacccttagtggtccaattcacgtccgagggctcaaccttgtccggatgtgacattgagcttgttggcgctgggtaccggttctccctgattaaaaagcgatttgccgcgggaaagtatctggcagacaactag

SEQ ID NO: 205005 - DNA, 783 bp, synthetic construct
  misc_feature 1..783: note = Description of Artificial Sequence: Synthetic coding sequence
  source 1..783: mol_type = other DNA
atgatggagggcctgaagaagcggacccggaaggccttcggcatcagaaagaaggagaaggacactgattcaacagggtctccggatcgcgatgggatccaaccgagtcctcacgagcccccgtacaactccaaggcggaatgcgctagagaaggaggcaagaaggtgtctaagaagtcaaacggcgctccaaatgggttctacgccgagatcgattgggaacgttataactcaccagagcttgacgaggagggctatagcatccgcccagaagaacccggatccactaaaggcaaacacttctactcatcgtctgagtccgaggaggaagaagaaagccacaagaaattcaatattaaaatcaagcccctgcagtctaaagacatcctgaagaatgctgcaaccgtcgatgagttaaaagcatctattggtaacatcgcactgagtcctagcccagtcggcgctattaaaagaaatctcagcagcgaggaggtcgccaggccccgccgaagcacccccacccccgaactgatcagcaaaaaaccaccggatgataccaccgccttagcgcccctgttcggtccaccccttgagtccgccttcgatgaacaaaaaaccgaagttttactcgatcagcccgaaatttggggctcagggcaaccgatcaacccctcgatggaatcacctaaactcacaaggccctttccaactggaacgccgcctcccctccctcccaaaaacgtacccgcgacccccccgagaacagggtccccactgacctag

SEQ ID NO: 205006 - DNA, 1002 bp, synthetic construct
  misc_feature 1..1002: note = Description of Artificial Sequence: Synthetic coding sequence
  source 1..1002: mol_type = other DNA
atgacctgcagcgtgacccacatcgtgagcttcagcctgcccttcctgaatccttcccaccctgccagtacccccgggcatacagagaacgagcaaccgtctctcgtatggtttgaccgaggcaagttctacctcacctttgaagggtctagccgggggccttctccattaacaatgggcgcccaagacactctccctgtagcagccgcgttcacggaaactgtgaacgcatatttcaagggagctgaccctagcaaatgcattgtgaagattacgggggaaatggtactgagcttccccgccggcattacccggcatttcgccaacaacccctctcctgctgccctaacatttagagttattaactttagcagattggaacacgtgctgcccaacccacagctcctttgctgcgacaatacacaaaacgatgcaaacaccaaggagttctgggtgaacatgcctaacctcatgacccatttgaagaaagttagcgaacagaaaccccaggcgacttattacaacgttgacatgctgaagtatcaagttagcgcccaagggatccagtctacacctttgaatcttgcagtgaactggagatgcgagccttcttcaacagatctgcgcatcgattacaagtataacacagatgccatgaccactgcggtggccttgaataatgtgcagtttctggtaccgattgatggaggtgtaacaaagctgcaagcagtactgccaccagccgtatggaatgccgaacaacaacgaattctatggaagatccccgacattagccaaaagtccgaaaatggaggggtgggaagtcttttagctcggttccagctgagcgaaggtccttccaagcctagtccacttgttgttcagtttacatccgagggaagtaccctgagcggttgcgacattgaattagtcggtgccggataccggtttagcctcattaagaagaggttcgcggccggaaagtaccttgcagacaattag

SEQ ID NO: 205007 - DNA, 1107 bp, synthetic construct
  misc_feature 1..1107: note = Description of Artificial Sequence: Synthetic coding sequence
  source 1..1107: mol_type = other DNA
atgagcgtggccggcctgaagaagcagttctacaaggccagccagctggtttctgaaaaagtcgggggcgcagagggcaccaagcttgatgatgatttcaaggaaatggaaaagaaggtcgacgttacctctaaggcagtgaccgaggtcttagctcgcacgattgaatatttgcagccaaacccggcaagtagagctaagctgaccatgctcaacaccgttagcaagatccgcggccaggtgaaaaatcccggttacccccaatctgaagggcttcttggggagtgcatgatcaggcacggtaaggagctggggggagaaagcaacttcggcgatgcactgctagatgccggcgagagtatgaagaggctcgccgaggtcaaagacagcctcgacattgaggtgaaacagaatttcatagatcctctacaaaacctctgtgagaaagacctgaaggagatccagcatcatttaaagaaacttgagggtcgaaggctggactttgactacaaaaaaaagcgacaggggaagatcccagacgaggagctaagacaggcgctggagaagtttgaagaaagcaaggaggtcgccgagacctcaatgcacaacctcctggaaaccgacatagagcaggtatcccaactctctgcactggtggatgcacagctcgattatcataggcaagctgttcagattcttgatgagctggccgagaagctcaagcggcgcatgcgcgaggccagctctaggcctaagcgcgagtataagcccaaaccccgggaaccgtttgacctaggggagcctgagcagtccaatggcggctttccatgtaccacagcccccaagatcgctgccagttcaagcttccgaagctcagacaaacccattcggacaccctcccgctctatgccgcccttagaccagccatcatgtaaggccttatacgacttcgaacctgagaacgacggcgaacttggattccatgaaggcgacgtaattaccctgactaaccagatcgatgaaaattggtatgaagggatgctggatggccagagcgggttcttccctctgagctacgtggaagtcctggtccccctgccacaatag

SEQ ID NO: 205008 - DNA, 963 bp, synthetic construct
  misc_feature 1..963: note = Description of Artificial Sequence: Synthetic coding sequence
  source 1..963: mol_type = other DNA
atgagcgtggccggcctgaagaagcagttctacaaggccagccagctggtctcagaaaaggtggggggtgctgaaggcacaaaactggacgatgacttcaaggagatggagaaaaaagtcgatgtgacctccaaagccgtgaccgaggttctggcgagaacaatagaatacttgcagccaaaccctggggatgcactattggatgcaggcgaatccatgaagagactggccgaggttaaagatagcctggacatcgaagtcaagcagaattttatcgaccctcttcagaatttatgcgagaaggacctgaaagaaattcagcaccatctaaagaagttggaaggacgccgtctcgattttgactataagaagaaaagacagggcaaaattcccgatgaagaacttagacaggcactggaaaaatttgaggagtccaaagaagtggccgaaacatcaatgcacaacctgttggagacagacatcgagcaggtgtcacagttatcggctctcgttgatgcgcaattggattaccacagacaagcggtgcagattcttgatgaactggccgaaaagttaaagaggcgaatgcgtgaggcctcatctcgccctaaacgcgagtataagccgaaaccacgagaaccctttgacctgggcgaacccgagcagtcgaacgggggtttcccctgtactaccgcccccaagatcgcggcttcctcctcatttagatcttcggacaaacctatacggaccccatcaaggtctatgcccccactggatcaaccctcctgcaaagcattgtatgatttcgaacccgagaacgacggcgaactcgggtttcacgagggtgacgtcatcacccttaccaatcagatcgacgaaaattggtatgagggcatgctggacggccaatcgggattttttcccctcagctacgtggaagtgcttgtccctctccctcagtag

SEQ ID NO: 205009 - DNA, 915 bp, synthetic construct
  misc_feature 1..915: note = Description of Artificial Sequence: Synthetic coding sequence
  source 1..915: mol_type = other DNA
atgagcgtggccggcctgaagaagcagttctacaaggccagccagctggtttccgagaaggtgggcggagcagagggcacaaagctcgatgacgactttaaggagatggagaaaaaagtggatgttacttccaaggctgtcaccgaggtgttagctcgtacaattgagtacctccagccaaacccagcaagcagggctaagctgaccatgctgaacactgtgagcaaaattcgaggacagaacttatgcgagaaagaccttaaggagattcagcatcatctgaagaagttggaagggcgacgactggacttcgactacaagaagaagcgccagggtaaaatacctgacgaagaactgcgccaggcattggagaaattcgaagagtcgaaagaagtagccgagaccagcatgcataacttactggagacagacatcgaacaggtttcgcagctcagcgcacttgtcgatgcccagctcgactaccaccggcaagctgtgcagattctggatgagcttgcagagaaacttaaacggaggatgcgggaagcatcctctaggcccaaacgcgaatataagccaaaacctagagaaccttttgacctgggagaacctgaacagagtaacgggggcttcccgtgtacaactgcacccaaaattgccgcgagctcttcgtttcggtcttcagacaagcccatccggaccccttccagatctatgcccccccttgaccaaccgtcatgcaaagccttatatgactttgaacccgaaaacgatggggaacttggctttcatgagggagatgtgattactttaaccaatcagattgatgagaattggtacgaaggtatgctggacggacagtcaggatttttccccctgtcatacgtcgaagtgcttgtgccactgcctcagtag

SEQ ID NO: 205010 - DNA, 1059 bp, synthetic construct
  misc_feature 1..1059: note = Description of Artificial Sequence: Synthetic coding sequence
  source 1..1059: mol_type = other DNA
atgagcgtggccggcctgaagaagcagttccacaaggccacccagaaagtgtcggaaaaagtcggaggggccgagggcacgaagctagatgacgactttaaagaaatggagaggaaggtcgatgtcacttccagagcagtgatggaaatcatgactaagaccatcgaatatctccagccaaatccagcctctcgagctaaactaagcatgatcaacactatgagtaaaatcagaggccaagagaaaggcccagggtacccccaagcagaagctctgctggccgaagccatgcttaaatttggaagagagcttggggacgattgtaacttcggaccagccctcggcgaggtgggcgaggctatgagggaactgagtgaggtcaaggattctctggacatcgaagttaagcagaacttcatcgatccgttacagaatctgcatgacaaggacctgcgcgaaattcagcaccatctgaagaagttggaggggcgaaggctggattttgactacaagaagaaaagacagggtaagatccctgatgaagaactccgccaggctctggagaagtttgacgaaagtaaagaaattgcagagagctctatgttcaatctgctggagatggacatcgagcaagtttcccaactgtccgcgttagtgcaggcccagctggagtaccacaaacaagccgtgcagattttgcagcaggtcactgtgagactggaggagcggatacgtcaggcgtcaagccagcctagacgggagtatcaacccaaacctaggatgtctttagagtttcccaccggggatagtactcagcctaacggggggctgagccacactgggacacctaagccttcaggcgtgcagatggatcagccctgttgtagagccctttacgacttcgagcctgaaaatgaaggtgaactggggttcaaggagggcgatatcatcaccttgactaatcagatagatgaaaattggtacgagggaatgctacacggtcatagtgggtttttccccatcaactacgtcgaaatacttgtcgccttgccacactag

SEQ ID NO: 205011 - DNA, 678 bp, synthetic construct
  misc_feature 1..678: note = Description of Artificial Sequence: Synthetic coding sequence
  source 1..678: mol_type = other DNA
atgagcgtggccggcctgaagaagcagttccacaaggccacccagaaggtgtcggagaaggtcgggggggcagaagggaccaagctggacgatgactttaaggaaatggagagaaaggtagatgtaaccagccgggcagttatggagattatgaccaagaccatcgagtatctgcagcctaatccgggcagtctggaagccgaggccctccttgccgaagccatgctgaagttcggtagagagctcggtgacgattgcaattttggccccgccctgggggaggtcggcgaagcaatgagggaattgagcgaggtcaaagactcactggacattgaagtgaaacaaaacttcatcgatcccctgcaaaacctgcatgacaaggacttaagggagattcagcatcacctgaagaaactcgaaggtcggaggttggattttgactataaaaaaaaaaggcagggcaaaatccccgatgaagagcttagacaggccctagagaaattcgacgagtctaaggagatcgcagaaagtagcatgtttaacctcctggaaatggatatcgagcaagtgtcccagctgagcgcgcttgtgcaggcccaactggaatatcataaacaggctgttcaaattctgcagcaggtgactgtaagacttgaggaacgtatcaggcaggcatag

SEQ ID NO: 205012 - DNA, 918 bp, synthetic construct
  misc_feature 1..918: note = Description of Artificial Sequence: Synthetic coding sequence
  source 1..918: mol_type = other DNA
atggagatcatgaccaagaccatcgagtacctgcagcccaaccccgcgtcccgggccaaattgtcaatgatcaatacgatgtcaaagatccgcggacaggagaaggggccgggttatccacaggcagaagctttattggctgaggctatgctgaaattcggcagagaacttggagatgattgcaactttggccccgctctgggcgaggttggcgaggcgatgagagaactgagcgaagttaaggattcactagatatcgaggtcaagcagaacttcattgaccctctgcagaacctccacgacaaggatctgagagagattcagcatcatctgaagaaactggaggggcggcgcctggactttgactacaagaaaaaacgccagggtaaaatccccgacgaggagctcaggcaggcgctggagaaattcgacgaatccaaagagatcgcggagtcttccatgtttaatctattggaaatggatattgaacaagtaagccagctttcagcattggtccaagcacagctagaatatcacaagcaagcggttcaaattctgcagcaggtgaccgtgagactggaagaacgcatacgtcaagcgtcatcccagccgagaagagagtaccagccaaagccaaggatgtctttagaattccccaccggcgacagcacccaacccaatgggggccttagtcacactggaacccccaagccgtcgggggtccagatggaccagccgtgctgtcgggctctgtatgacttcgagcctgagaatgagggagagctgggtttcaaggagggcgatatcataaccctcacaaatcagatcgacgaaaactggtatgagggcatgcttcatggccactccgggttctttccaattaattatgtagaaatcctcgttgccctgccacattag

SEQ ID NO: 205013 - DNA, 546 bp, synthetic construct
  misc_feature 1..546: note = Description of Artificial Sequence: Synthetic coding sequence
  source 1..546: mol_type = other DNA
atgagcgtggccggcctgaagaagcagttccacaaggccacccagaaggtttctgagaaagtcgggggcgcggaggggacaaaactggatgacgacttcaaagaaatggagatcgagcaagttagccagttgagcgccttggtccaagcccagctggagtatcataagcaggctgtgcagatcctccaacaagtgactgtccgcctcgaagaaaggattcgtcaggcctctagccaaccaagaagagagtatcagcccaagccacgtatgtcgcttgagtttcctacaggggattcaacacaacctaatggcggtttaagtcacaccggaacaccaaagccctctggcgtacaaatggaccagccttgttgtcgggcattgtatgactttgagcctgagaacgaaggcgaactcgggttcaaggaaggggacatcataacccttaccaatcaaatcgacgagaactggtatgaggggatgttacatggtcactcagggtttttcccaatcaattacgtagagatcttagtggctctgccccattag

SEQ ID NO: 205014 - DNA, 1068 bp, synthetic construct
  misc_feature 1..1068: note = Description of Artificial Sequence: Synthetic coding sequence
  source 1..1068: mol_type = other DNA
atggacggcatcttcgccggcatcatctgcaaccaggccaaccggtgcttaacatggaccagccagcagttgttcagtgagaagatcagtggcgcagagggtacaaaactcgacgatgagttcttggatatggagcgcaagattgacgtcaccaacaaggtggtggctgagattctgtcaaagacaaccgagtacctccaacccaatcccgcatatagggcaaaactcgggatgttgaatacagtaagcaaaatccgcggccaggtgaaaaccacgggctacccacaaaccgagggtctgttaggcgattgcatgctcaaatacgggaaggaactcggggaagatagcactttcggaaacgctttgattgaggtgggagaaagcatgaagctgatggccgaggtgaaagactctctcgacatcaacgtgaaacagaccttcatcgatcccctccagcttctgcaagataaagacttgaaggaaatcggccaccacctcaagaagctggaagggcgacgtctggattacgattataagaagaaacgcgtgggaaagattcccgacgaagaggtgaggcaggcagttgagaagtttgaggagtctaaagagctggctgaaaggtctatgtttaattttctcgagaatgacgtggagcaagtgtcacagctcgctgtctttatcgaggccgccctcgactaccacaggcagtccacagagatcctccaggaactgcagagcaagttgcaaatgagaatctcagccgcatcttcggtccctcgccgcgaatacaaacccaggcccgtaaagcggtcttcctccgagctgaacggagttagcacgaccagcgtcgtcaagaccaccggctccaacattccaatggatcagccctgctgtagagggctttacgattttgaacccgagaatcagggggaactcggtttcaaagagggcgatattattacactcaccaatcagatcgatgagaattggtacgaaggtatgattcatggcgaatccgggtttttccccattaactacgtggaggtcatcgtgcccctcccccagtag

SEQ ID NO: 205015 - DNA, 1044 bp, synthetic construct
  misc_feature 1..1044: note = Description of Artificial Sequence: Synthetic coding sequence
  source 1..1044: mol_type = other DNA
atgagcgtggccggcctgaagaagcagttccacaaggccagccagttgttttcagaaaaaatcagtggcgccgaaggaactaagctggacgacgaattcctggacatggaaagaaaaatcgatgtgacaaacaaagtggtcgcagaaatcctgtccaagactaccgagtacctccagcctaatccggcttacagagccaaattgggaatgctgaacactgtgtctaagattcgaggccaggttaaaacaacgggctaccctcaaacagaaggactgctgggtgattgcatgcttaaatatggtaaggagttaggagaggattccacgtttggaaatgccctgatagaagtgggtgagtccatgaaacttatggccgaagttaaggactccctagatatcaacgtcaaacaaacattcattgatcctttgcagctgctgcaggacaaagacttgaaggagatcgggcaccatctgaaaaagctcgaggggaggcgtctcgactacgactacaagaagaaacgagtgggtaaaatccctgacgaggaagtgaggcaagctgtggaaaagtttgaagaatctaaagaactcgcagagcggagcatgttcaattttctggagaacgatgtcgagcaggtatctcagcttgctgtgttcattgaagcggcccttgattatcatcggcaatccacagaaatcctccaggaactccagtccaaactccagatgaggatcagcgctgcgagctcggtgcccagacgggagtacaaaccccgcccagtgaaaaggagctcgagcgaactcaatggagtctccaccaccagcgtggtgaagacaacagggtcaaacattccaatggaccagccttgttgtagagggctgtatgacttcgagccggagaatcagggggagctggggttcaaagagggcgacattatcactcttacaaaccaaatagacgagaactggtatgaaggtatgattcatggagagtctgggttcttccccattaattacgtggaagtgatagtacctctgccccagtag

SEQ ID NO: 205016 - DNA, 1068 bp, synthetic construct
  misc_feature 1..1068: note = Description of Artificial Sequence: Synthetic coding sequence
  source 1..1068: mol_type = other DNA
atggacggcatcttcgccggcatcatctgcaaccaggccaaccggtgtttgacgtggacatcccaacaactgttctccgaaaagatcagtggtgccgaaggaaccaagctggacgatgagttcctggatatggaaagaaagattgacgtgaccaataaggtggtggcggaaatcctgagcaagacaaccgagtacctgcagcctaatcctgcttatagggctaagctgggcatgctgaatacggtctccaaaataaggggccaagtgaagaccacaggctacccacagactgaggggctgcttggcgattgcatgctgaagtacgggaaagagctcggcgaagattcaacgttcggcaatgcacttattgaggtgggagaaagcatgaaattgatggctgaagtgaaagacagcctggatatcaacgtgaaacagacatttatcgatcccctgcagttgctgcaggataaggatttgaaggagatcggacatcacctgaagaaactcgaggggagaaggctcgactatgattataaaaagaagagggtgggcaagatccccgacgaggaagtgcggcaagcagtcgaaaagtttgaggaaagcaaagagctcgctgagaggtcgatgtttaacttcctggagaatgacgttgagcaggtgtctcaactcgccgtgtttattgaagccgcactagactatcaccgacagtctaccgagattcttcaggagctacagtcgaagctgcagatgcgcattagcgctgctagctccgtccctaggcgcgagtacaagccacgacccgtgaagcgcagtagctcggagttaaacggagtttccacaacctctgtggtaaagacaacggggagtaacatccccatggaccagccatgttgcagaggactttatgacttcgagcccgagaatcagggcgagttgggcttcaaagaaggcgatattatcaccctcacaaaccagatcgacgagaattggtatgaggggatgattcatggtgaaagcggatttttcccgattaattacgtcgaggtgatcgtcccattaccccagtag

SEQ ID NO: 205017 - DNA, 867 bp, synthetic construct
  misc_feature 1..867: note = Description of Artificial Sequence: Synthetic coding sequence
  source 1..867: mol_type = other DNA
atgagcgtggccggcctgaagaagcagttccacaaggccagccagctgttcagcgagaagatcagtggggcagaggggaccaaactggatgatgagttcctggatatggagcgaaaaattgacgttactaacaaggttgtggctgagattctgagcaagaccactgagtatctccagcccaacccagcctatcgtgcgaagctaggtatgttgaatactgtcagtaagatccgtggccaagttaagactactggataccctcagactgagggactgcttggagattgcatgcttaaatatggaaaagagcttggggaagattctacattcggaaacgctctgatcgaggtgggcgaaagtatgaaacttatggcagaggtgaaagattccttggacattaatgtcaaacagaccttcatcgatcccctacagttgttgcaggataaagacctgaaggaaattggacatcatctcaaaaaactggagggacgtaggctggactatgattataagaaaaaacgtgtcggcaagattcccgacgaagaagtacgccaggctgtggagaagttcgaggagtctaaagaacttgcagagcgatctatgtttaattttctcgagaatgacgtcgaacaggtgtctcaactggcagtatttattgaagcggccctcgactatcacagacagtctacagaaattcttcaagagctgcagtccaagttacagatgcggatcagtgctgcaagttccgtcccccgacgcgaatataagccgcgccctgtgaagagatccagcagcgaactgaatggcgtcagtaccacttccgtggtcaagaccacggcctacagcagattggaacctgccgattag

SEQ ID NO: 205018 - DNA, 1662 bp, synthetic construct
  misc_feature 1..1662: note = Description of Artificial Sequence: Synthetic coding sequence
  source 1..1662: mol_type = other DNA
atggtggaggccatcgtggagttcgactaccaggcccagcacgacgacgaactcaccatctctgtgggcgaaatcattactaacatccgcaaggaggacggagggtggtgggagggacagattaacggcagacggggcctgttcccagataacttcgtgagagaaattaaaaaagagatgaagaaggatccactcaccaacaaagctccggagaaaccacttcatgaggtgccctccgggaatagtctgctctccagtgaaactatcctgcggaccaacaagaggggagagagacgtagaagacggtgccaagttgcattctcatacctcccccaaaatgacgacgaattggagctgaaggtgggtgatatcattgaggtggttggcgaagtggaggaaggatggtgggagggggtactgaacggtaaaaccgggatgttcccaagtaacttcattaaggagttgtcaggtgagagtgatgagttggggatatcacaggatgagcagctgagcaagtcacgacccgaaggactcccgcccgcctcactactgccgtttcccgcacatggggctaaagggaagactacctttgaggggacaatcctgtatagagccgcccctggaaaaacagagggccaccgcagatattactccttgagggaaaccaccggtagcgagagtgacggcggcgattcctcatcgacaaaatcggaaggtgccaatggcacggtcgctacagctgccatacaaccaaaaaaagtgaagggcgtgggcttcggtgacatctttaaagacaaacccatcaaattgagacccagatctattgaggtggagaatgatttcctgcctgtggagaagacaattggcaagaaattacctgccaccactgcaaccccagactcatcgaaaaccgaaatggatagccgcaccaagagcaaagattactgcaaggtgatcttcccatacgaagcgcaaaatgatgacgagcttaccatcaaagaaggggacattgtaactttgataaataaagactgcatcgatgttggttggtgggagggtgagctgaatggcaggaggggtgtgttccctgataattttgttaaactgctgccgcccgattttgagaaggagggcaacaggcctaagaagcctcctcccccatccgcccctgtcatcaaacaaggggctggcacgaccgagaggaagcatgagattaaaaaaatccccccggaacgaccggagatgcttcccaatcgcaccgaggagaaggagagacctgagagagagcctaagctagacctgcagaagccctccgtccccgcgattcctccaaagaagcccagaccccccaagactaactccctatcaaggccgggagccttgccaccccgacggcccgaacgtcctgttggcccactcacccatacccgctattgctgtgccttaacctcaggggcaggcgtcggctggctctggaaggaacatagaaggggaaccgattgccaccggccttgggaagagggcagaggagaggggggcgcccaggccagtctgctccatcccccagctaaactgtccgaggatacaggacacttttgtccctgcagctgtacccaggctggagtctcagtgagacttagaggggccgtttgggtcagctag

SEQ ID NO: 205019 - DNA, 1887 bp, synthetic construct
  misc_feature 1..1887: note = Description of Artificial Sequence: Synthetic coding sequence
  source 1..1887: mol_type = other DNA
atggaggtgagcgccgccaaggcccccagcgccgccgacctgagcgaaatagagataaagaaagaaatgaagaaggatccccttactaacaaggcaccagagaagccactacacgaggtgccaagtggcaactctctgctcagttccgagacaatcctccgcactaacaagcggggagaaaggaggcgaaggaggtgccaggtcgccttctcctacttgccacaaaacgacgacgagttggaactcaaagtgggtgacattatcgaggtagtgggcgaagtggaggaaggatggtgggaaggagtgctgaatggcaaaaccgggatgttcccctccaattttatcaaggagctcagtggcgaatccgacgaacttggaatctcccaggatgaacagctgagcaagtcatcactgcgggaaaccactgggtccgaatccgacgggggggactcttcatcgacgaaaagcgagggcgcaaatggaaccgtggcaacagcagcgattcaaccaaagaaagtgaaaggtgttggtttcggcgacatcttcaaggataagccaattaaactgcggcccagaagcattgaggttgagaacgattttctaccagtagagaagacaatcggcaaaaaattgcctgcaacaacggccacacctgattcctctaagactgaaatggactcgcgaaccaagtcaaaagactattgtaaagttattttcccatacgaagcgcagaatgacgacgagcttactatcaaggagggtgatatcgtgactcttatcaataaagactgcatagacgtgggctggtgggagggagagcttaacggacgccgtggagtcttcccagacaatttcgttaaattgctccctccagactttgaaaaggagggtaatcggccaaagaagccaccccccccaagcgccccggtaatcaagcaaggcgccggcactactgagaggaaacacgaaatcaagaaaatcccacctgaaaggccggagatgctgccaaaccgcaccgaggaaaaggagcgacctgagagagaaccgaaactggacctccagaagccctctgtccccgccatcccccccaagaagccacgaccacccaaaaccaactctctgagccggccaggtgccctgccgccacgtaggcctgaacggcctgttgggcctctgacccacaccagaggggattcccctaagatagatcttgccggctcctccctctccgggattctcgataaggacttgagtgataggagcaacgacattgatcttgagggctttgatagtgttgtatcttctactgaaaagctaagtcatcctacaacttcccggccaaaggccactggcagaagaccgcctagccagtcactgacatcctcttccttgtcatcaccagacattttcgacagcccatctcctgaagaagataaggaagaacatataagcctcgcgcaccgtggtgtggatgcctccaaaaagacttcaaaaactgtgacaatttcccaggttagtgataacaaggcaagtctaccaccaaagccagggacaatggctgccgggggtggggggcctgctcccctctcgtcagctgccccaagtcctctctcgagcagcctgggcaccgccggccacagagcaaacagtccaagcctgtttgggactgaaggcaaacccaaaatggagccagccgcgtcgtcacaagccgccgtggaggaactcaggacccaggtgcgagagttgcggagtataatcgaaactatgaaggaccagcagaagagagaaataaagcagttgctctccgaacttgacgaggagaaaaaaattcgcctgagactccaaatggaggttaacgacatcaaaaaggccttacaatccaagtag

SEQ ID NO: 205020 - DNA, 1953 bp, synthetic construct
  misc_feature 1..1953: note = Description of Artificial Sequence: Synthetic coding sequence
  source 1..1953: mol_type = other DNA
atgaagaaggaccccctgaccaacaaggcccccgagaagcccctgcacgaggttccatccgggaactctctcctctcaagtgagaccatactccggaccaataagcgaggagaaaggagacgtcgcagatgccaagtggcctttagttacctaccacagaacgacgacgagctagagttgaaggtgggcgacataatcgaggtggtaggcgaggtggaggaaggatggtgggagggcgttctgaacggcaagacgggcatgtttccctctaactttatcaaggaactttccggggagtctgacgagctgggaattagtcaggatgaacaactgagcaagtcgaggcctgaggggctgcctccggcgtctttgctgccatttcccgcacacggtgctaaaggcaagaccacctttgagggcacaatcctgtaccgcgccgctcctgggaaaaccgagggacaccggagatactactccctgcgcgagactactggctctgagtccgatggtggggacagctcttcaaccaagagcgaaggtgctaacggtaccgtggcaacagcggccatacaacctaagaaagtcaagggcgtcgggttcggagatatatttaaagataagcccattaaactgagacctcgatctatcgaggttgagaatgacttcctccctgtggaaaaaacaatcgggaaaaagcttcccgctaccaccgcgacacctgattcttccaagactgagatggacagcaggactaagtcgaaagattactgtaaggtcatattcccctacgaggctcagaacgacgatgaactcactattaaggagggtgacatcgtgaccctgatcaacaaagattgtatagatgtcggctggtgggagggggagctcaatggaagacgcggcgtgttccccgacaatttcgttaaactcttacctccagattttgaaaaggaaggcaacagacccaaaaagcccccccccccttcagcacccgttatcaaacagggagctggaactactgagcgcaagcacgagattaagaaaattccacctgagcgccctgaaatgctgccgaaccgcactgaagagaaagaacgacctgaacgggagcccaaactggacctgcaaaagccttctgtacctgccatcccccccaaaaagccaaggcctccgaagactaacagcctgtccaggcccggtgcactgccacctagacgccctgaaaggccagtgggaccattaacccacacaagaggcgactcaccaaaaattgatctagccggatcgtcactgtcaggcattctcgacaaagacctgtctgataggtcgaacgacatagacctcgagggatttgatagcgttgtgagctctacagaaaagttatctcatccaaccacaagtcgaccaaaggccaccggacgcaggccaccaagccagagcttgacctcaagttctctaagctcgccagatatttttgacagtccctccccggaggaggataaggaggagcatatctctctggcccatcgaggtgtcgacgcctctaaaaaaacgtccaaaactgtgaccatctcacaggtgtccgacaacaaggcttcccttccacccaaaccgggtacaatggcggccggcgggggaggtcctgcacccctctcatccgccgcgccttcacccctcagctcctcactcggcacagccgggcacagagccaacagtcctagcttatttgggacggaaggcaagccaaaaatggagccagcggccagctcacaagccgctgtagaggaactgcgtactcaggtgcgtgaactgaggagtatcatcgagaccatgaaagatcagcagaaacgggagattaagcagctcttaagtgagttagacgaggaaaagaagataaggctacgcctccagatggaagtaaatgacataaaaaaggcacttcagtccaagtag

SEQ ID NO: 205021 - DNA, 1284 bp, synthetic construct
  misc_feature 1..1284: note = Description of Artificial Sequence: Synthetic coding sequence
  source 1..1284: mol_type = other DNA
atgggcgaggagaccatcggcaagaagctgcccgccaccaccgccacgccagactcaagcaagacggaaatggacagtcggaccaaatcgaaggattattgcaaggttatctttccttatgaagctcagaatgatgacgagcttactataaaggaaggagacatcgttaccttaattaataaagactgcattgatgtcggatggtgggaaggggagctcaacggcaggcgcggcgtcttcccagataatttcgtaaagctgctacccccggactttgagaaggaaggtaaccgaccaaagaaaccccctccccctagtgcacccgtcattaaacagggcgccgggactaccgagcgtaaacacgaaattaaaaaaattccacccgaaaggcccgagatgctgcccaatcgtaccgaagaaaaagaaaggccggaaagagagcctaagctggatctgcagaaaccctccgtcccagcaatccctcctaagaaacctagaccccccaaaacaaacagcctgagcaggcctggggccctacccccacgacggccggaacgacctgtcggacctctaactcacacgagaggggattcaccgaaaatcgacttggctgggagcagtttaagcggaatcctggataaggatctatccgatcgcagcaacgatatcgacctagaaggtttcgactccgtcgtgtccagtacagagaaactgtcgcaccctacaacttccaggcctaaggctaccgggcgtaggcctccatcacagtcactgacgagctcgagcctgagctcacccgatatttttgactccccaagcccagaagaggataaagaggaacacatctccttggcccatagaggggtcgatgcaagtaaaaagacatcaaagacagtgaccataagccaggtctccgataacaaagctagcctgccccccaagcccggaacaatggcagccggagggggcggccctgcacctttgagttcggccgccccctcccctttgagttcaagcttaggaactgccggacaccgcgctaacagccccagtctatttgggaccgaagggaaacccaagatggaaccagcagcttcttcccaggcagccgtggaggagctgcgaactcaggtgcgcgaactgagaagcatcatcgagactatgaaggaccagcagaagcgggaaatcaaacagcttctgtctgagttggacgaggaaaagaaaatccggctgagactccagatggaagttaatgatatcaagaaagctcttcagtccaaatag

SEQ ID NO: 205022 - DNA, 1938 bp, synthetic construct
  misc_feature 1..1938: note = Description of Artificial Sequence: Synthetic coding sequence
  source 1..1938: mol_type = other DNA
ctgaccaacaaggcccccgagaagcccctgcacgaggtgcccagcggtaatagcctgctgagtagtgagaccattttgagaaccaataagcggggagaaagacgaagacggagatgccaggtggcattcagttacctgccccaaaatgacgacgaactggaactgaaggtcggagacattatcgaagtagtaggcgaggtagaagaaggatggtgggaaggagtactgaatggcaagactggaatgtttccatccaactttataaaggagctgagtggtgagagtgacgagctcgggatttcccaagatgagcagctgtccaaaagccgtccagagggcctccctccagctagtctgctcccattccctgcccatggggctaaagggaagacgacctttgaaggtacaattctgtatcgggccgcccctggcaagacggagggccataggcgctactacagcctcagagagacgacaggtagcgagagcgacgggggcgactcgtcctccaccaaatctgaaggtgcgaacgggaccgttgccacagctgcaatccagccaaaaaaagtcaagggggtggggtttggtgatattttcaaagacaagcctatcaagctgaggcccagaagcattgaagtagagaacgatttcctccctgtcgagaaaaccattggcaaaaaattacccgccacaactgcgacacctgactcctcaaagaccgagatggactccaggaccaagagcaaggattattgtaaagtgatcttcccgtacgaagcccagaatgatgacgaactcactattaaggagggagacatcgtaactttgatcaataaagattgtatagatgtcggctggtgggagggtgagcttaatgggcgtcgcggggtattcccggacaatttcgtgaagttactacctccagatttcgagaaagaaggcaataggccaaaaaagcctccccctcctagcgctccggtgatcaagcagggagctggcactactgaacgcaaacatgaaatcaagaagattccaccggagagaccagagatgttgcccaataggaccgaagagaaggagaggcctgagagggagcccaagttagacctgcagaaaccatcggtgccagctattccaccaaagaagcctagaccacccaaaactaactccctatccaggcccggcgcactgcccccacgaaggccagagcgcccagtgggccctctaactcatacccgcggcgatagccccaaaatcgatctagcgggatcaagcctatctggcattcttgataaggatctgagtgatagatctaacgacatcgatctggagggctttgactccgtggtcagttccaccgagaagctgagtcatccaacaactagccgaccgaaagccaccggcagacggcctccttctcagagcctcacatcttcttccttatccagcccagacatcttcgactctccatcccccgaggaggataaggaagagcacatttccttagcccaccgcggagttgacgcatcaaaaaaaacaagtaagactgtcactatttctcaagtgagcgacaacaaagccagcctgcctccaaagcccggaaccatggccgcagggggtggcgggccagcacccctttctagcgcagcccccagcccgctttcttcgagtctcggcacagctggtcatcgcgccaacagtccaagcttgttcgggaccgagggaaagcccaagatggagcctgcggcctcatcgcaggccgctgtcgaggaactccgcactcaggtgcgcgagctacgatcaattattgaaaccatgaaggaccagcagaagagggagatcaaacagctgctgtcggagctcgatgaggagaagaagatacgactgaggttgcaaatggaagtcaacgacataaagaaggccctgcagtctaagtag

SEQ ID NO: 205023 - DNA, 450 bp, synthetic construct
  misc_feature 1..450: note = Description of Artificial Sequence: Synthetic coding sequence
  source 1..450: mol_type = other DNA
ttcgagaccagcgagcggcggcggcggcggtgccaggtggccttctcctacttaccccagaatgatgacgagctcgaactcaaggttggagacattatcgaagtggtaggcgaggttgaggaaggctggtgggaaggagtattaaatggaaaaacgggtatgtttccatcaaatttcatcaaagagctgtccggtgagagtgatgagctgggaatatcacaggacgagcagctgagcaaatcaagcctgcgcgagaccacgggaagcgaaagtgatgggggcgatagctcctcaaccaagagcgaaggggccaacggaacagtcgcaactgcagcgatccagccaaagaaagtcaaaggggttgggtttggtgacatcttcaaagataaacccattaaactccgcccgagatccatcgaagtggagaatgattttctcccagttgagtag

SEQ ID NO: 205024 - DNA, 1998 bp, synthetic construct
  misc_feature 1..1998: note = Description of Artificial Sequence: Synthetic coding sequence
  source 1..1998: mol_type = other DNA
atggtggaggccatcgtggagttcgactaccaggcccagcacgacgatgaattgaccatttctgtaggggagataattacaaacatccggaaagaagacggtggctggtgggaaggacagatcaacggtcgaaggggacttttccccgataacttcgtcagggaaattaagaaggaaatgaagaaagacccattgactaataaggccccagaaaaacctctgcacgaggtgccgtctgggaatagcctgctcagcagtgagacaattttgcgcactaacaagcggggtgagaggaggcggcgccgatgccaagtggcattttcctatctgcctcagaacgacgacgaactcgagcttaaagtgggcgatataattgaagtcgttggcgaggttgaagaagggtggtgggaaggggttttgaacggcaaaaccggaatgtttcctagcaattttatcaaggagctatcaggagagtctgacgagctggggatcagtcaggacgagcagttgagcaagagctctctcagagagactacagggagtgagtcagatggtggagattcctcgagtacaaaatcagagggggctaatggcacggtagctaccgccgccatccaacccaagaaagtgaaaggcgtaggatttggcgacatctttaaggacaagccaatcaaactgcgtcctcggtccatcgaagttgagaatgacttcctgcccgtagaaaagaccattggcaagaagctgcccgcaaccacagcgacaccagacagcagtaaaacagagatggactcccggactaaatcaaaagattactgtaaggttatcttcccatatgaggcgcaaaatgacgatgagctgactatcaaagaaggagacattgtgaccttaatcaacaaagactgtattgatgtgggttggtgggagggcgagttaaacggaagaagaggtgtttttcctgataacttcgtgaaacttcttccccctgactttgaaaaagaaggcaataggcctaaaaagccaccccccccgtccgctccggtgataaaacagggcgctggaaccaccgagcgaaaacatgagattaaaaagatacctcccgaaaggccagagatgttgccaaatagaacagaggagaaggaaagacctgaaagagagcctaagctggatctccagaagccgagtgttcccgctatccctcccaaaaagccacggcccccaaaaacaaacagcctgtcacggcccggagctctgccacctcggcgaccagaacgacccgtgggtcctcttacgcatacccgaggcgattctcctaagatcgacctggctggcagcagcctgtccgggatccttgataaagatcttagtgatagatcgaacgacatcgatctggagggctttgatagcgtggtctccagtaccgagaaactgtcccacccgacaacgtctcgccctaaagccaccggccggcggcctccctcacagagcttaacttccagctctttgagtagtcccgacatcttcgattcccctagtcccgaagaagacaaagaagagcacatttcccttgcccaccgcggcgtggacgcctcaaaaaagaccagtaagaccgtgacaatttcacaggtctccgacaacaaggccagcctgccccccaagccaggcactatggccgctggagggggcggacctgcgcccttatcatcagccgccccgagtccattgtcttccagcctcggcactgcgggccatagagccaattctcccagtttattcggtaccgaaggaaaaccaaagatggagcccgcggccagctcccaagctgccgttgaagaactcaggacgcaggtccgtgaactgcggagcatcattgaaacaatgaaggaccagcaaaagagagagattaagcagctgctgtctgaattggatgaggaaaaaaaaattcgccttagactccagatggaagtcaacgacattaaaaaggctcttcagagcaaatag

SEQ ID NO: 205025 - DNA, 450 bp, synthetic construct
  misc_feature 1..450: note = Description of Artificial Sequence: Synthetic coding sequence
  source 1..450: mol_type = other DNA
atggagcggagcgagcggcggcggcggcggtgccaggtggccttctcctatttgccacagaacgatgatgagttggagctgaaggttggtgacattatagaagtggtaggtgaggtcgaggaaggctggtgggagggagttctgaacggtaagacaggcatgttcccaagcaatttcattaaggagttatctggtgaatctgatgaactggggattagtcaggatgagcagcttagcaaaagttctcttcgggagaccaccggcagcgagtccgacggaggggatagttcgagcactaaaagtgagggcgccaacggcacggtagccacggccgccatccagcccaagaaggtgaagggcgtgggatttggtgatatcttcaaagacaaacctatcaagctgaggcccaggagtatcgaggtggagaacgatttcctgccagtagaatag

SEQ ID NO: 205026 - DNA, 627 bp, synthetic construct
  misc_feature 1..627: note = Description of Artificial Sequence: Synthetic coding sequence
  source 1..627: mol_type = other DNA
atggagatcaagaaggagatgaagaaggaccccctgaccaacaaggcacccgaaaaaccattgcatgaagtaccctccggcaactctctcctctcatcagagactatcctccgaacaaacaagagaggagagcgtaggcggcgaagatgccaggtggctttctcttatctgccccagaatgacgatgaactggagctcaaggtgggtgatattatcgaagtggtgggcgaggtggaggagggatggtgggaaggtgttctgaacggcaaaactgggatgtttccatcaaacttcattaaggagctgtccggagaaagcgacgagctaggtattagccaggatgagcaattatcgaaaagttccttgagagaaaccaccggaagcgaaagtgacgggggagactccagctccactaaatccgagggagccaatggaacagtagctactgctgccatccagccaaaaaaggttaagggtgttgggtttggggacatttttaaagataaaccaattaagctcaggccccgatccattgaggtagagaatgacttccttccagtcgagaagacaatcgggaagaagctgcctgctaccacagcaactcccgattcctccaagaccgagtag

SEQ ID NO: 205027 - DNA, 1215 bp, synthetic construct
  misc_feature 1..1215: note = Description of Artificial Sequence: Synthetic coding sequence
  source 1..1215: mol_type = other DNA
atggacagccggaccaagagcaaggactactgcaaggtgatcttcccttatgaggcccagaacgatgacgagcttactatcaaggaaggcgacatcgtgactctgattaacaaagactgtatcgacgtaggttggtgggaaggtgaactcaatggccggcgcggagtttttccggacaacttcgtgaaactgctgcctccggattttgagaaagaaggcaaccggcccaaaaaacccccccccccatcagccccagtgatcaaacagggcgctgggacgacagaaaggaaacatgagatcaagaaaattccaccagagcgcccagagatgctacccaatagaacagaagagaaggagcggcctgaacgcgagcccaagctggatctccagaaaccttccgtccctgccattccacccaaaaagccaagacctccaaaaactaattctctgagccgtcccggagcactccctccgaggaggcccgagcgccccgtgggtcccctgacacacacccgcggggattcgcctaaaattgacttagctggttcctcactatcaggaatccttgataaagatcttagcgaccgttcaaatgacatcgacctggaaggattcgattcagtcgtcagctctacagaaaaactttcccaccctaccacatcacgtcccaaggccaccggaaggcgcccgccatctcaatccctaacaagttcaagcctatctagccccgacatcttcgactcaccttctccagaagaggataaagaggaacacataagtctcgcccaccggggcgtggatgcctccaagaaaacaagcaagacagttacaatctcccaggtttctgataataaggcctccctgccaccaaaaccaggtaccatggcagccggcggggggggacccgcacctctctccagcgcagcgccaagtccactatcttcttcactgggcacggccgggcatcgggcaaactcgccatccctattcggtacggagggaaagcccaaaatggagcctgcggccagctctcaagccgctgtagaagaactgagaacccaggtacgagaattaagatccattattgagacaatgaaggatcagcagaagcgagaaattaaacagctgctgagcgagctcgacgaggaaaaaaagatcagactccggctccagatggaagtgaatgacatcaagaaggctctgcagagcaagtag

SEQ ID NO: 205028 - DNA, 456 bp, synthetic construct
  misc_feature 1..456: note = Description of Artificial Sequence: Synthetic coding sequence
  source 1..456: mol_type = other DNA
atgaactgggcccccgccacctgctgggccctgctgctggccgccgccttcctctgtgacagcggggcagcgaagggcggtcggggcggagccagaggatcagccagagggggggtcagaggaggggcacgcggggcaagccgagtgagagtgcgacccgcccagagatatggtgccccaggttctagcctccgcgtagcagccgccggcgccgccgccggggctgcagccggtgcagccgcgggtctggcagcaggtagtggttggcggcgcgctgctggtccaggcgaaagagggcttgaggatgaggaagacggcgtgcccggcggcaacgggaccggaccggggatttactcatatagggcgtggacctccggcgctggtcctacccgcgggcccagattatgtctggttctcggcggggccctgggcgccctcggcttacttagaccatag

SEQ ID NO: 205029 - DNA, 456 bp, synthetic construct
  misc_feature 1..456: note = Description of Artificial Sequence: Synthetic coding sequence
  source 1..456: mol_type = other DNA
atgaactgggcccccgccacctgctgggccctgctgctggccgccgcatttctgtgcgattcaggggcggcaaagggaggaagaggcggcgctcggggttcagcacgaggcggcgttagggggggtgccaggggcgctagccgtgtgcgcgtaagacctgcccaaagatacggggctccaggtagcagtctgcgggtggctgctgcaggcgctgccgcaggggcggccgctggggccgcagctggacttgctgcgggttccggctggcgaagagcagccggtcctggggagaggggcctggaggacgaggaagacggtgtgccaggaggaaatggaacaggtccgggaatatattcttaccgggcctggactagcggcgccgggccaacaagaggaccccggctgtgcctagtgctcggaggagcactgggcgctctgggactgctaaggccatag

SEQ ID NO: 205030 - DNA, 981 bp, synthetic construct
  misc_feature 1..981: note = Description of Artificial Sequence: Synthetic coding sequence
  source 1..981: mol_type = other DNA
atggccccccccgccggcggcgccgccgccgccgccagcgacctggggagcgcagctgttctcctggcggtacacgccgccgttcggcctttaggcgcagggccagacgccgaagctcagcttcgtaggttacagctcagcgcagaccccgagagacccgggagattcagactcgaactgctgggggccggacccggggctgtaaacttggaatggcctctcgaatccgtctcctatacaattcgcggtccaacgcagcatgaactgcaaccgccacctggcgggcccggaaccctttcgcttcactttttgaacccacaggaggctcaaagatgggccgttcttgtacgcggggccaccgtggaggggcagaacggatctaagtccaatagcccccccgcgttagggcctgaagcatgtcccgtgtcgctccctagcccacccgaagcttctactttgaagggaccaccccctgaagcagacttgcctcgctctcctggtaatcttacagaacgcgaagagcttgcagggagtctggcacgggccatagccggcggagacgagaagggggctgcacaggtcgctgcagtgctggctcagcatagagtcgcactatcagtgcagctgcaggaggcttgctttcccccaggacctataaggcttcaggtgactctcgaggacgcagcaagcgcggcttcagccgcctcatctgcacatgttgccttgcaggtgcacccacactgcacagttgctgcccttcaagagcaagttttttcagagctgggatttccccccgcggtgcaaaggtgggtgattggccgatgcttgtgcgtacccgagaggtccttagctagctacggggtgagacaggatggggacccggcattcctgtacctcttatctgctcccagggaggctcctgctcaactggtcctgagtttcctacacctgcaccagtgccctaggcccccttggctctag

SEQ ID NO: 205031 - DNA, 1164 bp, synthetic construct
  misc_feature 1..1164: note = Description of Artificial Sequence: Synthetic coding sequence
  source 1..1164: mol_type = other DNA
atggccccccccgccggcggcgccgccgccgccgccagcgacctgggttctgcagccgttttgttggcagtgcatgccgccgttcggcctttaggtgcaggccctgacgctgaagctcagttgcgccgcctgcagctgtcagccgatcctgagaggcccggccgattcaggctggaactgctgggggcaggtccgggcgctgtgaacctggagtggcccttagaatcagtttcctacaccatccgcggccccacacagcacgagctgcagcccccgcctggaggcccaggaaccttaagtctccactttctaaaccctcaagaggctcaaaggtgggcggtgctggtccggggcgccaccgtcgagggacagaacgggagcaagagcaatagccctcctgcgcttggacctgaggcttgtccagtttcattaccctcccctcccgaggcttcaacgctgaaggggccacctcccgaggccgatttaccgaggagtcccggcaatttgaccgaaagagaagagctggccgggagcctcgcccgcgccattgcaggcggtgatgaaaagggggccgcacaggtggccgctgtgcttgcacaacacagggtggctctgtccgttcagttgcaggaagcgtgcttccctccgggccctatcaggctgcaagtcaccttggaagatgccgcttctgctgctagcgctgcttcaagcgctcacgtggcccttcaggttcacccccattgcaccgtggcagcccttcaggagcaggtttttagcgaactgggattcccccctgcagtccaaaggtgggttatcgggcgatgtctgtgtgtccccgagagatctctggctagttacggtgtacgtcaggacggcgatcctgcattcctgtacttgttaagcgccccccgggaggctccggcgacaggccccagcccgcagcacccacagaagatggatggagagcttgggcgactgtttccccctagtctcggattgcctcccgggccacagcccgctgccagcagtctgcccagccccttgcagccctcctggtcgtgtccatcctgtacttttataaatgctcctgaccgcccaggctgtgagatgtgctccacacagagaccgtgcacatgggacccactggccgcggctagcacttag

SEQ ID NO: 205032 - DNA, 2019 bp, synthetic construct
  misc_feature 1..2019: note = Description of Artificial Sequence: Synthetic coding sequence
  source 1..2019: mol_type = other DNA
atggccgacggcagcctgaccggcggcggcctggaggccgccgccatggcgccagaaaggatggggtgggccgtggaacaagagttggcttcactggagaaggggctattccaggatgaagacagttgctcagactgctcgtatagggacaaacctggttcctccctccaaagcttcatgcctgaaggcaagactttcttcccagaaatcttccagaccaaccagctcctgttctacgagcgctttcgggcctaccaagactacatactggcggactgcaaagctagtgaagttcaggagttcacagcagagtttctcgaaaaggtgttagaaccttctggctggcgggccgtgtggcatactaatgttttcaaggtgctagtggaaataacagacgtagactttgcagctttaaaggcggtggtcagactggccgagccatatctctgtgattcccaggtctctacttttacgatggagtgtatgaaagaactacttgatctcaaggaacatcgcctgcctttgcaagagctgtgggtggtattcgatgacagcggcgtgttcgaccagacagcactggccatcgagcacgtcaggtttttctaccagaacatatggagatcatgggacgaggaggaggaagacgagtacgactattttgtaagatgcgtcgagccaaggctgcgcctgcactacgatatcttggaagacagggtcccaagcggcttaatcgtcgactaccacaaccttctgtctcaatgcgaagagtcctacagaaaattcctcaatctgaggtcctctttgagtaattgtaactccgatagtgaacaggagaatatctcaatggtggaaggattgaagctgtatagtgagatggagcagctcaagcagaaactgaagctgatcgagaaccctttgctgcgatacgtgtttggctaccagaaaaatagcaacatccaggcaaaaggagtcaggtcctctggccaaaaaataactcatgtggtcagttcgacaatgatggctgggctgttgaggagcctgttgacggaccgtctgtgtcaggaacctggggaagaggagagggagattcaattccactccgatcctctgtcggccatcaatgcttgctttgagggggacaccgtcatcgtgtgccccggacactatgtcgtacatggtaccttttcaattgccgactcaattgagctggagggctacggtttacctgatgatatcgtgatcgagaaaagagggaagggcgacacctttgtcgactgtactggagccgacataaaaattagtggcataaagtttgtgcaacacgatgccgtggagggtattctcatcgtgcacaggggcaagaccactctcgagaactgcgtgttgcaatgcgagaccaccggggtgacagtacgaacttcagccgaatttctgatgaaaaattcagatctctatggagccaagggagctggcattgagatatatccgggaagtcaatgcacgctgagcgataacggaatccatcactgtaaggaggggattctcatcaaggactttctggatgagcattatgatattcccaaaattagcatggtcaataatatcatccataacaatgagggatacggggtcgtcctcgtgaagccgactatcttttcagaccttcaggagaacgccgaagacgggaccgaagagaacaaggcgttgaagattcagacgtctggcgagcccgatgtggcagaaagggtggacctggaggagctcattgagtgcgctaccgggaagatggaactttgcgcacggacagatcccagtgagcaagtagaggggaattgtgagatcgtaaatgagctgattgctgcgagcacccaaaaaggtcagatcaagaaaaagaggctatccgagttgggcattacacaggccgacgacaacctcatgtctcaggagatgttcgttggcatagtgggcaaccagtttaagtggaatggaaaaggtagctttgggacatttctcttttag

SEQ ID NO: 205033 - DNA, 723 bp, synthetic construct
  misc_feature 1..723: note = Description of Artificial Sequence: Synthetic coding sequence
  source 1..723: mol_type = other DNA
atgaccgcccccgtgcccgccccccggatcctgctgcccctgctgctgcttttactgcttaccccccctcccggggctcgcggggaggtgtgtatggcctctcgggggctctccctcttccccgaatcctgccccgacttttgttgcgggacctgcgatgaccaatattgttgtagtgatgtactcaaaaaatttgtgtggtccgaggaacggtgtgccgtcccagaggcctctgttcctgcatctgtggagcctgttgaacagctcggatctgctctgcggtttagacccggttacaatgatccaatgagtggctttggcgccactttagccgtcgggctgacaatctttgttctgagcgtcgttactatcatcatttgctttacctgtagctgttgctgtctctataaaacttgccggcgcccgagacctgtggtgacaacaaccacaagcaccaccgtggtgcatgctccttatcctcagccacccagtgtcccacctagttaccccggcccatcttatcagggctaccataccatgcctccccagcctgggatgccagccgccccttatcctatgcagtatcctcctccttatcctgcgcaacccatggggccaccagcctaccacgagacactcgctggtggggctgccgccccgtatccagcctcccagcctccctataatcctgcttatatggatgcccccaaagctgcactctag

SEQ ID NO: 205034 - DNA, 339 bp, synthetic construct
  misc_feature 1..339: note = Description of Artificial Sequence: Synthetic coding sequence
  source 1..339: mol_type = other DNA
atggccagccggggcctgagcctgttccccgagagctgccccgacttctgttgcggcacttgtgacgatcagtactgctgctcagacgttctgaaaaaattcgtatggtccgaggaaaggtgcgcagtgccggaggcctcagtgccggcctcagtcgaaccggttgagcaactgggcagcgctctgcgatttcggcccgggtacaacgaccctatgtccggtttcggggccaccttggctgttggcttaaccattttcgtgctgagcgttgttaccataatcatttgcttcacgtgtagttgttgctgcttgtataagacctgtcgcaggccacgctag

SEQ ID NO: 205035 - DNA, 414 bp, synthetic construct
  misc_feature 1..414: note = Description of Artificial Sequence: Synthetic coding sequence
  source 1..414: mol_type = other DNA
atgggcttcggcgccaccctggccgtgggcctgaccatcttcgtgctttcggtggttaccattattatctgttttacttgcagctgttgttgcttatacaaaacctgtcgccgtccacgccccgtggtgactacaaccacttctaccactgtggtgcatgccccataccctcagcccccttccgtgccccccagctacccaggccccagctatcaaggctatcacacaatgccaccccaacccggtatgccggcagccccctatcccatgcagtacccccccccatacccggctcagcctatgggccctcctgcataccacgagacacttgcaggcggcgcagcagctccctatccggcttcacagccaccttacaatccagcctacatggacgccccaaaggctgcactgtag

SEQ ID NO: 205036 - DNA, 630 bp, synthetic construct
  misc_feature 1..630: note = Description of Artificial Sequence: Synthetic coding sequence
  source 1..630: mol_type = other DNA
atggccagccggggcctgagcctgttccccgagagctgccccgacttctgttgcgggacgtgtgacgatcaatactgttgttccgatgtgctgaaaaaattcgtctggtctgaggagagatgtgcggttcctgaggccagcgtccctgcttcagtcgaacccgtggagcaattgggatccgccctccgctttcggcctggatataatgaccccatgtcagggttcggggcaaccctcgcagtgggcctgacaattttcgtcctatccgtagtgactattattatatgttttacttgctcgtgctgctgcctctataaaacatgtcgtcgcccccgccccgtcgtgacgaccactactagtaccactgtcgtccacgctccatacccacagccccctagcgtgcccccatcctaccccggaccctcctatcagggttaccatacaatgccgccccagcctgggatgccggccgctccctatccaatgcagtaccctcctccctacccagcccagccgatgggccctcctgcgtaccacgagacgctggccggtggggccgctgccccgtaccctgcgtcacagccgccctataatcccgcctatatggatgctccaaaggcagctctttag

SEQ ID NO: 205037 - DNA, 630 bp, synthetic construct
  misc_feature 1..630: note = Description of Artificial Sequence: Synthetic coding sequence
  source 1..630: mol_type = other DNA
atggccagccggggcctgagcctgttccccgagagctgccccgacttttgctgcggaacttgtgacgatcagtattgctgctccgatgtgcttaagaaattcgtgtggtctgaggagagatgtgccgtacctgaagcaagcgttcccgcttccgttgaacctgtagaacagctgggctcagccctgcggtttcggcccggctacaatgacccaatgtctgggtttggtgctaccttagcagtgggtctcacaatctttgtgctgagcgttgtaaccataatcatttgctttacttgctcgtgctgctgcctatacaaaacgtgtcgaagaccgaggccagtcgtgacaaccacaacttctaccactgtcgtccacgctccttacccacagccccccagtgtgccgccttcatatcctgggccatcttatcaggggtatcatacaatgcccccacagcctgggatgcctgccgcaccctaccccatgcagtatcctcccccatatcctgctcaacccatgggtcctcccgcctatcatgagactctagccggcggggccgccgccccttacccagcctcacaacctccttacaacccagcatatatggacgcacctaaggccgccctctag

SEQ ID NO: 205038 - DNA, 513 bp, synthetic construct
  misc_feature 1..513: note = Description of Artificial Sequence: Synthetic coding sequence
  source 1..513: mol_type = other DNA
atgcccccccagcccggctgccagcagcaccccacccagtgcagcactcaccacctcacccagccctccccatgggcccataggcctaccacacggccgtggttagaggagcagcctaggccaactcctccggcatccctcttaacaacacgtccgacctggatgccccggggcgggcccttgtccatcccatggcccctctggcttccactcggctatgtagtctgtgttcgcgagtggtgtgccggggccgtgccatacgccccctgcgtcctgtgtgtcagctgcctctacatgtggctaccccttatgctcactcgttggggcactatcttggcccgcgtgggctgggaccagaccctgttttccagcagcccggagatcatgctgccaaaaatctcgtctcagacacaacgaatgggctggtggggggctccctgtgaagtggccccagaacgctggggcccccttcaagggacatctggggtactcctacagctgacactcggctag

SEQ ID NO: 205039 - DNA, 666 bp, synthetic construct
  misc_feature 1..666: note = Description of Artificial Sequence: Synthetic coding sequence
  source 1..666: mol_type = other DNA
atgcggcgggtgctgcggctgctgctgggctgcttcctgaccgagttgtgcgccagggtgtgccgcgctcaggagagggccggtcacgggcagctcgctcagctcgggggtgtactgttgctggcaggaggtaataggtccggcgccgcatctggcgaggcctcggagggtgctgaagcgtccgacgctccgccgacccgggcccctactccggacttctgccgtggatactttgatgttatgggacagtgggacccaccttttaattgctccagcggagattttatcttttgttgtggaacctgcgggtttcgcttctgctgtacatttaaaaagcgtagattaaatcagtcaacgtgcactaactatgacactcccctgtggctcaatacaggcaagccaccggcacgcaaggacgaccctctgcatgatcctactaaggataagactaacctaattgtgtatatcatttgcggagttgttgcagttatggtactggtgggaatctttacaaagctggggttggagaaggctcatcgcccacagcgagagcatatgtccagactctacgataatctactctttatggaagcccagatttccttccaggaggacgagcctgctcctggcgaatggagtgtggggcttcagacctggacagtatag

SEQ ID NO: 205040 - DNA, 1275 bp, synthetic construct
  misc_feature 1..1275: note = Description of Artificial Sequence: Synthetic coding sequence
  source 1..1275: mol_type = other DNA
atgcggcgggtgctgcggctgctgctgggctgcttcctgaccgagctgtgcgctcgggtttgcagagcacaagaacgggcaggccacgggcagttggcccagctggggggagtcctcctcctggccgggggtaatcgctccggggccgccagtggggaagctagcgaaggtgccgaggcttctgatgcaccgccaacgcgagcacctaccccagacttttgtcgcggttacttcgacgtaatgggacagtgggatcccccctttaactgttcatcgggggacttcattttctgctgcggtacctgcgggtttagattctgctgcacttttaaaaagcgccggctgaatcaaagcacatgcacaaactacgacaccccactgtggctgaatacaggaaaacctccagcccggaaggacgatcccctgcacgatcccacgaaggataagaccaatctcattgtctatatcatctgcggagttgtggcggtcatggtcctggtggggatcttcaccaagttgggactggagaaggcacaccggccccaaagagaacatatgtctagagctctggcagacgtgatgcgcccgcagggacactgtaataccgatcacatggaaagggacctgaacatcgtggtgcacgtccagcactacgaaaacatggatacgcgcacaccgatcaacaaccttcacgccacacagatgaacaatgccgtccctacttccccccttctgcagcagatgggccacccacactcctatcccaacctgggccagataagtaatccctatgaacagcagccaccggggaaggagcttaataaatatgcatcactgaaagctgtggggtcaagcgacggagattgggcagtgtcaactctgaagagcccgaaagctgacaaggtcaacgacgacttctacaccaaacgcagacatctcgccgaacttgccgctaaggggaacctcccccttcaccctgtgagagttgaagacgaacctcgagccttctctccagagcatggtccagctaagcagaatgggcaaaaatcccggaccaataagatgcccccccatcccctggcttacacgtctaccacgaacttcaaagggtgggacccaaatgagcagagtttgaggcgtcaggcttactcaaacaaaggaaagttgggcacggccgagaccggctcgtcggatcctctgggcacgagacctcagcattaccctcctcctcaaccctactttatcactaacagtaagaccgaagtaacagtatag

SEQ ID NO: 205041 - DNA, 789 bp, synthetic construct
  misc_feature 1..789: note = Description of Artificial Sequence: Synthetic coding sequence
  source 1..789: mol_type = other DNA
atgtgcggcccccggcggctggccgcccccggcagcagcctgggctccttcggaagggctagccggggaggccgaaggggctcttcaggcggtcgggcagcagagcccgggctgggagataccatgaggcgagtgttaagactgctgctggggtgctttctgacagaactctgcgcccgcgtgtgcagagcccaggagcgtgctggtcatggccaattagctcagcttgggggagtgctgctgcttgctggtggtaatcgctcaggagctgccagcggtgaggcctctgagggcgccgaagcctctgacgccccacctacaagagccccaacccctgacttctgccgaggctatttcgacgtgatgggccagtgggacccaccctttaactgttcgagcggagatttcatattctgttgcggtacctgcggattcaggttctgctgcaccttcaaaaagcgacgtcttaaccagtcgacttgcacgaattatgatacacctttgtggctcaatacgggcaaaccgcccgcaaggaaggacgaccccctccatgaccccacaaaagacaaaaccaatctcatcgtgtatatcatttgtggggtggttgcagtgatggtcctcgtcggtatctttacgaagctgggcctggaaaaagcccacaggcctcagagggaacatatgtcaaggctgtacgataatctgttatttatggaggcccagatttctttccaggaggacgaaccggcacccggtgaatggtccgttggtctccagacatggaccgtgtag

SEQ ID NO: 205042 - DNA, 1398 bp, synthetic construct
  misc_feature 1..1398: note = Description of Artificial Sequence: Synthetic coding sequence
  source 1..1398: mol_type = other DNA
atgtgcggcccccggcggctggccgcccccggcagcagcctgggcagctttggccgggcgagcaggggcggaaggcgcggctcgagcggaggccgcgccgccgaaccaggattaggtgatacgatgagacgagtgcttagacttctgctgggttgctttctgacggagctgtgtgcacgggtgtgtagagcacaggaacgggcaggtcacgggcagctcgcgcagcttggtggtgtcttgctgctggcgggagggaaccgcagcggggcggccagcggcgaggcaagtgagggcgcagaggccagtgacgcccccccaacgcgcgctcctacacctgacttttgcagaggttattttgacgtcatgggacaatgggatcccccatttaactgtagttctggagattttatattctgctgtggtacctgtggattccgcttctgctgtactttcaaaaagcggcgcctgaatcagtctacatgtactaactacgacacacccctgtggctgaacactggtaagcccccagcccgtaaggatgacccgcttcatgatccaaccaaggacaaaaccaacctgattgtttatattatttgtggagttgtagccgttatggtgctcgtcggaatctttactaagctggggcttgagaaagcgcaccgcccccaacgcgagcacatgagcagggcgctcgcagacgtgatgaggccccaaggacattgcaacaccgatcatatggagcgcgacctgaatatagtggtccatgtgcagcactatgagaacatggacaccagaacaccaattaacaacctccatgccacgcaaatgaataatgcagtgccaacctccccacttctccagcaaatggggcacccacacagctaccccaacctcggccagatcagcaatccatatgagcagcaaccaccaggaaaagaactcaacaagtacgcctctctcaaagctgttggctcctccgacggagattgggcagtttccaccctgaaaagcccaaaggccgataaggtcaatgacgatttctacactaagcgccggcaccttgccgaactcgcggctaagggcaacctcccactgcatcctgtcagagtagaggacgaaccgcgagctttctccccagagcacggcccagccaagcagaacgggcagaagtctcgcaccaacaaaatgcctccccacccactcgcttacaccagtaccaccaattttaagggatgggatcccaacgagcaaagtttgagacgacaggcatacagtaataaaggaaagcttgggacagcggaaaccggttcttctgaccctctggggaccaggccccagcactaccctcctccacagccgtacttcattaccaattcaaagactgaggttactgtctag

SEQ ID NO: 205043 - DNA, 678 bp, synthetic construct
  misc_feature 1..678: note = Description of Artificial Sequence: Synthetic coding sequence
  source 1..678: mol_type = other DNA
atggaggagctgaccgccttcgtgagcaagagcttcgaccagaagagcaaggatgggaacgggggtggcggcggaggaggggggaaaaaggatagcatcacctacagagaagtcctcgagagtggcctggcacgcagtagggaattgggtaccagtgactcctccctccaggacattacggaggggggaggccactgccctgtccatctgtttaaggaccatgtcgacaacgataaggagaagctgaaggaattcggcaccgccagagtggcggagggaatatacgagtgtaaggaaaagagagaagatgtgaaaagcgaggacgaggacgggcaaaccaagctaaaacagcgaaggagcagaaccaacttcacacttgaacagttgaacgaactcgagaggctttttgatgagacgcactaccctgatgccttcatgagagaagagctgtctcaacgcctggggctaagtgaggcccgcgtacaggtatggttccagaacagacgggctaagtgtagaaagcaggaaaaccaaatgcacaagggcgtaatcctggggaccgccaatcatctggatgcttgtcgtgtagccccctacgtgaatatgggggctctgcggatgcctttccagcaaatggagttttgcagttgccggcctggctggtcaattatggcctag

SEQ ID NO: 205044 - DNA, 678 bp, synthetic construct
  misc_feature 1..678: note = Description of Artificial Sequence: Synthetic coding sequence
  source 1..678: mol_type = other DNA
atggaggagctgaccgccttcgtgagcaagagcttcgaccagaagagcaaggatgggaacggggggggtggaggtggcggaggaaaaaaagattcaattacctaccgggaggtattagaatctggattagcaaggagccgtgagctgggcacttcagatagctccctccaggacatcactgaagggggtggccactgccccgtgcacctgtttaaagaccatgtggacaatgacaaggaaaagcttaaggagttcgggaccgctcgcgtcgccgaaggcatatacgagtgtaaagaaaagcgagaggatgtgaaatctgaagatgaagatggccagactaagctgaagcaacggaggtcccggaccaatttcacattggagcagttgaacgagctcgagcgactattcgatgaaacacattatccggatgcctttatgagggaggaattgtctcagcgcctggggctgagtgaggctagggttcaggtgtggtttcagaacagacgggccaaatgtcgcaagcaggaaaaccagatgcacaagggcgtgatcctgggcaccgcaaatcatctggacgcttgtcgggtcgctccttacgtaaatatgggggccctgcggatgcctttccagcagatggagttttgctcttgtcgcccaggctggtctatcatggcatag

SEQ ID NO: 205045 - DNA, 879 bp, synthetic construct
  misc_feature 1..879: note = Description of Artificial Sequence: Synthetic coding sequence
  source 1..879: mol_type = other DNA
atggaggagctgaccgccttcgtgagcaagagcttcgaccagaagtccaaagacggaaatggcggaggcggcggcggcggtggcaaaaaagactcaattacctatcgagaggtcctggagtccggcctggccaggtccagggagctggggacgtccgactctagcctccaagacattaccgagggggggggtcattgtccagttcatctgtttaaggaccatgtcgataacgataaggaaaaactgaaggaattcggcacggctagagtggccgaagggatttatgaatgcaaagaaaaacgggaagatgtgaagtcggaggacgaggatggacagacaaagctcaaacagagaagatctcgtacaaatttcacactagaacagctgaacgagctggaacggctatttgacgaaacccattatcctgacgcattcatgagggaggaactgagccaacgcttggggctctctgaggctcgggtgcaggtctggtttcagaacagaagagccaagtgcaggaaacaggaaaaccagatgcataagggggtaattctcgggaccgccaaccacttagacgcctgcagagtggctccctacgtgaatatgggcgccctgcggatgcccttccaacaggtgcaggcccagttgcagttggagggggttgcgcacgcacatccccatctccatccccacttagctgcccacgccccatacctcatgtttccccctcccccattcgggctgcccatcgcatcgcttgctgagagtgcctccgctgcggctgtggtcgcagccgccgcgaagagtaactcaaagaacagctcgatcgccgatcttcgccttaaagcccgaaagcatgccgaggccctcggactctag

SEQ ID NO: 205046 - DNA, 879 bp, synthetic construct
  misc_feature 1..879: note = Description of Artificial Sequence: Synthetic coding sequence
  source 1..879: mol_type = other DNA
atggaggagctgaccgccttcgtgagcaagagcttcgaccagaagtctaaggatggtaacgggggcggaggcggtggtgggggtaagaaggatagcataacgtatagggaagtcctcgaatccggcctggccaggagccgcgagctgggtacatccgattcttccctgcaggacattacagagggagggggacactgccccgtgcacttattcaaggaccatgtagacaacgataaggagaaactgaaagagtttggcacagcacgagtagcagaaggcatttacgaatgcaaagagaaacgagaagacgtcaaaagcgaggacgaggacgggcagactaagctgaaacaacgccggtctagaaccaattttactctggagcagttaaacgagctcgaaaggctgttcgacgaaacccactatcctgacgccttcatgcgggaggagctgtctcaacggctcggattgtccgaagccagggttcaggtgtggttccagaaccgccgcgccaaatgtagaaagcaggagaaccagatgcataaaggggtcatcctgggcacggcgaaccacttggatgcctgcagagtcgccccttacgtgaatatgggggcactgcgcatgcctttccaacaggtccaagcccagttacagcttgagggagtagcgcacgctcacccccatctgcaccctcatctggctgctcatgcaccatatctcatgttccctcctcccccctttggacttccaatagcctcactggcagaatctgcttccgccgctgctgtggtggccgcggccgccaagtccaacagcaaaaactccagcatcgccgacctgaggctgaaggctcggaaacacgccgaagcacttgggctctag

SEQ ID NO: 205047 - DNA, 573 bp, synthetic construct
  misc_feature 1..573: note = Description of Artificial Sequence: Synthetic coding sequence
  source 1..573: mol_type = other DNA
atggaggacgagggccagaccaagatcaagcagcggcggagccggactaatttcactctcgagcaattgaatgaactagaacggcttttcgatgaaacacactacccagacgcctttatgagggaagagctctctcagcgtttaggtctgtctgaggcgcgcgtgcaggtatggttccagaataggagggccaagtgccggaagcaggaaaatcagctccacaaaggggtgcttattggtgccgcctcacagttcgaagcctgccgcgtggctccatacgtgaatgtgggagctttgcgcatgccattccaacaggtgcaggcccaactgcagcttgattccgcagtggctcatgcgcaccatcatttacatccacatttagctgcccacgcaccctatatgatgttcccggcaccgccttttgggctgcctctggccacgttggccgctgactcagcaagtgccgccagtgtcgttgccgcagccgctgctgcaaagactactagcaagaactccagtattgcagacctgagactgaaagcaaaaaagcacgccgccgcgctggggctctag

SEQ ID NO: 205048 - DNA, 996 bp, synthetic construct
  misc_feature 1..996: note = Description of Artificial Sequence: Synthetic coding sequence
  source 1..996: mol_type = other DNA
atggaggagctgaccgccttcgtgagcaagagcttcgaccagaaggtaaaggagaagaaggaggcaattacgtaccgcgaggttctggagtctggccccctacgaggggccaaggagccaaccggttgcaccgaagccggtagggacgacagaagttcacccgccgttagagcagcgggcggtggagggggagggggtggtggtggtggcggaggtggcggggggggcggagtgggcggaggcggggccggtggcggggccggaggcgggcggtcaccggtgcgggaactcgatatgggggcggctgagcggagtagagaaccaggttcccctagactgacagaggtatctcctgagctgaaggacagaaaagaggatgcaaagggcatggaagacgagggacagactaaaattaagcagcgcagaagccgcacgaatttcaccctcgaacagctgaacgaactggagcgtctgttcgatgagacgcactatccagacgcgtttatgcgggaagagctttcacaacgtcttggcctcagcgaagctcgggtacaggtctggtttcagaaccggagagcaaagtgtcgcaaacaagagaaccagcttcataagggcgtactaataggggcggcctcccagtttgaggcctgtcgggtggctccgtatgtgaacgtgggagccctgaggatgccattccagcaggattcacattgcaatgttacacctctgagctttcaggtccaggcccagcttcagcttgattctgcagtggcgcatgcccatcatcatctgcacccacatcttgccgctcacgcaccctatatgatgttccccgccccgcctttcgggctgcccttagctaccctagcagcagatagtgcttctgccgcatcggtggtggcggctgccgctgctgccaagaccacatctaaaaatagttctatagccgacttgaggctgaaggcgaagaagcatgctgcagcactggggctgtag

SEQ ID NO: 205049 - DNA, 1068 bp, synthetic construct
  misc_feature 1..1068: note = Description of Artificial Sequence: Synthetic coding sequence
  source 1..1068: mol_type = other DNA
atggaggagctgaccgccttcgtgagcaagagcttcgaccagaaggtgaaagaaaagaaggaagctatcacttaccgtgaggtcctggagtctggccccctgaggggagccaaggaaccaactggctgcaccgaggccggcagggatgaccggagcagccctgctgtgagggccgctggtggaggcggtggcggagggggcggggggggcgggggaggtggaggaggaggggtgggcggcgggggagctggaggtggcgcaggaggaggccgcagtccagtgcgtgaactcgacatgggtgcggcggaacgaagccgcgagcctggaagccccaggcttaccgaaggcagaaggaaaccaaccaaggccgaagtgcaggccactctgttactcccaggcgaagcttttcgcttcctggtctcccctgaacttaaggaccgaaaggaggatgcaaaggggatggaggatgaggggcagactaagatcaagcagaggagaagtcggacaaattttaccctcgaacaactgaatgaattagagcgcctgtttgacgagacacattacccggacgcattcatgcgagaagaattgtcacaaagactgggactatccgaagcccgcgtacaagtctggtttcagaataggagagccaaatgtagaaaacaagaaaaccagttacacaagggcgtgctcattggcgcagcctcgcagtttgaggcctgtagagtcgccccctacgtgaacgtcggagctctgcggatgccattccagcaggattcacactgcaacgtgacacctctgtcctttcaggtccaggctcagctgcaattagatagtgctgtggcacatgcacatcatcacctgcacccacacctggccgcccacgcaccgtacatgatgttccctgcgcccccattcggactgcctctggctacgctcgcagcagactctgcaagtgctgcatccgtcgtggctgccgccgccgccgcaaaaactacatcgaagaactcttcaatcgccgacttgagactgaaggcaaaaaaacacgccgctgccctcggtctgtag

SEQ ID NO: 205050 - DNA, 573 bp, synthetic construct
  misc_feature 1..573: note = Description of Artificial Sequence: Synthetic coding sequence
  source 1..573: mol_type = other DNA
atggaggacgagggccagaccaagatcaagcagcggcggagccggactaactttacactcgagcagttaaatgaactggagcgactgtttgatgaaacacattaccctgacgcttttatgcgagaagaactgagccagaggctgggcctgagtgaggcacgcgtgcaagtgtggttccagaaccgtagggctaagtgtcggaaacaggagaatcagcttcataagggcgtgctgatcggcgcagcctcacagttcgaggcttgtcgggtcgcaccttatgtgaatgtcggagcactccggatgccttttcagcaggttcaggcacaactccagctagactctgccgtggcccacgcgcaccaccacctgcatcctcacctcgcggcccacgctccctatatgatgttcccagcacccccgtttggcttgccactagctacccttgcagctgatagtgccagcgccgcctcagtggtggctgccgccgcggcggccaagacaacgtctaagaactctagtatagcggatctcagattaaaggccaagaagcatgccgccgccctggggctctag

SEQ ID NO: 205051 - DNA, 573 bp, synthetic construct
  misc_feature 1..573: note = Description of Artificial Sequence: Synthetic coding sequence
  source 1..573: mol_type = other DNA
atggaggacgagggccagaccaagatcaagcagcggcggagccggactaactttaccctcgagcagctgaacgagcttgagcgtctgttcgacgagacacactatccagacgcttttatgagagaagaactgtcgcaacgcctcggcttaagcgaggctcgagttcaggtttggtttcagaaccggcgagcaaagtgtagaaaacaggaaaaccagctccacaagggcgttctaatcggcgcagcctctcagtttgaggcatgcagagtcgctccctacgtgaatgtcggcgcactgagaatgccttttcagcaagtccaagctcagctgcagctcgattcagctgtggcccacgctcatcaccacctgcacccacatcttgccgcgcatgctccatatatgatgttcccggcccccccattcggattgcccctggccaccctggcggcggatagcgctagcgccgcgtctgtggtggctgccgctgcagcagctaagactacaagcaaaaatagctctatcgcggatttgcggctgaaggcaaagaaacacgctgcagcattgggactgtag

SEQ ID NO: 205052 - DNA, 1734 bp, synthetic construct
  misc_feature 1..1734: note = Description of Artificial Sequence: Synthetic coding sequence
  source 1..1734: mol_type = other DNA
atgctgacccccgccttcgacctgagccaggaccccgacttcctgacgatcgccataagggtgccctacgctagagtctcagagtttgatgtgtacttcgaagggtcagacttcaagttttacgcaaagccttattttcttcgcctgaccctgcctggtagaattgttgaaaatggttccgagcaggggtcctatgatgctgataagggtatcttcaccattaggctccctaaggagactcccggtcagcacttcgagggattaaacatgctgaccgcgctcctggccccaagaaagtctaggacagcaaaacctctggtggaagagattggcgctagcgagattcccgaagaagtcgtagacgatgaagaatttgactgggaaattgaacagactccctgtgaagaggtctcagagtccgctttaaacccacagtgtcattatggctttggcaatcttaggtccggggtgcttcagaggttgcaggatgaactgtcagatgttatcgacattaaggacccagactttacacctgcagcggagcggcgacagaagaggttggctgcagagcttgccaagtttgaccctgatcactacctggccgacttcttcgaggacgaagccatcgagcagatattgaagtataatccttggtggactgacaaatacagtaaaatgatggcgttcctagagaaaagccaggagcaggagaaccacgccaccttggtgtcattttccgaggaagagaaatatcaacttagaaagtttgtgaataagagttatctgcttgataagagggcctgcaggcaggtctgttactccttaatcgacatcctgctggcctattgttatgaaactagggtgacagagggagagaagaatgttgaatcagcctggaacatcaggaaattaagcccaactctgtgctggtttgagacctggactaatgtccatgatatcatggtgtctttcgggcgaagagtgttgtgctatcctctgtataggcatttcaagctcgttatgaaggcctatagggacacaattaaaatcctacagttgggaaagagcgccgtgctcaagtgcctgctggatattcacaaaatcttccaagagaatgatcctgcttacattctgaatgacttatatatttccgattactgcgtctggattcaaaaagtgaagtctaaaaagctggcagctctcgctgaggccctgaaagaggtgtccctgactaaagcccagctgggacttgaacttgaggagctggaggctgccgctctcctggttcaggaagaggagacggccctcaaggctgctcacagcgtcagtggtcaacaaacgctatgctctagcagcgaagctagtgattcagaagactcggattccagcgtctcgagtgggaatgaggatagtggctccgattccgagcaggatgagctgaaagactcaccgtccgagaccgttagctccctccagggcccttttctggaggagagctccgctttcctgatagtcgacggtggcgtacgccgaaataccgccatccaagaatcagacgcttctcagggtaagccccttgctagcagctggcctcttggagttagcggccctctgatcgaggaactgggggagcaactgaagacaacggttcaggttagcgagcctaagggcacaactgccgttaataggtctaatattcaagaaagggatggctgccaaaccccaaacaactag

SEQ ID NO: 205053 - DNA, 4851 bp, synthetic construct
  misc_feature 1..4851: note = Description of Artificial Sequence: Synthetic coding sequence
  source 1..4851: mol_type = other DNA
atggagggcgccgagccccgggcccggcccgagcggctggccgaggctgagacgcgcgccgctgacgggggccggctggtggaggtgcagttgtctggaggtgctccctggggttttactctgaaaggcggacgggagcacggagaaccgctggtaatcaccaagatcgaggaagggagcaaggcggccgcggtcgataagttattggcaggcgacgagatcgtggggataaacgatataggcctgagcggtttccgtcaagaggctatttgcctggtgaaaggaagccacaaaaccctgaaactggtagtcaaacggcggtctgagctcggttggagaccacattcctggcacgccaccaaattttcagactctcatcctgaattggcggccagtccattcaccagcacatccggatgcccatcttggtctgggaggcatcatgcgagcagctcttcgcacgatctgtcatctagctgggaacagacaaatttacagaggacacttgaccacttctccagcctcggaagcgtggacagtctggaccacccctccagcagactgtcggtagccaaaagcaactccagcatcgaccacctgggaagccatagcaaacgggatagtgcgtatggaagcttttcaacctcatcaagcacccctgaccacacattgtctaaggcagacacctcgagcgccgaaaatatcttatacactgtcgggctgtgggaggcaccacgacagggggggcgccaggctcaggcggcgggggacccacaggggtccgaagagaagctcagctgctttccacccagagtgcccggggactccggtaaaggaccacgccctgagtataacgcggagcctaagcttgcggctccaggtcgctccaacttcgggcccgtttggtatgtacccgacaagaaaaaggccccaagcagccctccaccccctcccccgccacttagatcagattcatttgccgccactaagagtcatgagaaggcccaggggccggtgtttagtgaggccgctgccgctcagcatttcactgcgttggcccaggctcaaccaagaggggaccgccggcccgaactcaccgaccggccctggcggagcgcccacccaggaagcttgggtaagggctctggggggccaggctgcccccaggaggctcacgccgatggtagctggcctccgtctaaggacggtgcgagcagccgacttcaagcgtcgctcagtagcagcgatgtgcgcttcccacaaagcccacactctggccgtcatcctcctttgtacagtgatcacagcccgctgtgcgcggactccctcggacaagaacctggtgctgcgagcttccagaatgactcccctccccaggtccggggactaagctcatgtgaccaaaaattggggagtggttggcagggcccaagaccttgcgtccagggtgatttgcaggcggcccagctctgggctgggtgttggccatctgataccgcactgggagcactggaaagcctgccccctcctacagtcggacagtccccccgccaccacctgcctcagcctgaaggaccgcccgacgctcgcgagactggtagatgctatcccctggataagggcgctgaagggtgtagcgctggcgcccaggagccccctcgtgccagtcgagccgagaaagcatctcagcgacttgccgcctccattacctgggccgacggcgagtcatcacgcatttgcccacaggagacccccttactccatagcctgacccaggaaggaaaacggcgccccgagtctagtcccgaagattccgccacacgtcctcctcccttcgatgctcacgtcggaaagcccacgcgccgcagtgaccggtttgctacgactcttagaaatgaaattcaaatgcaccgcgccaagctgcagaagtctagatctacagtcgccctgacagccgcgggtgaggcagaagacggaactgggcgctggagggccgggctgggtgggggcacacaggagggccctcttgccggaacctacaaagatcatctaaaagaagctcaagctcgggtacttcgagcaacgagctttaagcgccgtgatcttgaccccaatcctggtgacctttacccggagagtttggaacacaggatgggcgaccctgataccgtgccacatttctgggaagcagggcttgcacagccaccatcatcaacaagcggcggccctcacccaccacgcatcggaggacgacggcggtttacagccgaacagaagctaaaaagctactccgaacccgaaaagatgaacgaggtcggcctgactcgtgggtacagtccccaccaacaccctaggacgagtgaagatacagttgggacattcgcagaccggtggaaattcttcgaggaaacctccaagcccgtgccacaacgcccagctcaaaagcaggccctgcatggtattcctcgcgataagcctgagagaccccggactgcgggaaggacctgcgaggggacagaaccgtggagcagaactaccagtttgggcgattcattaaatgcacactccgcagccgagaaggccgggacctctgatcttcctagaagactgggaacattcgcagaatatcaggcctcctggaaagagcagagaaagccactcgaggctcgctcaagcggcagatgccattcggctgacgacatcttggatgtgtcccttgatccacaagagagaccccagcacgtgcacggcaggagccggtcatcccctagtacggatcactacaagcaggaggcaagtgttgagctacgacgccaggctggagaccccggcgagccccgcgaggaactgcctagtgctgtaagggcagaggagggccagtcgacccccaggcaagctgacgcccagtgtcgtgaggggtctcctggatcccaacagcacccaccttcacagaaggcccctaatccgcctaccttttctgagctgagccattgcaggggagcacctgagctgcctcgcgagggacgagggcgagctggcaccctgccacgcgattatcggtactccgaggaatcaaccccagcggatctcggacctagggcccagtctcctggttctcccctgcatgcccggggccaagattcatggcctgtgtcaagtgcattgttgagcaaacgtccggctccacagagaccccctcccccaaagcgagaacccagacggtaccgagccactgacggggcaccagcggatgctcccgtgggtgtgctggggcgccccttcccaacaccatcccctgcttctctggacgtttacgtagccagactgtcactgtcgcactctccctctgttttcagtagcgcacagccacaagacacaccgaaggcgaccgtatgcgaacgcggctcccaacacgtttctggtgatgcctcccgacctttacctgaagccctgctcccccctaaacaacagcatcttaggcttcaaaccgccactatggagacctcacggtcccctagcccacagttcgccccacagaagctcacagataagccgcccctcctcatccaggacgaggattctactcggattgagcgcgtgatggacaataataccacagtgaaaatggtgccaatcaaaatcgtccattcagaaagtcagccagaaaaagaaagtcggcaatccctggcgtgccctgccgagcccccagctctccctcacggtctagaaaaggaccaaatcaagacactctcaacctccgaacagttttattctcggttctgtctgtatacaagacaaggagctgagccggaggccccccacagagcccagcccgctgagcctcagccacttggtacacaggtgcctcccgagaaagaccgctgtacatcccctcctggcttaagctacatgaaagctaaggagaaaactgtggaagacctcaagagtgaggaattggctagagagatcgtgggaaaggacaaaagcctggccgacatcttagacccttctgtgaaaatcaaaaccaccatggacctgatggagggaatctttccaaaggacgagcacctgctggaggaggcgcagcagcgtcgaaagcttctgcctaaaataccttctccccggagcacggaggaacggaaggaagagcccagcgttcccgccgccgtatcattagcaacgaacagcacttattactccacaagtgccccaaaggcggagcttctgattaagatgaaagacctgcaggagcagcaggagcatgaagaggattctggtagcgatctggatcacgatctgtctgtgaagaagcaggagctgatcgagagcatctctcgcaagttgcaggtactgagagaggctagggagagtctactggaagacgtgcaagcaaacaccgttttgggtgccgaggtggaggcaattgtcaagggcgtctgcaaaccttctgagttcgacaaattcaggatgtttatcggtgatctggacaaagtggtaaatctgcttctgtccctcagtggaagattggcacgtgttgagaatgcactgaataacctggacgatggcgcaagtccaggagaccggcaatctctgctcgagaagcaacgcgtgctcatccagcaacacgaagatgcaaaggagctcaaggagaatctggatcgtcgcgagagaatagtgttcgatatattagcaaattacctgtccgaggaatcactagcagactatgagcatttcgtcaaaatgaagagtgcgctgataatcgaacagcgggagctcgaggataagatccacctgggcgaggagcagctcaagtgtctccttgactccttacagcctgagcgtggcaagtag

SEQ ID NO: 205054 - DNA, 1356 bp, synthetic construct
  misc_feature 1..1356: note = Description of Artificial Sequence: Synthetic coding sequence
  source 1..1356: mol_type = other DNA
atggagaccagccggagccccagcccccagttcgccccccagaagttaactgacaaacctcctttgctgattcaggatgaagactcaacgaggatcgaaagggtaatggacaataacacaacagtgaagatggtgcccatcaaaattgttcactctgaatcccagccggagaaggagagtcgacagagtctagcctgccctgcggagccgccagccctgccacacggcctcgagaaagatcagataaaaaccttatcaacttcggagcaattttattcgcgtttttgtctctacaccaggcagggcgctgagcccgaggcgccacacagagcccagcccgccgaacctcagcctttaggcacacaggttcctcccgagaaagacaggtgcactagccctccaggtctgtcctatatgaaagctaaggaaaaaaccgtggaagatctcaagtccgaggagctggctcgggagatcgtgggtaaggacaaatctcttgctgatattctggacccttctgtgaagattaaaaccacaatggaccttatggagggtatttttcctaaggacgagcatcttttggaggaggcccagcagaggcgaaagctgctccctaagattccgagcccgcgatccactgaggaaaggaaggaagaaccttctgtgcccgccgctgtatcactggccacaaactccacctactatagcacttcagcccccaaggccgagctgctcatcaaaatgaaagatctccaggaacagcaggaacacgaagaagactccggcagcgatctggatcatgacctaagcgttaagaagcaggaattgatcgaatcaatcagtcgaaagctgcaggtcttaagagaagcaagggagtccctcctcgaggacgtccaggccaataccgttctcggagcagaggtcgaggccattgtgaagggggtgtgtaaaccctctgaatttgacaagtttcgcatgtttattggggatctcgataaggtggtgaacctcctcctgtcactgtccgggagacttgctcgggtggagaatgcgctgaataatctcgacgacggcgcatcacctggagacagacagagcctcctggagaagcagcgggtcctgatccaacagcacgaggacgctaaagagcttaaggaaaacctagaccgcagggagaggattgtgttcgatatcctggccaactacctcagcgaggaaagcctcgccgattacgaacactttgttaagatgaaaagcgccctgattatcgagcagcgggagctggaagataagatacatcttggggaagagcagctgaaatgcttgctggactcattacagcccgagcgcggaaagtag

SEQ ID NO: 205055 - DNA, 1128 bp, synthetic construct
  misc_feature 1..1128: note = Description of Artificial Sequence: Synthetic coding sequence
  source 1..1128: mol_type = other DNA
atggagaccagccggagccccagcccccagttcgccccccagaagcttacagacaagccccctctgctgatccaggacgaagatagcactcgcattgagagggtcatggacaacaatacaacagtgaagatggtgcctattaagattgtgcatagtgagtcgcagcccgagaaagagtctagacagagcctggcctgcccagccgaaccccctgcactgccccacggcctggagaaagatcaaataaagaccctgtctacttcagagcagttctattccagattttgtctgtacacccggcagggagcagagcccgaggcaccccaccgggcacaacccgccgaaccccagcccctcggtacccaggtcccgcccgagaaggacagatgtacctctccgccagggctgtcatacatgaaagcaaaggagaagactgtggaggatctgaagagcgaggagttggcgcgcgaaatcgttgggaaggataagtctctggccgatattttagatccttctgtcaaaatcaagacaaccatggatctcatggagggtatcttcccaaaagacgaacacctgctcgaggaggctcagcagagaagaaaactattacccaagataccatccccacgatctactgaggagcgcaaggaagagccctccgtgccagcagcagtctcacttgcaaccaattcaacctattacagcacttctgcgccaaaagccgaactgctcatcaagatgaaggatcttcaggaacaacaggagcacgaggaggactcaggctcagacctggatcacgacttgtcagtcaaaaaacaggagctgatagagagcatatcccggaaacttcaggtcttaagggaagcgagagaaagtctgctggaagatgtgcaggcaaacacagttcttggtgccgaggtcgaagcaatcgtgaaaggagtttgcaagccatccgaattcgataaatttcgaatgtttattggggacctggataaagtcgtgaacttgctcctttcactgtcggggaggctggccagagttgagaatgctctgaacaacttggacgatggcgccagcccaggggacagacagagtctcctagagaaacaaagagtgttgatacaatag

SEQ ID NO: 205056 - DNA, 1203 bp, synthetic construct
  misc_feature 1..1203: note = Description of Artificial Sequence: Synthetic coding sequence
  source 1..1203: mol_type = other DNA
atggagaccagccggagccccagcccccagttcgccccccagaagctgaccgataagccccctctcctgatccaggacgaagattccacaagaatcgaaagagtcatggataacaataccactgtgaagatggtgcccatcaaaatagtgcactctgagtcgcagccagagaaggaaagtcgccagtctctagcttgcccggctgagccacccgccctaccgcacggactggagaaagatcaaattaaaacactatcaacgtccgagcagttttacagccgcttctgcctctacacaaggcagggggctgagcccgaggcccctcacagggcccagccagcagaaccacagcccctgggcactcaggtgccacctgaaaaggatcgctgtacttctcctcccggattaagctatatgaaagcgaaggaaaagacggtggaggatctgaaatccgaagaacttgccagagaaattgttggcaaggataagtcactggctgatatactagatcctagcgtcaaaatcaaaacaacaatggatttgatggagggcatctttcccaaggatgagcacctgttagaagaggcacagcaaaggaggaagctcttgccaaaaatcccctcacctaggtccacagaagagagaaaagaggaaccttctgtaccagccgccgtgtcactggccaccaattccacttactacagtacctccgcccctaaggccgaactgctcattaagatgaaagacttacaggagcagcaggagcatgaggaggatagtggcagcgacttagaccatgatctcagcgttaagaagcaggaactcatcgagagtatctccagaaagctgcaggttttgagagaggcgagggagagcctactggaggatgtgcaggcaaatacggtgctaggagctgaagtggaggccatagtgaaaggtgtgtgtaaaccttccgaatttgataagtttcgaatgtttattggcgacctggacaaggttgtcaacctgctgctcagtttgtctggacgcctcgctagggtggaaaacgccctgaataacctcgatgacggagcctcccccggggaccgtcagtcattgcttgaaaagcagcgggtgctcattcagcagatgtgcgtagattttatgctcgatacgtatcatagcccgatcaacagaagctcgtgtctgaccgttacaaaatag

SEQ ID NO: 205057 - DNA, 777 bp, synthetic construct
  misc_feature 1..777: note = Description of Artificial Sequence: Synthetic coding sequence
  source 1..777: mol_type = other DNA
atgcgggagcgggccccccccccccccccccccagccaggagacccccgtatacagtatggatgattttccacctcctcctccgcatacagtgtgcgaggcacagctagattctgaggatccagaaggacctcgaccctcgtttaataagctctctaaggttaccatcgctagagaaaggcatatgccgggagccgcccacgtggttggaagccaaacactcgccagtcgtcttcagactagcatcaaaggctccgaagcggaaagcaccccccctagtttcatgtctgtgcacgcccaactggccgggtcattgggggggcaacctgcccctatccagacacaatcactgagtcacgaccccgtgtctggaacccagggcttggaaaagaaggtaagtcccgatcctcaaaaatcaagtgaagatattcgcaccgaagctctggcaaaggagatcgtacatcaggacaagtcacttgccgatatcctggatccagatagccggttgaaaactacaatggacctcatggagggcctgttcccccgcgacgtgaatctgcttaaagagaacagcgtgaaaaggaaggcaatccaacgcacagtgagctcttctggttgtgagggtaagcggaacgaggacaaagaggcagtgtccatgttagtgaactgccctcagatatccttccctaggctagggccttggctgtgcccccagacctcacgcgtctcacccttcttgctaggggcggttctatctgtagtgttctcacagcactag

SEQ ID NO: 205058 - DNA, 5991 bp, synthetic construct
  misc_feature 1..5991: note = Description of Artificial Sequence: Synthetic coding sequence
  source 1..5991: mol_type = other DNA
atgatgcggaccaccgaggacttccacaagcccagcgccaccctgaacagtaatacagccacgaaggggcgttacatctacctcgaggctttccttgagggcggcgcgccgtgggggttcacactcaagggcggtctggaacatggcgagccattgatcatctcaaaagtagaggagggcggcaaagccgacactctgtcttccaaactgcaggcaggcgatgaagttgtgcacattaacgaagtaactctctcaagctcccgaaaggaggctgtcagcctcgtgaagggttcctataaaacacttagactggtggttaggagggacgtgtgtacagaccccgggcacgctgacacgggcgcttcaaacttcgtttcgccggagcaccttacatccgggccacagcacaggaaagctgcatggagcggaggggtgaagctgcggctgaaacaccgaagatctgagcctgccgggcggcctcactcctggcacaccacaaaatccggagagaagcagccagatgctagcatgatgcagatctctcagggcatgataggtccaccctggcatcagagttatcacagcagttcctccacctcagacctgtctaactacgaccatgcatatctccgtcgctctccagatcaatgtagctcccagggctctatggaatctttggagccatctggcgcttacccaccctgccatctctcccctgccaaatccaccggcagtattgatcagctgtcccatttccacaacaagagggactcggcttattcatcattttccactagcagcagtatcttggaatatccccacccaggtatttcaggacgcgaacgctccggctctatggataacacatccgccagaggaggtctcctggaaggaatgagacaggctgacataagatacgtcaaaaccgtgtacgacacacgccgaggggtatccgccgaatatgaagtaaactcctcagcccttttattgcagggcagggaggctcgagcaagcgcaaacggccagggctatgacaagtggagtaatattcctcgaggcaaaggggttccgcctcccagctggagtcagcagtgcccaagctctttagaaactgccaccgataacctgcctcctaaagtcggtgctcctttgccgccagcgaggtccgatagttacgctgcatttcggcatcgggagcgccccagcagctggagtagcctggaccagaaacgcctctgccggccccaggccaattctttgggtagcctgaagtctccctttattgaggaacaattgcataccgtgctcgaaaagagtcctgagaactctccccccgtgaaacccaagcataattatacacagaaagcccaacccggccagccgctactgcctacctctatctaccccgtgccgtctctcgagccacattttgcacaggttccgcagccctccgtgtccagcaacggtatgctttaccccgccctggccaaagagtccggctacatcgccccccaaggcgcctgcaacaagatggccaccatcgatgaaaatggcaaccaaaatggatcagggcgtccaggcttcgccttttgtcaacctctggagcacgacctgttatccccagtggagaaaaaacccgaggcaaccgccaagtacgtgcccagtaaggtgcatttctgttcagtgcccgaaaatgaagaagacgccagcctgaaaaggcatctaacccctcctcagggcaatagcccacatagcaacgagcgcaaatcaacgcattcaaataagcccagcagtcacccccactcactgaagtgccctcaagcccaggcttggcaggcaggagaagacaagcgaagctcacgattgtctgagccttgggaaggggactttcaggaggaccacaatgccaatctttggcgcagattggagcgggaggggcttggacagtccctgtctggtaatttcgggaagaccaaaagtgccttcagctcccttcagaacatccccgaatcacttcgtcgacactcaagtctggaactgggccgcggcactcaggaaggctatcctggcggaaggccaacatgtgcagtcaacaccaaggctgaagatcccggccggaaggctgcgccagacttggggtcgcacctggaccgccaggtgtcgtatcctagaccagaggggcgcacaggcgccagtgcatccttcaattctacggaccctagcccggaggagccacccgccccctctcacccccacacgtcaagtttgggacggagaggccccgggcccggctccgcctcagcgttacagggatttcagtatggtaagccacattgctcagtactggagaaagtgtcaaaattcgaacagcgggagcaaggctcacagaggccgtctgtaggcggctccggattcggccacaattaccgcccccaccgaacagtcagcacttccagcacctccgggaacgactttgaagaaacaaaagcccacatcaggttttctgagtcagcagaacccttaggaaatggcgagcagcactttaaaaacggcgaacttaagctggaggaggccagccgacagccttgcggacaacaactctcagggggagcgagtgatagtggcaggggcccacagagacccgacgcgcggctgttgcgctcccaatcaaccttccagttgagttcagaaccagaaagggagcctgagtggcgggaccgcccaggttcacccgaaagtcccctgctcgatgctcccttttctcgtgcttataggaattctatcaaggacgcccaaagtcgggtgctgggcgcgacaagctttcggcgcagggacttggagctgggcgcaccagtggcctccaggtcgtggcggcctaggccctccagtgctcacgtgggcctgagatcccccgaggctagcgcctcggcttccccacatacacccagggaacggcacagtgtgacacccgctgagggcgatttggctcgtcccgtcccacctgccgctcgccgaggtgcccggcgccgcctcacacccgaacagaaaaagagatcatattcagagccagagaaaatgaacgaggtaggcatcgttgaggaagccgaacctgctcccctcgggccccagagaaatgggatgcgctttcccgaaagtagtgtagcagaccgccgccgcctgtttgaacgtgacgggaaagcctgctctactttgagtttgtcgggccccgaattgaagcagttccagcagagtgccctcgctgattatattcagagaaagaccgggaaacgtcctaccagtgcagcaggctgcagtctacaggagcccggacccctaagggagagagcccagtctgcctatctgcagcccggccccgcggctctcgaaggctcaggactagcatctgcttccagcctgtcatcactccgtgaaccatcccttcagcccaggcgcgaggccaccctcctgccagccaccgtagctgaaacacagcaggcaccacgagatcgcagttcctcatttgccggagggcgccgcctaggggagaggcgacgcggggacctcctgtcaggcgcaaacggagggacaagaggcactcagcggggggatgaaactccccgggagccaagcagttggggtgcccgcgctggaaagagcatgtctgctgaagatttgcttgaacggtcagatgtgcttgcaggcccagtacacgtgagaagtcgatcatccccggctaccgccgataagcgccaggacgtgctgctcgggcaggatagtggctttggcctggtcaaggacccatgttatctcgcagggcccggcagcaggtccctctcatgttccgagcgtggccaggaagaaatgttgccgctgttccaccatctgacccccagatgggggggctcggggtgcaaggctattggggactcttcagtgccctccgaatgccccgggactctggatcaccagagacaggctagtcgtactccctgtccccggccgccacttgcaggcacacagggtcttgtcactgatacgagagcagctccgctaacacctatcggcacccccctgccaagtgcaattcccagcggatactgctcccaagatgggcaaaccggccgtcagccccttcccccatacaccccagctatgatgcatcgctccaatggccatacactgacacagcccccgggtccacggggctgcgaaggagatggcccagaacacggggtcgaagagggtacccgcaaaagagtgagtctgccccagtggccccccccgagtagagctaaatgggctcatgctgccagagaggacagcctgcccgaagagtccagcgcaccagacttcgccaatctgaagcattatcagaaacagcagtccctgccatcattgtgttcaacctctgatccagatacccccctcggtgcgcccagcacaccaggccgaatctcactacggatcagtgagtccgtcctcagggactcaccaccgccacacgaagactacgaggatgaagttttcgtccgggatccacaccccaaggctacatcttcacctacatttgagcctctcccccctcctccacccccacccccttcacaggaaacccctgtatactcaatggacgatttccccccacctccccctcacacagtgtgtgaagcccagctggatagcgaggatcctgaaggcccccgcccaagttttaacaagttatccaaggtcaccatcgctcgggaacgacacatgcctggtgccgcccacgtggtgggttctcagactctggcctctaggctccagacaagcatcaaaggaagtgaagctgagtctacaccccccagttttatgtccgttcacgcgcagcttgccgggtcgctaggggggcagcccgcgcccatccaaacacaatctttgagccatgatccagtttcaggcacccaagggctcgagaaaaaggttagtcctgacccacagaaatcttccgaggatatacgcacggaggcactggctaaagagatcgtgcatcaggataagtcgttggctgatatcctggatcccgattcccgcctcaaaaccacaatggacctgatggaagggctgtttccacgcgatgttaacctgttgaaggagaacagcgtgaagcgcaaagccatccaacgaaccgtctcatcttctggatgcgaggggaaaagaaatgaggacaaagaggctgtgtccatgctggtgaattgccctgcgtattactccgtctcagctcccaaagcggagcttttaaataagataaaggagatgcccgctgaggtcaatgaggaggaggagcaggctgatgtgaacgagaagaaggctgagttgatcgggtcactgacacacaaactggagacactgcaggaggccaaaggctctcttctgaccgatattaaacttaataacgctctgggcgaggaggttgaggcacttatcagtgagttgtgtaaacccaacgaattcgacaagtacagaatgtttataggggacctcgataaggtggtcaatttgctgttgtcccttagcggcagattggcacgcgttgaaaatgtactgagcggcttgggggaggacgccagtaatgaggagcggagtagtctgtatgagaaaagaaaaatcctggcagggcaacacgaagatgctcgcgagttgaaggagaatttagatcgccgggaacgagtcgtgctaggcatattggccaattatttaagcgaagagcaacttcaggattaccaacattttgtcaaaatgaagtccactctcttaattgagcagcgcaagttggacgacaagattaagctcggccaggaacaggtcaaatgcctcctggagtctctgccttccgacttcatcccaaaagctggggccctggcactgcctccaaacctgacctctgaacccatcccggcaggaggatgcacttttagcggaatttttcctacacttacatctccgctgtag

SEQ ID NO: 205059 - DNA, 561 bp, synthetic construct
  misc_feature 1..561: note = Description of Artificial Sequence: Synthetic coding sequence
  source 1..561: mol_type = other DNA
atggccttctacagcaccaccgagtacgacatccagctggcccgggggctcttatcaggcatgttcctgttcgccactagacgatctgagcccgccgggcgaccacacagttggcatacaacaaagtcgggcgagaagcagccggatgccagtatgatgcagatttctcagggcatgatcgggccaccgtggcaccaaagctaccacagtagcagcagtacttccgacctgagcaactatgatcacgcctatctaagacgtagtcctgatcagtgtagttcccagggatctatggagagtctcgagccctccggagcttaccccccatgccacctcagtcccgccaaatccactggcagtatcgaccagctcagccactttcacaacaagcgtgactcggcatactctagcttctctacaagctcctccatcctcgaatacccccaccccggaaagagggtgaaaaccagagacttacctggctcacagtcccccggacgcgccatcagccgcaaaaccaccatgcccacgagcgggggaggatggcgggaaaaggcctag

SEQ ID NO: 205060 - DNA, 4482 bp, synthetic construct
  misc_feature 1..4482: note = Description of Artificial Sequence: Synthetic coding sequence
  source 1..4482: mol_type = other DNA
atggagaaccggcccggcagcttccagtacgtgcccgtgcagctgcaaggaggagccccctggggatttacgctcaagggaggcctggagcactgcgaaccccttaccgtctcaaaaattgaagacgggggcaaagctgcgctaagtcagaaaatgcggacaggtgatgaactggtcaacattaacggcactcccctgtatggatctaggcaagaagcacttatattaattaaaggttcattccgcatccttaagctaatcgtccgtaggaggaatgccccggtgtctcgtccccactcatggcacgtggctaaactcctggaaggttgccctgaagcagcaactacgatgcattttcccagtgaagcctttagcttaagttggcatagtggatgcaatacgtctgacgtttgcgtgcagtggtgtcctctgtccagacattgctccacagagaaaagtagttctatcggcagtatggagagcctggaacagcctgggcaagcaacgtatgaatctcacctcctgccaatagaccaaaacatgtaccctaaccaaagggattcagcctactcgtccttcagcgcctcatcaaatgcctctgattgcgccctctcactgcgacctgaggagcctgcctctactgattgcatcatgcaaggcccagggccaactaaggcccctagcggtaggcctaatgtggccgagacaagcggcggtagcaggcgtacaaacggtgggcacttaaccccatcctcccagatgtcaagccgccctcaagagggctatcagtcgggacccgccaaggccgttcggggccctccccagcccccagtgaggcgagatagtcttcaggcatctagggctcaactcctgaacggagagcaacgcagggcctccgagcctgttgtgccattacctcagaaggagaaactctcactggagcccgttttgcccgccagaaaccctaatcggttctgctgtttgtctgggcacgatcaggtgactagcgaggggcatcagaactgcgagtttagccaaccaccagagagctcccagcaaggttctgagcatttacttatgcaggctagcacaaaggccgtcggctcccctaaagcctgtgaccgagcttcctcagtcgactccaaccctctgaatgaggcatccgccgagcttgccaaggcctctttcggcaggcctccccatctgattggccccacaggccacaggcacagtgcacctgagcaactgttagcgtcccatcttcaacacgtgcatcttgatactcgcggcagcaaagggatggagctgccacccgtacaggacgggcaccaatggactctctcacccctccacagctctcacaaaggaaaaaagagtccctgtccccctaccggaggtacacacgatcagagctctaaagaaagaaagacccgccaggtagacgatagaagtctggttctgggccaccagtcacagtcctcgcccccacacggcgaggcggacgggcatcccagtgagaaaggattcctggaccctaaccggacaagccgcgcggcatctgaactggcaaaccagcagccttcagcctccggatctctggtacagcaggccactgattgctccagcaccacaaaagcagcatctggcaccgaggccggagaggaaggagactcagaacccaaagagtgtagtcgcatggggggcagacgctcaggcggaacacggggccgtagtatacaaaacagaagaaagtccgaacgattcgccaccaaccttagaaacgagattcagagacgcaaggctcagctgcaaaagtcaaaaggaccattaagccaactgtgtgacaccaaggaacctgtcgaagaaactcaagagccccccgagtccccccctttaacagcatccaacacttcactgctttcctcctgcaagaagcccccgtcaccgagggataaactattcaataagtccatgatgctccgggccaggtcatcagaatgtctcagtcaggccccggagtcccacgagagtcgaacgggtcttgagggacggatatccccaggacagcgacctggtcagtcctctctgggacttaacacctggtggaaagctccagatccatcttcttctgatcccgagaaagcccatgcacactgtggcgtgagggggggccactggaggtggtctcctgagcacaattcccagcctctagtcgccgcggccatggagggcccttctaacccgggtgacaataaggagctgaaagcttctactgcgcaagcaggcgaggatgcgattctcctcccttttgccgatagacggaagttttttgaagagtcctccaagtctctctctacttcccatctccctggcctgactacccatagtaacaaaaccttcactcaacggcccaaacctattgaccagaacttccagcctatgagctcctcttgccgcgagctcagaaggcaccccatggatcagtcttaccattcagcagaccaaccgtatcatgccaccgaccagtcttaccattccatgagccctcttcagagcgagacgccaacatactccgagtgttttgctagtaagggcctcgagaactccatgtgctgtaagcctctacattgtggagacttcgactaccatagaacctgctcctactcctgcagtgtgcagggtgccctggtacacgatccttgcatatattgtagcggtgagatttgcccagcacttcttaagcggaatatgatgccaaactgctataattgtcgctgccatcaccatcagtgcattagatgttccgtgtgctaccacaatccacagcattccgcactcgaggacagttccctggctccaggcaacacttggaagcctagaaagctgaccgttcaggagttccctggcgataaatggaatcctataacaggcaatagaaaaacatcacagagtggtcgggagatggcgcactctaagacttcattctcttgggccactccttttcatccctgtctcgagaatcctgctctcgatctgagcagttacagggctatctctagtctggatctgttaggggattttaaacacgctttaaaaaagtcagaagagacgtccgtgtacgaggagggctccagtcttgcctccatgccccacccacttcggagccgcgccttctcggaatctcacatctcattggcaccacaatcgacccgagcttgggggcagcaccgccgagaactcttcagcaagggcgacgagactcagtctgacttacttggggctaggaaaaaggcattcccccctccccggcctccacctcccaactgggagaaataccggctctttcgagccgctcagcagcagaaacagcaacagcaacagcaaaaacagcaagaagaagaagaagaggaagaggaggaggaggaggaggaagaagaggaagaggaagaagaggctgaagaagaagaggaagagctccctcctcaatacttttcttctgagacttcaggcagctgtgcattgaaccccgaagaagtgctggagcagcctcaacccctctctttcggacacctcgaaggtagccggcaaggcagccaatccgtgccagcagaacaagaatcattcgctctgcattcatcagacttcctgccaccaatacgtggtcacctcggcagtcaacccgagcaagcccagcctccatgttactacggtatcgggggtctctggaggactagcggtcaagaggcaactgagtccgctaaacaggagttccagcacttctcaccaccaagtggggcaccgggcattcctacctcatacagcgcctattacaatatcagcgtggccaaggcagagttgttgaataagttaaaggatcagccagaaatggctgagattggacttggggaggaggaagtcgatcacgagctggcccagaaaaaaattcagctgatcgagtccatttcacgcaagctgagcgtgctgagagaggcccagaggggactgctggaggacattaacgctaatagtgcactgggtgaggaagtcgaggcaaacttgaaagcggtctgtaaatccaatgaatttgagaagtaccatcttttcgtgggcgaccttgataaagtggtaaacctgctgttatcactttctggcaggctcgctagggtcgagaatgcgttaaatagcattgacagcgaggcaaaccaggagaagcttgtactgatcgagaagaagcagcagttgacggggcagctcgctgatgccaaagagctaaaggaacatgttgaccgcagagagaagttagtttttggcatggtgtcacggtatttgccgcaggaccaacttcaggattatcagcactttgtcaagatgaagagtgcgttaatcattgagcagcgggagctcgaggagaaaataaagttaggagaggagcagctgaagtgtctgagagaatccttgctgcttggaccaagcaatttctag

SEQ ID NO: 205061 - DNA, 4482 bp, synthetic construct
  misc_feature 1..4482: note = Description of Artificial Sequence: Synthetic coding sequence
  source 1..4482: mol_type = other DNA
atggagaaccggcccggcagcttccagtacgtgcccgtgcagctgcaagggggagcaccctggggatttactttaaaagggggcctggagcactgtgaacctctgacagtttccaaaattgaggacggcgggaaagccgcgttatctcagaagatgcgaaccggcgatgaactggtcaatattaatggcactccgctgtacgggagccggcaggaggctctcatcctgatcaagggtagcttcagaatcctgaaactcatcgttcggagaagaaatgcaccagtgagcaggccacattcttggcatgttgctaagctgctggagggttgtccagaggccgccaccactatgcacttcccatcggaggctttctccttgtcctggcacagtggctgtaatacaagtgatgtctgtgtgcagtggtgtcccctcagtcggcactgcagtaccgagaagtccagtagcataggcagcatggaatccctggaacaacccggccaggctacttacgaaagccacctgctaccaatagaccagaatatgtaccctaaccagcgggatagcgcctattcctctttcagtgcaagctctaacgccagcgactgcgccctcagccttcggcccgaggaacctgcatccactgattgcatcatgcaaggccctggccccaccaaggccccaagcgggaggcccaacgtggcggaaacttctggtggttcaagacggaccaacgggggacatctgactcccagtagtcaaatgtcatcccgcccccaggagggctaccaatccgggcccgcaaaggcggttcgcggcccaccacaaccacccgtcagacgagactcacttcaggccagccgagcccaattactgaacggtgaacagagacgagcctcggagccagtggtccctctgccacagaaggaaaagctaagtctggagccagtcctacctgccagaaaccccaatcgcttctgttgcctgtcaggccacgatcaggtcacatcagaaggacatcagaattgcgagttctcccagccacctgagtcttcacagcagggcagcgaacatctgcttatgcaggcaagtactaaggcagtaggctcccctaaggcttgtgatagagcctcatcagtagactccaatccgctgaacgaagcgagtgccgagctggcaaaggcctcctttggccggccacctcacctgatagggcccaccggacatcggcatagcgccccggagcagctcctggcctcccacctccaacatgtgcacctcgatactcggggctccaagggaatggagttgcctcccgtgcaggatggtcatcagtggaccttgagccctcttcactcctcacataagggcaaaaagagtccatgcccccccacaggggggacacacgatcaatctagcaaggaacgaaagacccgacaagtggacgatagatcccttgttctgggccatcagtctcagtccagcccccctcatggagaggctgatggccatccttcggaaaaggggttccttgatcctaatcgcactagtagggctgcctcagaactggctaatcagcagccaagcgccagcgggtccctggtgcagcaggcaaccgactgctccagcacaactaaggccgcatctgggaccgaagcaggcgaggaaggcgactcggagccaaaagagtgctctaggatgggcgggcggagaagcggaggaacgcgggggagaagcatccagaaccggcggaaaagcgagcgttttgccacaaatctcaggaacgagatacaacgccgcaaagctcagctgcaaaaatctaaaggacctctctcacagctgtgtgatactaaagagccagtagaagagacccaggaaccacctgagtctccgcccctaaccgcttcaaatacctcactgcttagctcatgcaaaaagcccccatccccaagagacaaactctttaataagtcaatgatgctacgggcccgtagtagtgagtgcctatctcaagccccggaatctcatgagtcccgtacaggactggaagggcgcatttctcctggccaaagacccggccagagctcactgggattgaacacatggtggaaagccccagatccatcttcctctgatcccgaaaaggctcatgcccactgcggcgtccggggcggacattggcgctggtcacccgagcataactctcagcctctagtggcagcagctatggaaggcccctcaaatcccggagacaacaaggaactcaaggctagtactgctcaagctggggaggatgctatcttactgcccttcgcagataggagaaagttcttcgaagaaagctctaaaagtctaagtactagccacctaccgggtttgaccacccatagcaataagacatttactcagaggcccaagcccattgatcagaactttcagcctatgagcagttcctgccgcgaattaagacggcatcccatggaccagtcttatcattcggctgatcagccttatcatgcgaccgaccagagctaccacagtatgagcccactgcagtccgagacccccacctactccgagtgcttcgcttccaaagggctcgaaaatagcatgtgttgcaagccactgcactgcggcgacttcgattaccaccgaacttgttcctactcttgttcggtgcagggcgccttggttcacgacccctgtatatattgcagtggggagatatgcccagccctcctaaagcggaatatgatgcccaattgctacaactgcagatgtcaccaccaccaatgcatccggtgctccgtgtgctatcacaatcctcaacatagtgcgctggaagactcctctttagcacctggaaacacatggaaacccagaaagctgacagtgcaggaatttcctggggacaagtggaacccaattacagggaatcggaagacaagtcagtcagggcgggagatggcacattctaagacctcatttagttgggcaacccccttccacccctgcctcgagaaccctgctctcgatctgagctcttatagggctatatcctcactggacttgttaggagattttaagcatgctcttaagaagtctgaagagacttcagtgtacgaggaaggcagttccctggctagcatgccgcacccactccgtagtagggctttcagtgaaagtcatattagcttggccccccaatcaactcgagcctggggccaacatagacgggagctgttctccaaaggggacgaaacacagagcgaccttctgggcgcccgcaagaaagcctttcctccccctcgcccaccaccgccaaactgggagaaataccgcctattcagagccgcccagcagcaaaagcaacaacagcagcagcagaagcagcaggaggaggaggaggaggaggaagaggaagaagaagaggaagaggaagaggaagaagaggaggctgaggaagaagaggaggaactgccgcctcaatattttagttccgagacttccggctcatgcgcactcaatccagaggaggtgctggagcaaccccagccgctgtccttcggccatctggaggggagccgacaagggagccagagcgtgcccgcagagcaggaaagctttgccctgcactctagcgatttcctgcctccaattcggggacacttgggaagtcagcccgaacaagcacagcctccatgctattatggcatcggcggactctggaggactagcggccaagaagccacggagagtgcaaaacaggagttccagcactttagcccaccttccggtgctcccggcattcctacgtcctatagtgcctactataatatctctgtcgccaaagcggagttactcaataagctgaaagaccagccagagatggcggagatcggcctgggtgaggaggaagtggatcacgagctggcacagaaaaagatccagttaatagaatctataagccgcaagctcagtgtcctccgcgaggcccaacggggtctgttggaagatataaacgcaaattcggctctcggagaagaggtggaggcaaatcttaaggctgtgtgtaagtctaatgagttcgaaaaataccatctattcgtaggagatcttgacaaagtggttaacctgttattatccctgtctggacgacttgccagggttgagaatgcccttaattctattgacagcgaggctaaccaggagaagcttgtgctgatcgaaaaaaagcagcagctcactgggcagctggcggatgccaaagaactgaaggaacatgtggaccgccgcgaaaaattggtgttcggaatggtaagcaggtatctcccgcaagatcagttgcaagactatcagcattttgtgaagatgaaatctgctttgattattgaacagcgagaattggaggagaaaattaagctgggagaagagcagctgaaatgcctccgcgaatccctgctgctggggcccagtaatttttag

SEQ ID NO: 205062 - DNA, 4134 bp, synthetic construct
  misc_feature 1..4134: note = Description of Artificial Sequence: Synthetic coding sequence
  source 1..4134: mol_type = other DNA
atgcacttccccagcgaggccttcagcctgagctggcacagcggctgcaatacctccgatgtttgtgtgcagtggtgccctctcagtcgccattgctccacggaaaaatcatcctccatcgggtcgatggagtccctggaacaacccggacaagctacatatgaaagccatctgctgcctattgaccagaatatgtaccctaatcagagagacagtgcgtatagtagttttagcgcttccagcaatgcttcagattgcgccttgtcgctgcgtcccgaggagccagctagcaccgattgtattatgcaaggtccaggtccaactaaggccccaagtggccggcccaacgtggccgaaacatcaggaggatccaggcgcactaacggaggccacctgactccttcatcccaaatgagttctcgccctcaagaaggatatcagtccgggccggcaaaggccgtgcggggtccaccgcagcctccagtgcgcagagacagtctccaggcgtcgcgcgcacagttactaaatggcgagcagagacgcgcatctgagccagtggtacctctgccccagaaggaaaaactctccttagagccagtcttgcccgcaaggaatcccaaccgcttttgctgcctaagtggtcacgaccaggtgacttccgagggacaccagaactgtgagttcagtcagccacctgagtcatcacaacaggggagcgagcacctgctgatgcaggccagtaccaaggccgtgggctcaccaaaagcctgtgacagagcctcctccgttgacagtaatcctctgaacgaggcttccgccgaattggccaaggcaagttttgggcggcctccccacctcatcgggcccaccggccatcgccatagtgctccagaacagttgctagcatctcatctgcagcatgtgcatctggacaccaggggcagtaaaggtatggaactgccccctgtccaggatggccaccaatggacattgtctcctttacattcatcccacaagggaaaaaagagcccatgtccgccgactgggggcacacatgatcaatctagcaaagagaggaagactcggcaggtagatgatcgcagcctcgtattgggacaccaatcccaaagctcacctccgcacggggaggcagacgggcatccatcagagaagggtttcctcgatcccaacagaactagcagggcagccagcgagctggccaatcagcaacctagcgcgtcaggctcgttagtacagcaagccaccgactgcagctcaactacgaaggccgcctctgggacggaggccggtgaggagggcgatagcgagccgaaggaatgtagcaggatgggcgggcggcgcagcggagggacccgtggacggagcattcagaaccgtaggaaatctgagcgctttgctactaacctcagaaacgagatccagagaagaaaggcgcagctccaaaagtcaaagggaccattgtcacaactgtgcgacaccaaggagccagtcgaagagacacaggagcccccggagagcccaccactgactgcttccaatacgtccctgctgtcgtcttgtaaaaaaccaccctcaccacgcgacaagcttttcaacaagtctatgatgctgcgagcaagatcatcagagtgtctcagccaggctcctgaaagccatgagagccggacaggactcgaaggtcggatttcgcctggacagaggcccggacagtcctctttaggccttaacacctggtggaaggcacccgatcctagcagtagtgaccctgagaaggcacatgcccactgtggcgtgaggggcgggcactggcggtggagcccggagcacaactcccagccattggtcgctgctgccatggaaggtcctagcaaccccggggacaacaaggaacttaaagcgagtactgcacaagctggtgaggatgctatcctgttgcccttcgctgaccgtcggaaatttttcgaggaaagcagtaaaagtctctctactagtcacctgcccgggctaactacacacagcaataagactttcactcagcggccaaaacccattgatcagaatttccagccaatgtcgtctagttgtcgggagctacgcaggcatcccatggaccagagctatcactcagccgaccagccctaccatgcaaccgatcaatcgtaccactccatgagtcccctccagtccgagacaccaacatactctgaatgtttcgcctcaaaaggactggaaaactcgatgtgttgcaaaccgctgcattgtggagactttgactaccatagaacgtgtagttattcatgttcggtgcagggagctctcgtgcatgacccttgtatttactgtagcggagaaatctgccccgcactcctcaagaggaacatgatgccaaattgttacaattgtagatgccaccaccatcaatgcatcaggtgctcagtgtgctaccacaacccacagcactcagccctggaagattcgtcactcgccccagggaacacatggaaaccccggaaactgaccgttcaggaattcccaggagataaatggaaccccatcactggcaatagaaagaccagtcagagcggtagggagatggcacatagcaaaacctctttttcatgggccacccccttccatccctgcctggagaatcctgccctggaccttagcagctatcgggccatcagcagcctggacttactgggggatttcaaacacgccttgaagaagagcgaagagacatcagtgtacgaagaaggctccagtctggcttctatgccccatcctcttcggagcagagcattttcagagagccatatctctctggcaccacaatcaacacgcgcctgggggcagcacaggagagaactgttctcaaagggcgacgaaacccaatcagatcttctgggtgccagaaagaaagccttccctcctcctcggccaccgccccctaactgggaaaaatatagactatttcgggctgcccagcagcaaaagcagcagcagcagcaacagaaacagcaggaggaagaagaagaagaggaagaagaggaagaagaagaggaggaagaagaagaagaggaagctgaggaggaagaggaggagcttccaccccagtacttctcctcagagaccagcgggagttgcgcactgaacccggaggaagttttagaacaacctcagcccttgagttttggccatttagagggcagcaggcagggtagccagagcgtcccagccgagcaggagagctttgccctccacagctcagattttttgccacccattcgtgggcatctcggctcacagccggagcaggcccagcccccgtgttattatggcattggcggactctggaggaccagcggccaagaagcaactgaaagcgcaaaacaggaatttcaacattttagcccgccctctggcgcaccaggtatccctacatcctattctgcctattacaatatttcagtagcaaaggccgaactcctgaacaagctaaaagaccagccagaaatggcagagatcggcctgggcgaagaggaagtcgatcatgaattagctcagaagaagattcagctgatcgagtcgatctctaggaagttgtctgttcttagagaagctcagcgtggcttgctcgaggacattaatgctaactcagctctcggtgaggaagtggaagccaaccttaaggctgtctgcaaatccaacgagttcgagaaataccatctgtttgtcggtgatctggacaaggtcgtgaacctcctgctttctctctccggacgcctagcccgggtggagaacgccctaaacagcatcgacagcgaagctaatcaggagaagctcgttcttatcgagaagaagcaacaactcactggacaactggccgacgccaaggaactgaaggaacatgttgatagacgggagaagttggtgtttgggatggtctccaggtacttgccccaagatcagctgcaggattatcagcacttcgtaaaaatgaaatcggcactgatcatcgagcagcgggaactcgaggaaaaaatcaagctcggggaggagcaactgaaatgcctccgtgagagtctgctgctcggaccaagtaatttttag

SEQ ID NO: 205063 - DNA, 1686 bp, synthetic construct
  misc_feature 1..1686: note = Description of Artificial Sequence: Synthetic coding sequence
  source 1..1686: mol_type = other DNA
atggccaaggagcggtgcctgaagaagagcttccaggacagcctggaggatattaagaaaaggatgaaagaaaaacggaacaagaatttagctgaaatcggcaagcgtcggtcattcatcgccgccccctgccaaatcattaccaacacttctacgctcctgaaaaactaccaggacaacaataagatgcttgtgttagccctggaaaacgagaaatcaaaagttaaagaagcgcaggatatcatcctgcagctgcggaaggaatgttattacttaacctgccaactatacgccctgaaggggaaactcacaagccagcagaccgtggagcccgcccagaatcaggaaatttgttcatctgggatggacccgaactctgacgattcatccaggaatctgtttgtgaaagacctgccccaaattcctctagaggaaacagagttgcctggccagggggagtctttccaaatagaagatcagattcccactattccccaggataccctgggggtcgatttcgactcaggggaagctaagagcactgacaatgtgctgcctagaaccgtctctgtgcgcagctcacttaagaaacactgcaactcaatctgccagtttgacagtctggacgacttcgagacgagccacctcgccggaaagtcttttgagtttgagcgcgtcggtttcctagacccgttggtgaacatgcacataccggaaaacgttcagcacaacgcctgtcagtggtctaaagaccaggtgaatctttccccaaaactcatccagcccggaacctttaccaagactaaagaagatatcctcgaatctaagtccgagcagaccaagtctaagcagcgcgacacccaagaacggaaaagagaggagaaaagaaaagctaaccgtcgcaaatcaaaaagaatgtccaagtacaaggagaataaaagcgaaaataaaaagactgtgccgcagaaaaagatgcacaagagtgtatccagtaacgacgcgtacaacttcaatctcgaagagggcgtccatctgactccctttaggcagaaagtctctaatgattccaacagggaggagaacaatgaatcagaagtgagcctctgcgagagtagtggtagcggggatgattccgatgatctgtacttgcccacctgcaagtacattcagaatccaacctccaactccgaccggcctgtgacaagacccttggctaagagagccctcaaatacaccgacgaaaaagagaccgagggaagtaagcctaccaaaactcccacaacaacgcccccagagacgcagcaaagcccccatctcagcctaaaggacatcaccaatgtgagcctgtaccctgtcgtgaaaattcggcggctgtccctttctcccaagaagaacaaggcctcacctgcagtggcacttccaaaaaggagatgtacagcctccgtgaattacaaggagccaaccttggctagtaagctgagacggggggacccatttacagatctatgcttcctgaattctccgattttcaaacagaagaaagatctgcgccgttctaaaaaacgagcactcgaagtcagtccagccaaagaggcaattttcatcctgtattatgtgcgcgagttcgtgagccggtttcccgattgcaggaagtgcaagttggagacccacatctgcctccggtag

SEQ ID NO: 205064 - DNA, 879 bp, synthetic construct
  misc_feature 1..879: note = Description of Artificial Sequence: Synthetic coding sequence
  source 1..879: mol_type = other DNA
atggccaaggagcggtgcctgaagaagagcttccaggacagcctggaggatatcaagaagcggatgaaggagaaacggaataagaatttagctgaaattgggaagcgtcggagcttcatcgccgcaccttgccagattataactaacacttcaactttgcttaagaattatcaggacaacaacaagatgttagtgctggcccttgagaatgagaaatctaaggtgaaggaggcacaggacatcatcctgcagctcaggaaggagtgttactatctcacatgccagctctacgctctgaaaggtaaacttaccagccaacaaacagtcgaacccgctcaaaatcaggagatctgctcatccggaatggacccaaacagtgatgatagttcacgcaacctgtttgtcaaagacctgccccagatcccactcgaggagaccgagttacctggacagggcgagtcatttcaaatcgaagccacacctcccgaaacgcagcaaagtccccatctgagcttgaaggacatcaccaatgtttctctatacccagtcgtgaaaattaggaggctgtcccttagtccaaaaaaaaacaaagcatctccggctgttgccttgccaaaaaggcgttgcactgcgagtgtgaattacaaggaacctactctggcctcgaagcttcgaagaggtgatcccttcacagacttgtgttttcttaactccccaatttttaaacagaagaaagacctgcggaggtccaaaaaacgcgctcttgaggtgtccccagccaaagaggctatttttattctgtattacgtgagggaattcgtgagtcgcttccccgactgtagaaagtgtaagctcgaaacacacatttgcctgcgctag

SEQ ID NO: 205065 - DNA, 648 bp, synthetic construct
  misc_feature 1..648: note = Description of Artificial Sequence: Synthetic coding sequence
  source 1..648: mol_type = other DNA
atggccaaggagcggtgcctgaagaagagcttccaggacagcctggaagatattaagaaacgcatgaaggagaagagaaacaagaacctggctgaaattggcaaacggaggagttttatcgctgctccctgtcagatcataaccaacacctctactctgctgaaaaactaccaggacaacaataaaatgctggtcctggccctggaaaatgagaagtccaaagtgaaagaggcccaagatatcatattacagttgcggaaggaatgttactaccttacatgtcaactttatgctctcaagggcaaactaaccagtcagcagaccgttgagccagcccagaaccaggaaatctgctcctccggaatggaccctaactccgatgactctagcaggaacctctttgtgaaagatctgccacagattccactcgaggagactgagcttcccggacagggcgaatctttccaaatcgaggatcagattcctacaatacctcaggacactcttggtgtggactttgattctggcgcccttgaggtgtcacccgctaaggaggcgatctttattctgtattacgtgagagagtttgtcagccgctttcccgattgtaggaaatgcaagctagaaacccatatctgcctccgctag

SEQ ID NO: 205066 - DNA, 1584 bp, synthetic construct
  misc_feature 1..1584: note = Description of Artificial Sequence: Synthetic coding sequence
  source 1..1584: mol_type = other DNA
atggccaaggagcggtgcctgaagaagagcttccaggacagcctggaagacatcaagaaaaggatgaaggagaagagaaataagaaccttgccgaaatagggaaaaggcgttcttttatcgcagcgccttgtcaaataatcactaacaccagcaccctgctgaaaaactaccaggacaataataagatgttggtcttagcactggagaacgagaagtccaaagttaaagaagcgcaggatattatcctccagttacggaaggagtgttactacctgacctgccagctttatgcactgaaggggaaattaacctctcagcaaaccgtggagcctgctcaaaatcaggaaatctgctcctctggcatggatcctaattcagacgattccagccgcaacctgtttgttaaagacttaccacaaattcctctcgaagaaactgagctgccagggcagggagagtcttttcagatagaagatcagattccaaccataccacaggatactctgggggtggactttgactccggagaggccaagtcaactgacaacgtgctgccccgcaccgtgtcggtgagatcctcccttaagaagcactgtaacagcatttgccagtttgactccctcgacgatttcgaaacttctcatcttgcaggaaagtctttcgagttcgagcgagtgggattcctggaccctcttgtcaacatgcatatccccgaaaacgttcagcacaacgcctgtcaatggagcaaagatcaggtgaatcttagccctaaactgatccaacccggcacattcactaagaccaaggaggacatcctggaaagtaaaagtgaacaaactaagagcaagcagcgagacacacaggagcggaaacgcgaggagaagcggaaggcaaacaggaggaaaagcaagcggatgtccaagtataaagagaataaatcagaaaacaaaaagaccgtgccacaaaaaaagatgcacaagtccgtatctagcaacgacgcctataatttcaacctggaggagggggtgcacttaacacccttcagacagaaggtaagcaatgattcaaaccgggaagagaataatgagtccgaggtttctctgtgtgagtctagcggttccggcgacgatagtgatgacctgtacctgccgacctgtaaatatatccaaaatcccacatcaaattcagaccgcccagtaacccgaccactagcaaaacgtgccctcaagtatacagatgagaaggaaactgagggtagtaagcctacaaagaccccaactaccactcctccagagacgcaacagagcccgcacctcagcctcaaagatattaccaacgtgagtctgtatccggtagtgaaaatccggcgtctatctctgtcccctaaaaaaaacaaagctagcccggctgtcgctttgcctaagagacgctgtaccgcaagcgtgaactataaggagccaacacttgccagtaagctccgtaggggtgacccattcactgatctgtgcttcctaaactcaccaatttttaagcagaagaaggatttacggagaagcaaaaaatctatgaagcagatccagtag
